United States Patent Application Publication US 2018/0126003 A1 - sequence listing, part 28

SEQ ID NO: 46207 - DNA, 1995 bp, Artificial Sequence
  derived and/or modified sequence
atgaagacggggctctttttcctttgcctgctgggtactgctgccgcaatccccaccaatgcccgattactatccgaccattccaagccgacggctgagaccgtcgctcctgataataccgccattccgtctctgagagccgaagcagaagagaacgaaaaagagactgccgtgtctaccgaggatgactcccaccataaggccgagaaatccagtgtcttgaagtcaaaagaagagtcgcatgagcagagtgccgagcagggcaagtcctctagccaggaactcggactgaaggaccaagaggattcagatggtcacctctctgtcaaccttgaatacgccccaacagagggtacattggacatcaaggaggatatgagcgaacctcaggagaagaagctgagcgaaaatacagacttcctcgcacctggcgttagctcgtttacagattccaaccagcaggagtctattaccaaacgcgaagagaaccaggagcagcctagaaattatagccaccaccaactcaacaggtcctcgaagcactcccagggtttgagggatcaggggaaccaggagcaggaccccaacatctccaacggggaggaggaagaggaaaaggagccgggcgaagtgggaacacacaacgataatcaggagcgcaaaacggagctaccaagggaacacgccaattccaagcaggaagaggacaacacgcagagcgatgacatcctggaagagtcagaccagccaacgcaagtaagcaagatgcaggaggatgagtttgatcagggtaaccaggagcaggaggacaattcaaatgcagagatggaagaggaaaatgcttccaatgtgaacaaacacatccaggagactgagtggcagtcacaggaaggtaaaacagggctggaagccatctccaaccacaaagaaacggaagaaaaaactgtgagcgaggcgttgcttatggagcctacggatgacggcaatacaaccccgcggaaccatggggtggatgacgatggcgacgacgacggagacgacggaggtaccgatggaccccgacactcagcctcggacgattatttcattccctcacaggccttcctggaagccgaacgcgctcagagcatagcttatcatcttaaaatagaagagcagcgagagaaggtccacgaaaacgaaaacatcgggactacggagcctggagaacaccaagaggcaaagaaggctgagaatagttccaacgaggaggaaacttccagtgaaggtaatatgagagtccatgctgtggactcatgcatgagcttccagtgcaagaggggccacatttgcaaagccgaccaacaggggaagccacactgcgtatgtcaggatccggtaacatgtccgcccactaaaccactggatcaagtctgtggcaccgataaccagacgtacgcaagttcatgccacctcttcgccaccaagtgtaggcttgaagggactaagaagggccaccaactccagttagactacttcggagcttgcaagtccattccaacttgcactgacttcgaggtgattcagtttcccttgcggatgcgcgattggctcaaaaatattctgatgcagttgtatgaggcaaacagtgagcacgctggttatttaaatgagaaacagcgtaataaggtgaagaagatctatctggacgaaaaaagattgctggcaggagaccacccaattgacctcctcctgagagattttaagaagaattaccatatgtacgtgtatccggttcactggcagttttccgaactggatcagcaccccatggacagagtgcttacccacagcgagctggctccactgcgggcctccctggtgccgatggagcattgcattacaaggttctttgaggagtgcgatccaaacaaggacaagcacattaccctcaaggaatggggccactgctttggtattaaggaggaagacattgatgagaacctgctcttctag

SEQ ID NO: 46208 - DNA, 426 bp, Artificial Sequence
  derived and/or modified sequence
atgaagacgggtctgttctttctctgcctgctgggcaccgccgcggcaatacccaccaacgctaggcttctttccgaccacagtaagcctaccgccgagaccgtcgcccctgataacactgccattccttctctgcgggccgaagcagaggaaaacgaaaaggagactgctgtgtctaccgaggacgacagccaccacaaggctgagaagagttccgtgctgaaaagtaaggaagagtctcacgagcagtctgccgaacaaggaaagtcatcctctcaggagctgggtctgaaagaccaggaagacagcgacggccatctctccgtgaacctggaatatgcgcctaccgagggaaccctggacattaaggaggatatgtctgaacctcaggaaaagaaactctcggaaaacactgacttcctgtag

SEQ ID NO: 46209 - DNA, 1620 bp, Artificial Sequence
  derived and/or modified sequence
atgtcagagccacaagagaagaagctgtcggagaacaccgatttcctggctccaggagttagcagttttactgattcaaaccagcaggagtctattacaaagcgcgaagaaaaccaggaacaacctcgtaactattcccaccatcagctcaatagatcctccaagcattctcagggtctgcgcgatcagggaaaccaggagcaggatcccaacattagtaacggagaggaggaagaagagaaggagccaggagaagtcggcacccataacgacaaccaggagcgaaaaactgaactgccacgtgagcatgccaactccaagcaggaagaggacaatacccagtccgacgatatcttggaggagtccgatcagccaacacaggtgtctaagatgcaagaagacgagttcgaccaaggtaaccaggagcaggaagacaattctaatgccgaaatggaagaggaaaatgcttcaaacgtaaacaagcacatccaggagacagaatggcagagccaggaggggaaaacaggactcgaggccatcagcaatcataaggaaacagaggagaagacagtttccgaagcccttctgatggagccaacagacgacggcaacacgacgccaaggaatcatggcgtagatgatgacggtgacgacgatggggacgatggtggcaccgatggaccgcgccatagcgccagcgacgattactttattccaagtcaagcgttcctggaggccgaaagagcccagtctatcgcttaccatctgaagatcgaagagcagagagaaaaagtgcatgaaaatgagaacattggcacaaccgagcccggtgagcaccaggaggctaaaaaagcagaaaattcgtccaatgaggaggagacctcatcggaaggcaacatgagagttcacgctgtggatagctgcatgagctttcaatgcaagcgagggcacatttgtaaagcagaccagcagggcaagccccattgcgtatgtcaggaccctgtgacgtgtccacctacaaagccgttagaccaggtctgcggaaccgacaatcaaacgtatgcgtcttcatgtcacctgttcgcaacaaagtgtaggctagagggcactaaaaagggacaccagctgcagctcgattattttggggcttgcaagtccatccccacatgtactgattttgaggtcattcagttccccctgagaatgcgcgactggctgaagaatatcctcatgcagctgtacgaagcgaactcggaacatgcaggctacctgaatgaaaagcagcgaaacaaggtcaaaaaaatatatttagacgaaaaacgactgctggctggggaccatcccatcgacctgctgttgagagacttcaaaaaaaactaccacatgtatgtctaccccgtgcattggcagttctctgagctggatcagcatcctatggatagggttctgacccactccgaactggcacccctgcgcgcatccttagtgcccatggagcactgtatcaccagattctttgaagaatgtgaccctaataaggataaacacattaccctcaaagaatggggtcactgcttcggaattaaggaagaggatatcgacgaaaacctgcttttttag

SEQ ID NO: 46210 - DNA, 171 bp, Artificial Sequence
  derived and/or modified sequence
atgaagactggcctgttctttctgtgcctgttgggaacagcggctgcaattcccacaaacgcgcgtctgcttagcgaccacagcaaacctaccgcagagaccgttgcccccgataacactgctatccccagccttcgggctgaagccgaagaaaatgaaaaagagacctag

SEQ ID NO: 46211 - DNA, 1620 bp, Artificial Sequence
  derived and/or modified sequence
atgagtgagccccaggaaaagaagttgtcagagaatacggactttctcgcccccggtgttagtagctttactgacagcaaccaacaggagtccatcactaaaagagaggaaaatcaggagcagccacggaactatagccaccatcaactaaacagatctagcaagcactctcagggccttagagatcagggtaatcaggaacaagacccaaatataagcaatggtgaagaagaagaggagaaagagcctggagaggtcggtacacataatgataatcaggagcgaaaaacagaattacccagagagcatgccaactcaaagcaggaagaggataatactcagtccgacgacatcttagaggaaagcgaccagcctacacaggtatcaaaaatgcaggaggacgagtttgaccagggcaatcaggagcaggaagacaactccaacgctgaaatggaggaggagaatgcttcaaacgtgaacaagcacatccaagagaccgaatggcagagccaggaaggcaaaactggccttgaggcgattagcaaccacaaggagactgaggaaaaaacagtaagcgaggcccttctaatggaaccgactgatgatggaaataccacccctcggaaccacggggttgatgatgacggggacgatgacggagatgatggcggcacggatggcccgcgccattctgcctcggatgattattttatcccatcacaagctttcttagaagccgagagggcccaatccatagcttaccacctgaaaatcgaggaacagagggagaaggtgcatgaaaatgagaacattgggacaacggagccgggcgagcaccaggaggcaaaaaaggcagagaatagctcaaatgaagaagaaacctcttcggagggcaacatgagagtccatgctgtagacagctgcatgagctttcagtgcaagcggggccatatttgcaaggcagaccagcagggaaagccccactgcgtctgccaggacccagtcacatgtccacccaccaaacctttagatcaggtgtgcggaacagacaatcaaacttatgcttcctcttgccatctcttcgcaacgaaatgccgacttgagggaaccaagaaggggcaccaactgcagctagactatttcggagcgtgcaaaagcattcctacttgcactgactttgaagtgatccagttcccactgcgaatgagagattggctaaagaacatacttatgcagctgtacgaggcaaattctgagcacgccggatacctcaacgaaaagcagaggaataaggttaaaaaaatctatctggacgagaagagactactggcgggagaccaccccattgacctcttgctccgggactttaagaagaattaccatatgtatgtttatcctgttcattggcaattctcagaattagaccagcaccccatggatcgagtgttgacccattcggagctggcaccgttgagggctagcctggtaccgatggagcactgtattaccagattcttcgaggagtgcgatccaaacaaagataagcacataaccctgaaggaatgggggcattgtttcggaattaaggaggaggatatagatgaaaatttgctgttttag

SEQ ID NO: 46212 - DNA, 435 bp, Artificial Sequence
  derived and/or modified sequence
atgaagaccggcctgttcttcctatgcctccttggcacagccgcagcaatccctaccaatgcccggctcttgtccgatcacagtaagcccaccgctgaaacggtggcccccgacaacactgccataccatcattgcgtgccgaggccgaagagaacgaaaaggagactgccgtatccaccgaagatgactctcaccataaagcggagaaatcgtccgtgctcaagtcaaaagaggagtcccacgagcagtccgcagaacagggaaaaagctctagtcaggagcttggactgaaggatcaagaggactcggacggtcacctgagcgtgaatcttgagtacgctcccactgaaggaactctcgatatcaaggaggatatgagtgaaccacaggaaaaaaaactctccgagaatacagattttctggccccaggatag

SEQ ID NO: 46213 - DNA, 363 bp, Artificial Sequence
  derived and/or modified sequence
atgaaaactggcttatttttcctgtgcctcttgggtaccgcagccgccattccgaccaatgccagattgctctctgaccattccaagcccacagcagaaacagtcgcccccgataacacagcaattccttcgctcagagccgaagctgaggaaaatgaaaaggagacggcggtgtcaacggaggacgacagccaccacaaggctgaaaagtcatccgtcttgaaaagtaaggaagaatcacacgagcagagcgccgagcagggtaagagctcatctcaggaactgggccttaaggaccaggaggacagtgatggtcacctgtcagtcaaccttgaatacgctcccaccgaaggaaccctgtag

SEQ ID NO: 46214 - DNA, 384 bp, Artificial Sequence
  derived and/or modified sequence
atgaagacaggtctattttttctctgcttgctgggaaccgctgccgccataccaaccaatgcccggctgctgtctgatcattccaaaccaacggccgaaactgttgcccctgataataccgctatccccagtcttagggccgaagcagaggagaatgagaaggaaacggccgtcagtacagaggacgactcacaccataaggctgaaaagtctagcgtgttaaagtcaaaggaagaaagccatgaacagtctgcagagcaggggaagtcttccagccaggagctgggcctcaaggaccaggaggatagtgacggacatctctctgtcaacctcgaatatgcccccactgaggggacgttggatattaaggaagacatgtcttag

SEQ ID NO: 46215 - DNA, 270 bp, Artificial Sequence
  derived and/or modified sequence
atgaaaacaggccttttcttcttgtgtctgctgggcacagcggccgcaattcctaccaatgccaggttacttagtgaccattccaagccaaccgccgagaccgttgcaccagacaacactgcgattccatctctgcgagcggaggcagaagaaaacgagaaggaaacggcagtttctaccgaggacgactcccatcataaggccgagaagagtagcgtgcttaaatcaaaggaggagtctcacgaacagtccgctgagcagggaaagtag

SEQ ID NO: 46216 - DNA, 1995 bp, Artificial Sequence
  derived and/or modified sequence
atgaagacaggcctcttcttcctgtgcctgctgggcacagctgctgccatccccaccaatgcccggctgctgagtgaccacagcaagcccacagctgagaccgtggccccagacaacacagccatccccagcctgcgggcagaggccgaggagaatgagaaggagacagctgtgtccacagaagatgacagccaccacaaggccgagaagagctctgtgctgaagagcaaggaggagagccatgagcagagcgctgagcagggcaagagcagcagccaggagctgggcctgaaggaccaggaggacagtgatggccacctgtctgtgaacctggagtatgcccccacagagggcaccctggacatcaaggaggacatgtctgagccccaggagaagaagctgtctgagaacacagacttcctggcccctggggtgtcctccttcacagacagcaaccagcaggagagcatcaccaagcgggaggagaaccaggagcagcccaggaactacagccaccaccagctgaacagaagcagcaagcacagccagggcctgcgggaccagggcaaccaggagcaggaccccaacatcagcaatggagaggaggaggaggagaaggagcccggggaggtgggcacccacaatgacaaccaggagaggaagacagagctgccccgggagcacgccaacagcaagcaggaggaggacaacacccagagtgatgacatcctggaggagagtgaccagcccacccaggtgtccaagatgcaggaggatgaatttgaccagggcaaccaggagcaggaggacaacagcaatgctgagatggaggaggagaatgccagcaatgtgaacaagcacatccaggagacagagtggcagagccaggagggcaagacaggcctggaggccatcagcaaccacaaggagacagaggagaagacagtgtctgaggccctgctgatggagcccacagatgatggcaacaccaccccaagaaatcatggagtggatgatgatggagatgatgatggagatgatggcggcacagatggccccaggcacagcgccagtgatgactacttcatccccagccaggccttcctggaggccgagcgggcccagagcatcgcctaccacctgaagattgaggagcagcgggagaaggtgcatgaaaatgaaaacatcggcaccacagagcctggagagcaccaggaggccaagaaggccgagaacagcagcaatgaggaggagaccagcagcgagggcaacatgagggtgcatgctgtggacagctgcatgtccttccagtgcaagaggggccacatctgcaaggctgaccagcagggcaagccccactgtgtgtgccaggaccctgtgacctgcccccccaccaagcccctggaccaggtgtgtggcacagacaaccagacctacgccagcagctgccacctgtttgccaccaagtgccgcctggagggcaccaagaagggccaccagctgcagctggactactttggagcctgcaagagcatccccacctgcacagactttgaggtgatccagttccccctgaggatgagggactggctgaagaacatcctgatgcagctgtatgaggccaacagcgagcacgccggctacctgaatgagaagcagaggaacaaggtgaagaagatctacctggatgagaagaggctgctggccggggaccaccccatcgacctgctgctgcgggacttcaagaagaactaccacatgtatgtgtaccctgtgcactggcagttcagcgagctggaccagcaccccatggacagagtgctgacccacagcgagctggcccccctgcgggccagcctggtgcccatggagcactgcatcacccgcttctttgaagaatgtgaccccaacaaggacaagcacatcaccctgaaggagtggggccactgcttcggcatcaaggaggaggacattgatgagaacctgctcttctag

SEQ ID NO: 46217 - DNA, 426 bp, Artificial Sequence
  derived and/or modified sequence
atgaagacaggcctcttcttcctgtgcctgctgggcacagctgctgccatccccaccaatgcccggctgctgagtgaccacagcaagcccacagctgagaccgtggccccagacaacacagccatccccagcctgcgggcagaggccgaggagaatgagaaggagacagctgtgtccacagaagatgacagccaccacaaggccgagaagagctctgtgctgaagagcaaggaggagagccatgagcagagcgctgagcagggcaagagcagcagccaggagctgggcctgaaggaccaggaggacagtgatggccacctgtctgtgaacctggagtatgcccccacagagggcaccctggacatcaaggaggacatgtctgagccccaggagaagaagctgtctgagaacacagacttcctgtag

SEQ ID NO: 46218 - DNA, 1620 bp, Artificial Sequence
  derived and/or modified sequence
atgtctgagccccaggagaagaagctgtctgaaaatacagacttcctggcccctggggtgagcagcttcacagacagcaaccagcaggagagcatcaccaagcgggaggagaaccaggagcagcccaggaactacagccaccaccagctgaacagaagcagcaagcacagccagggcctgcgggaccagggcaaccaggagcaggaccccaacatcagcaatggagaggaggaggaggagaaggagcctggagaggtgggcacccacaatgacaaccaggagaggaagacagagctgccccgggagcacgccaacagcaagcaggaggaggacaacacccagagtgatgacatcctggaggagagtgaccagcccacccaggtgtccaagatgcaggaggatgaatttgaccagggcaaccaggagcaggaggacaacagcaatgctgagatggaggaggagaatgccagcaatgtgaacaagcacatccaggagacagagtggcagagccaggagggcaagacaggcctggaggccatcagcaaccacaaggagacagaggagaagacagtgtctgaggccctgctgatggagcccacagatgatggcaacaccacccccaggaaccacggcgtggatgatgatggagatgatgatggagatgatggcggcacagatggccccaggcacagcgccagtgatgactacttcatccccagccaggccttcctggaggccgagcgggcccagagcatcgcctaccacctgaagattgaggagcagcgggagaaggtgcatgaaaatgaaaatattggcaccacagagcccggggagcaccaggaggccaagaaggccgagaacagcagcaatgaggaggagaccagcagcgagggcaacatgagggtgcatgctgtggacagctgcatgtccttccagtgcaagaggggccacatctgcaaggctgaccagcagggcaagccccactgtgtgtgccaggaccctgtgacctgcccccccaccaagcccctggaccaggtgtgtggcacagacaaccagacctacgccagcagctgccacctgtttgccaccaagtgccgcctggagggcaccaagaagggccaccagctgcagctggactactttggagcctgcaagagcatccccacctgcacagactttgaagtcatccagttccccctgaggatgagggactggctgaagaacatcctgatgcagctgtatgaggccaacagcgagcacgccggctacctgaatgagaagcagaggaacaaggtgaagaagatctacctggatgagaagaggctgctggccggggaccaccccatcgacctgctgctgcgggacttcaagaagaactaccacatgtatgtgtaccctgtgcactggcagttcagcgagctggaccagcaccccatggacagagtgctgacccacagcgagctggcccccctgcgggccagcctggtgcccatggagcactgcatcacccgcttctttgaggagtgtgaccccaacaaggacaagcacatcaccctgaaggagtggggccactgcttcggcatcaaggaggaggacattgatgagaacctgctcttctag

SEQ ID NO: 46219 - DNA, 171 bp, Artificial Sequence
  derived and/or modified sequence
atgaagacaggcctcttcttcctgtgcctgctgggcacagctgctgccatccccaccaatgcccggctgctgagtgaccacagcaagcccacagctgagaccgtggccccagacaacacagccatccccagcctgcgggcagaggccgaggagaatgagaaggagacctag

SEQ ID NO: 46220 - DNA, 435 bp, Artificial Sequence
  derived and/or modified sequence
atgaagacaggcctcttcttcctgtgcctgctgggcacagctgctgccatccccaccaatgcccggctgctgagtgaccacagcaagcccacagctgagaccgtggccccagacaacacagccatccccagcctgcgggcagaggccgaggagaatgagaaggagacagctgtgtccacagaagatgacagccaccacaaggccgagaagagctctgtgctgaagagcaaggaggagagccatgagcagagcgctgagcagggcaagagcagcagccaggagctgggcctgaaggaccaggaggacagtgatggccacctgtctgtgaacctggagtatgcccccacagagggcaccctggacatcaaggaggacatgtctgagccccaggagaagaagctgtctgagaacacagacttcctggcccctggatag

SEQ ID NO: 46221 - DNA, 363 bp, Artificial Sequence
  derived and/or modified sequence
atgaagacaggcctcttcttcctgtgcctgctgggcacagctgctgccatccccaccaatgcccggctgctgagtgaccacagcaagcccacagctgagaccgtggccccagacaacacagccatccccagcctgcgggcagaggccgaggagaatgagaaggagacagctgtgtccacagaagatgacagccaccacaaggccgagaagagctctgtgctgaagagcaaggaggagagccatgagcagagcgctgagcagggcaagagcagcagccaggagctgggcctgaaggaccaggaggacagtgatggccacctgtctgtgaacctggagtatgcccccacagagggcaccctgtag

SEQ ID NO: 46222 - DNA, 384 bp, Artificial Sequence
  derived and/or modified sequence
atgaagacaggcctcttcttcctgtgcctgctgggcacagctgctgccatccccaccaatgcccggctgctgagtgaccacagcaagcccacagctgagaccgtggccccagacaacacagccatccccagcctgcgggcagaggccgaggagaatgagaaggagacagctgtgtccacagaagatgacagccaccacaaggccgagaagagctctgtgctgaagagcaaggaggagagccatgagcagagcgctgagcagggcaagagcagcagccaggagctgggcctgaaggaccaggaggacagtgatggccacctgtctgtgaacctggagtatgcccccacagagggcaccctggacatcaaggaggacatgtcctag

SEQ ID NO: 46223 - DNA, 270 bp, Artificial Sequence
  derived and/or modified sequence
atgaagacaggcctcttcttcctgtgcctgctgggcacagctgctgccatccccaccaatgcccggctgctgagtgaccacagcaagcccacagctgagaccgtggccccagacaacacagccatccccagcctgcgggcagaggccgaggagaatgagaaggagacagctgtgtccacagaagatgacagccaccacaaggccgagaagagctctgtgctgaagagcaaggaggagagccatgagcagagcgctgagcagggcaagtag

SEQ ID NO: 46224 - DNA, 1995 bp, Artificial Sequence
  derived and/or modified sequence
atgaagaccggcctgttcttcctgtgcctgctgggcaccgccgccgcaattccaacaaacgctagactgctctccgaccacagcaagcccacagccgagacagttgccccggacaacactgcgattccatccctcagggccgaggctgaagaaaacgaaaaagaaaccgcagttagtactgaggacgatagccatcacaaggccgagaaatcatcggtcctcaaatctaaggaggaaagccatgaacagtctgcggaacagggaaagagttcctcccaagagcttggcctaaaggatcaagaggatagcgacggccatctgtctgtgaatcttgagtatgcccccacagaaggaacacttgacatcaaggaagatatgtctgagcctcaagagaagaagctatcagaaaataccgatttcctcgccccaggtgtgtcctctttcaccgactctaaccaacaggagtccatcactaagagggaggaaaaccaggaacagccccggaattacagccatcaccagctgaaccgctcctccaagcactcccaaggcctccgcgatcaggggaaccaggagcaggatcccaacatcagtaatggtgaggaggaggaagagaaagagcctggcgaggtgggaacccataacgacaaccaagaaagaaagactgagctccccagagagcatgctaacagtaaacaggaagaggacaacactcagtccgacgacattcttgaagagtcggatcaacctacacaggtatccaagatgcaagaggacgagtttgatcaaggcaaccaggaacaggaggataactcaaacgccgaaatggaagaggagaacgcaagcaacgtaaacaagcacattcaggagactgagtggcagtctcaggagggaaagacaggactggaggccatctcaaatcacaaagaaactgaagagaaaactgtatctgaggctttactgatggagccgaccgacgacggcaacacaacccctagaaaccatggtgtggatgacgacggtgacgatgatggcgacgatggaggcaccgatggtccccggcatagcgctagtgatgactatttcatcccatctcaagcttttctggaggcagagagagctcagagcatagcataccacctcaagatagaagagcagcgcgaaaaagtacacgagaacgagaatatcggcaccaccgagccaggagaacatcaggaagctaagaaggctgaaaactcctccaatgaagaggagacaagtagcgagggcaatatgcgtgtgcatgcagtggacagctgcatgagcttccagtgcaagcgaggacacatctgtaaggcggaccagcaaggcaagccccattgtgtgtgtcaagacccagttacgtgtccccctacaaaacccctcgaccaggtctgtggaaccgacaatcagacatatgccagctcctgccacctgttcgctacgaaatgtcgcctggaggggactaagaagggtcatcaacttcaactcgactacttcggcgcatgtaaaagcatccccacctgtaccgatttcgaagttatccagtttccccttcggatgcgtgattggcttaagaatatccttatgcagttgtatgaggcaaacagtgagcatgcaggctacttgaacgagaaacagaggaataaagtcaagaagatttacctggacgagaagaggctgctggcgggagaccacccaatcgaccttctcctcagggacttcaaaaagaattatcatatgtacgtctaccctgtgcattggcagttcagcgaactggatcagcatccgatggatcgtgtgttgacccactccgaactggctcccctgagggcctctctcgttcctatggagcactgtatcacaaggtttttcgaggagtgcgatcccaataaagacaagcatatcactttaaaagaatggggtcactgcttcggcatcaaggaggaagacatcgacgagaatctgctgttttag

SEQ ID NO: 46225 - DNA, 1995 bp, Artificial Sequence
  derived and/or modified sequence
atgaagaccggcctgttcttcctgtgcctgctgggcaccgccgccgccatccccaccaatgcacgattgcttagcgaccattcaaaacctacagcagaaaccgtggccccagacaataccgctatccctagccttcgcgctgaagccgaggaaaacgaaaaggaaactgcagtgtctaccgaagacgactcccatcacaaggctgaaaaatcctccgtgctgaagtccaaggaggagtcccacgagcagtctgccgagcaggggaaatcctccagccaagaactgggcctcaaggaccaggaggacagcgatggccatctgagtgtgaaccttgaatacgccccaacggagggcactctggatatcaaggaggacatgtctgaaccacaggagaagaagctaagcgaaaacacagactttctagctcctggagtctctagtttcactgattccaatcaacaggagtccattactaagcgcgaggaaaatcaggaacagccccgaaattattctcaccatcaactgaatagatcatctaagcacagccaaggccttcgcgaccagggtaaccaggagcaagacccaaatatctctaatggagaggaggaggaggagaaggaacccggagaggtcggtacccataacgacaatcaggaaaggaaaacggagctgccccgagaacacgccaactccaaacaagaagaggacaatacccagtctgacgacattttagaggaatccgatcaaccgacgcaggtttccaagatgcaggaagatgaattcgaccaggggaatcaggaacaggaggataattcaaacgctgagatggaggaggaaaatgccagtaatgtgaacaagcacatccaggaaaccgagtggcagagtcaggaaggtaagacaggcttggaggcaattagtaatcataaagagacagaagaaaagactgtgagcgaggccctccttatggaacctacggacgatgggaacactacccctagaaatcatggagtggatgatgatggggacgatgacggggacgacggcggtacagacggacctcgacactccgcctcagatgactactttattccctcgcaagcttttctggaggccgaaagagcacagagcatagcctatcatctcaaaatagaagaacagagggagaaggtgcatgagaatgagaatatcggaaccaccgagccaggagagcatcaggaggctaagaaagctgaaaactctagtaatgaagaagaaacatctagcgagggcaacatgcgcgtccatgccgtagactcttgcatgagctttcagtgtaagcgcggtcacatctgtaaagctgaccagcagggaaagcctcattgcgtgtgtcaggaccccgtgacatgcccgccaactaagcctcttgatcaagtctgtggtacagataaccagacgtatgccagtagctgccatctgttcgccactaagtgccgcctggaggggaccaagaaagggcaccagttgcaattggactatttcggcgcttgcaaatcgatccccacctgtactgattttgaagtcattcagtttccgttgaggatgcgagactggctgaagaacatcctcatgcaactctatgaagccaacagcgaacacgctggatacctgaatgagaagcagcgtaacaaggtgaaaaaaatttatctggacgaaaagcgccttctggcaggggaccaccccattgaccttctcctgagggactttaaaaaaaattaccatatgtatgtgtatcctgtgcactggcaattcagcgagctagatcaacatccaatggaccgtgtcctgacacacagcgagctggccccgctcagggctagcctcgtcccaatggagcattgcatcactcgatttttcgaagagtgtgacccaaacaaagataagcacattactctgaaggaatggggtcactgtttcggtataaaggaggaggacattgacgaaaacttattgttctag

SEQ ID NO: 46226 - DNA, 426 bp, Artificial Sequence
  derived and/or modified sequence
atgaagaccggcctgttcttcctgtgcctgctgggcaccgccgccgcaatccccaccaacgcccgcctgctgtccgatcattccaaacccacagctgagacagtggctcccgacaacactgccattccctccctgcgcgctgaagctgaagaaaacgagaaggaaacagcagtaagcacggaggacgacagccaccacaaggcagaaaaaagctccgtgctcaaaagcaaggaagaatcccacgagcagtctgctgagcagggtaaaagttcctcccaggaactgggcctgaaggatcaggaggacagtgacggacatttgtctgtgaacctggaatatgcacccactgaaggcacattggacatcaaggaagacatgtcagaaccccaggagaaaaaactcagtgaaaacaccgacttcttatag

SEQ ID NO: 46227 - DNA, 1620 bp, Artificial Sequence
  derived and/or modified sequence
atgagcgagccccaggagaagaagctgagcgagaacaccgacttcctagcccccggtgttagctcttttacagacagcaaccaacaggagtccattaccaaaagagaggaaaatcaggaacagcccaggaattattctcatcatcagctgaatcggtcaagcaaacattcacagggcctacgagaccagggtaaccaggagcaggaccctaatatctccaacggtgaggaggaagaagagaaagagccaggcgaggtcggtactcacaatgataaccaggagcgtaagacggaactgccccgcgagcatgcaaactcgaagcaagaggaggataacacacagtctgatgacatcctggaggaatcagatcagcccacccaggtaagcaagatgcaggaagatgaattcgatcagggcaaccaggagcaggaggacaacagcaacgccgaaatggaggaggaaaacgcaagtaacgttaataaacatattcaggagaccgaatggcagtctcaggagggaaaaactgggttggaggctatctcgaatcacaaagaaactgaagagaaaaccgtctccgaagccttgttgatggaacccactgacgatggcaacactacacctcgaaatcacggggtggacgatgacggtgatgatgacggcgacgacggcgggacggacggcccccgacattccgccagcgatgactacttcatcccatcacaggcatttctggaagctgagcgggcccagagtatcgcctaccatctgaagattgaagagcagagagaaaaagtgcacgagaacgagaacattggcaccacggaacccggcgagcatcaggaagcgaagaaggctgagaattcttcgaacgaagaagagacttcctctgaagggaacatgcgtgtgcatgcagtcgattcctgcatgagtttccagtgcaagcggggccacatttgtaaggctgaccaacagggcaaaccccattgtgtttgccaagatcccgtaacttgccccccaaccaagccactcgatcaggtgtgcggtacggacaaccagacatatgccagtagctgccacctgtttgccacgaagtgtagactagaaggaaccaaaaaaggccatcagctgcagctggactacttcggggcttgtaaatctataccgacctgcactgactttgaggttatccagtttcctctacgcatgcgagattggctcaaaaatatcctgatgcagttgtacgaagctaatagtgaacatgcaggttacctgaacgagaaacagaggaacaaggttaagaagatctatctggatgaaaaacgcctgctggccggagaccatcctatagacctcctgttgcgtgatttcaagaaaaactaccacatgtacgtataccctgtccactggcagtttagcgaactggatcagcatcccatggatcgagttctgacccactcagagttggctccactgcgcgcctcattggttcccatggagcattgcatcactcgtttcttcgaggaatgtgatccgaacaaagacaaacatatcactttgaaggagtgggggcactgtttcggaataaaggaggaggacatagatgaaaatctgctcttctag

SEQ ID NO: 46228 - DNA, 171 bp, Artificial Sequence
  derived and/or modified sequence
atgaagaccggcctgttcttcctgtgcctgctgggcaccgccgccgcaatccctacaaatgccagactcctgtcagatcactcaaagcccactgccgagactgtggcccccgataacaccgccatcccctcactcagggcagaagcagaagagaacgagaaagagacatag

SEQ ID NO: 46229 - DNA, 1620 bp, Artificial Sequence
  derived and/or modified sequence
atgagcgagccccaggagaagaagctgagcgagaacaccgacttccttgctccgggtgtgtctagcttcaccgactcaaatcaacaagagtctattactaaaagggaagagaaccaggaacagccacgcaactactcacaccaccagttgaacaggtcttccaaacattcccaggggctacgcgatcagggcaatcaggaacaggacccgaacattagtaacggcgaagaggaagaagagaaagaaccaggtgaggtggggacccacaatgacaaccaggaacgaaaaaccgagctgccacgcgagcacgctaactccaagcaggaagaagacaacacccaatccgacgacatcctggaggagagtgaccagcctacccaagtcagcaagatgcaggaggacgagttcgaccagggcaaccaggaacaggaggacaactctaatgccgaaatggaagaggagaacgcctccaacgtgaataaacatatccaagaaacagagtggcagtctcaggaagggaaaaccggcctcgaagcaataagcaaccataaagaaaccgaggaaaagaccgtatctgaagctcttctgatggagccaaccgatgacggaaatactaccccgaggaaccatggtgtcgatgacgacggtgacgatgatggcgatgatggggggacagacggtccaaggcactcggcctccgacgattacttcattccctcccaagcatttctggaagcggaacgcgctcagtcaatcgcataccatctaaaaatcgaggaacagcgggaaaaggtgcacgagaacgagaatatcggaaccacagaaccaggtgaacaccaggaagccaagaaagcagagaatagcagcaatgaggaagagaccagttctgaggggaacatgagggtccacgctgtggattcttgcatgtcatttcagtgtaaaagggggcatatctgcaaggccgatcagcagggtaagccccactgtgtgtgccaagatccagtgacctgccctcctactaagcctctggaccaagtgtgcgggaccgataaccagacatatgcgagtagctgtcaccttttcgccaccaaatgccgcctggaaggcacgaagaaggggcatcagctccaactcgactattttggcgcttgcaaaagcattccaacttgtacggattttgaggtcattcagtttcccctaaggatgcgcgattggctgaaaaatattctgatgcagctttatgaggccaattcagagcacgctggctatctgaatgagaaacaaaggaacaaagtaaagaaaatatacctggatgagaagcgacttctggccggggatcacccaattgatcttcttctcagagactttaagaaaaattatcacatgtacgtgtatccagtccactggcagtttagcgagctggaccaacaccctatggaccgagttctgacccattcagaactcgcaccactgcgggcctctctcgtgcctatggagcattgtattacccgtttttttgaagaatgcgatccaaataaagataaacatatcactttaaaagagtggggtcactgtttcggcataaaagaagaagacatcgacgaaaatctgctgttctag

SEQ ID NO: 46230 - DNA, 435 bp, Artificial Sequence
  derived and/or modified sequence
atgaagaccggcctgttcttcctgtgcctgctgggcaccgccgccgccatcccaacaaatgcacgcctgttaagcgaccactccaaacctactgccgaaacagtggctcctgataacactgcaatcccgtctctgcgtgcagaggccgaagaaaacgagaaagagactgccgtgtccacggaagacgatagccaccataaggccgagaagtcttcagtgctcaaatccaaggaggaatcccacgagcagagcgcagagcaaggcaaatcgtctagtcaggaactgggattgaaagaccaggaggactccgatgggcatctaagcgtgaacctggaatatgccccaacagaggggaccctggatattaaggaggacatgtcagaaccccaggaaaaaaagctgtccgagaataccgattttctagcacccggctag

SEQ ID NO: 46231 - DNA, 363 bp, Artificial Sequence
  derived and/or modified sequence
atgaagaccggcctgttcttcctgtgcctgctgggcaccgccgccgcgatcccaaccaatgcccgcctgctctctgaccatagcaagcctacggcggagacggttgcaccggacaacacggcaattccttctcttcgggccgaagccgaggaaaacgagaaggagaccgccgtcagtaccgaagatgacagtcaccacaaggctgagaagtctagtgttctgaagagcaaggaggaaagtcatgagcaatccgcagagcagggcaaaagtagcagtcaggaactggggctgaaagatcaagaagactccgacggccacctgtctgtcaatttggaatacgccccaacagaggggaccctgtag

SEQ ID NO: 46232 - DNA, 384 bp, Artificial Sequence
  derived and/or modified sequence
atgaagaccggcctgttcttcctgtgcctgctgggcaccgccgccgcaatcccaactaatgcacgattgctgagtgatcattcaaagcccacggccgagactgtcgctcccgacaacaccgcgatcccctccttacgggccgaagccgaagagaacgaaaaagaaacagcggtgtccaccgaggacgactctcatcacaaagccgaaaaatctagtgttttgaagtccaaagaggaatcccacgaacaaagcgccgagcagggtaaatcatccagccaggaacttggtcttaaagatcaggaggactccgatgggcatcttagtgtgaatctagaatatgcccctacagaaggaacactggacattaaggaagacatgtcctag

SEQ ID NO: 46233 - RNA, 1995 nt, Artificial Sequence
  derived and/or modified sequence
augaaaaccggccuguucuucuugugucuucuggguacagccgccgccauuccuacaaaugcuagguuacuuagcgaccacucuaagccuacagcugaaaccgucgcccccgauaacacugcaaucccaucucugcgcgcugaggcugaggagaacgagaaagagacagcgguuuccacagaggaugacagucaccacaaagcugagaaaaguucugugcuuaagucuaaggaagaaucgcacgagcagagugccgaacaggguaagucgucuucccaagaauugggauuaaaggaccaagaagacagugacggccaucugucuguuaaccucgaauacgcaccaaccgaggggacccuggacaucaaagaggacaugucugaaccacaagagaaaaaacugucugaaaacacugauuuucuggccccaggagucuccuccuucacugacaguaaucaacaagagucaauaacuaaaagagaagaaaaccaggagcagcccaggaauuauucucaccaccaacuaaaccgguccagcaaacacucucagggucugcgugaucaaggcaaccaggaacaggauccaaauauaucuaauggagaggaagaggaggaaaaagagccgggagagguggggacucacaacgauaaccaggaaaggaaaaccgaacuuccaagggagcacgccaacaguaaacaagaagaagauaauacacagagcgaugacauuuuagaggaaagcgaucagcccacgcagguguccaaaaugcaggaagacgaauuugaccagggcaaucaagagcaggaggacaauucaaacgcugagauggaggaagagaacgccaguaaugucaacaagcacauccaagagacugaauggcagucucaggaaggcaagaccggacuugaagcuaucucuaaucacaaggaaacagaggaaaagacagucagcgaagcuuuauugauggaaccgacggaugacgguaacacaacaccuagaaaucacggcguggaugacgacggcgacgacgauggugacgacgggggcacugacgggccucgccacagugccagcgacgacuauuuuaucccuucccaagccuuccuggaggccgagcgcgcccaaagcaucgcuuaccaucugaaaauugaagagcaaagggaaaaaguacacgagaacgagaacauaggcaccacggagccaggggagcaccaggaagcgaaaaaagcagagaacuccucuaaugaagaggaaacuagcagcgagggaaacaugcgugugcacgcuguugacucuugcaugucauuucaguguaaaagaggacauaucugcaaggcagaucaacagggaaaaccccacugcgugugccaggauccugugacaugccccccaacaaagccucuggaccagguguguggcacugauaaucagaccuacgcgucaaguugccaccuauuugcuacgaaaugucgcuuggaagggaccaaaaagggacaucaguuacagcuggacuauuucggcgccuguaaaucaauccccacguguacggauuucgaagugauucaguuuccccugcggaugagggauuggcucaagaacauacugaugcaguuauacgaggccaacuccgagcaugccggauaccugaaugagaagcaaagaaacaaaguaaagaagauuuaucuagacgagaagcgccugcuugccggagaccaccccaucgaccugcuucugagagauuucaagaaaaauuaucacauguacguauauccuguccacuggcaguucucugagcuagaccagcacccaauggauagaguucucacucacuccgagcuggccccccucagggccucccucguuccaauggaacauuguaucaccagguuuuucgaggagugugaucccaauaaggauaaacacauaacgcucaaagaauggggccacuguuucggcaucaaggaagaggacauugaugagaauuugcucuuuuag

SEQ ID NO: 46234 - RNA, 1995 nt, Artificial Sequence
  derived and/or modified sequence
augaagacuggguuguuuuuccuuugccuacuaggcacugccgcugcaauuccaacaaacgcucgcuuacucagcgaucacuccaagccaacugcagaaacugucgccccugacaacaccgccaucccuuccuugcgagccgaggccgaggagaaugagaaagaaaccgccgucucgacugaggacgacagccaucacaaggccgagaaaucuucuguccugaaaaguaaggaggaaagucaugagcagucugcugagcagggaaagucaagcagccaggagcuuggccugaaggaccaggaagauuccgauggacacuuaucaguuaacuuggaguacgccccuacagagggaacucucgacauuaaagaggacauguccgaaccucaagagaagaagcuuagugaaaauacugacuuucuggccccgggagucagcucauucacugacuccaaucagcaggagagcauaacuaaaagggaggaaaaucaggaacagccgagaaauuacagccaucaucaacugaaccguagcaguaaacauagccaaggauugcgggaccaagggaaucaggagcaggaccccaauaucagcaauggagaggaagaggaggagaaggagcccggcgaagugggcacccacaaugacaaucaggaacgcaaaacugaacugccaagagagcacgcuaacucgaagcaggaagaggauaacacacagagcgaugacauccucgaggaaucggaucagccuacacaggucucaaagaugcaagaagaugaauuugaccaaggcaaccaagagcaggaagauaauuccaacgccgagauggaagaagagaaugccucaaacguuaauaagcauauccaggaaaccgaauggcagagccaagaaggcaaaacaggacuggaggccaucaguaaccauaaagagaccgaagaaaaaacagucuccgaggcccuacugauggagccaaccgaugaugguaacacgacaccaaggaaccacggggucgacgacgauggggacgacgauggcgaugauggcggcacggauggaccuaggcauuccgccagcgacgacuacuuuaucccuagccaggcguuuuuagaggcugagcgcgcccagucaauugccuaucaucucaagauagaggaacagcgcgagaaagugcacgaaaacgaaaauaucgggacuacugaaccaggugaacaucaagaagcuaagaaagcugagaauaguagcaacgaggaagagacaucuucagagggaaauaugcgaguccaugcgguggacaguugcaugagcuuccaguguaaacgcggccacauuuguaaagccgaccagcaggggaagccgcacugcguuugccaggacccaguuacaugccccccaacaaagccccuggaccaaguaugcggcacagacaaucaaacuuaugcaaguagcugccaucuauucgccacaaagugcaggcuggaagggacuaagaaaggccaucaguuacaguuagacuacuucggagccuguaaaucaauacccacauguacagauuuugagguuauacaguucccauugagaaugagagacuggcuaaagaacauccuuaugcaauuguacgaagcuaauucugagcaugccgguuaucucaacgagaaacaacgaaauaaagugaaaaagaucuaccucgaugagaagagguuguuggcgggggaccacccaauugaccuccuguugagagacuucaagaagaacuaccacauguacguguaucccguccacuggcaauuuagcgaguuggaucaacacccuauggaccgggugcuuacucacuccgagcuggcgccauuacgugccagccuaguuccuauggagcacugcauuacccgauuuuuugaggaaugcgaccccaacaaagacaagcauaucacauuaaaggaauggggccauuguuuugguauaaaggaagaagauaucgacgaaaaccuccuuuuuuag

SEQ ID NO: 46235 - RNA, 426 nt, Artificial Sequence
  derived and/or modified sequence
augaaaaccggauuauuuuuucuuugcuuguuaggcacagccgcagcaauacccacaaacgcaagacuacucucagaucacuccaagccgaccgcagagacaguagcuccagacaauaccgccauaccaagcuugcgugcagaggccgaggaaaaugaaaaagaaacugcuguuucuacugaggaugacucccaucacaaagccgaaaaauccagcguccugaagucaaaagaggagucccacgagcagagcgccgaacaaggaaaaucgagcagucaggagcuaggccugaaagaccaggaggacucugacggucaccugucuguuaaccuagaguaugccccuacagagggcacacuggacaucaaggaggacauguccgagccccaggaaaagaagcucuccgaaaacaccgauuuuuuguag

SEQ ID NO: 46236 - RNA, 1620 nt, Artificial Sequence
  derived and/or modified sequence
augagugaaccccaggagaagaagcucucggaaaauacagacuuccucgcgcccggagugucuucauucacagauaguaaccagcaggagucgaucacuaaacgcgaggaaaaucaagagcagccaaggaacuauagucaccaucagcugaacagaagcagcaaacauagccagggacugagagaccaggggaaccaggagcaggauccaaauauuagcaacggcgaggaagaggaggaaaaggaaccaggggaaguggggacucacaacgacaaccaggaacgaaaaacugagcugccaagagagcacgcaaacuccaaacaagaagaggacaacacucagucagacgauauccucgaggaaagcgaucagccuacccaggucucuaaaaugcaagaagacgaauucgaucagggaaaucaggaacaggaagauaacagcaacgccgagauggaggaggaaaacgcaucuaacgugaacaagcauauucaagaaaccgaguggcaaucccaagagggcaagaccggccuagaagcuauaagcaaccacaaagagacagaggaaaagacugugucugaggcucugcugauggaaccuacagaugauggcaauacuacuccccguaaccacggugucgacgaugacggagacgacgacggagaugauggcggcaccgacgguccaagacauucagcuucugaugauuauuuuaucccuucccaggcguuucuggaggcugaacgcgcucagaguauugcuuaucauuuaaaaauugaggaacaacgagagaagguacacgagaaugaaaauaucggcacuacugaaccaggagagcaccaagaagcgaagaaggccgagaacaguagcaaugaagaggagaccaguucugaggguaacaugagaguucacgccgucgauucuuguaugagcuuccagugcaaaagaggccacaucugcaaagcugaccagcaggggaagccucacugcguuugucaggauccuguuacaugcccuccaacuaaaccccuggaccagguaugugggacugacaaccaaacuuacgcuucaaguugccaccuguucgcgacaaaauguaggcucgaggggaccaaaaaggggcaccagcugcagcuagauuacuucggggccuguaaaagcaucccaacauguacagauuuugaggucauucaguucccccuucgcaugagagacugguugaagaauauccugaugcagcucuaugaagccaauagugagcaugcaggguaucugaaugagaaacaacguaauaaggugaaaaagaucuaucuugaugagaagaggcuucuugccggcgaccauccaauagauuugcugcugagagauuucaaaaaaaauuaucauauguacgucuauccuguacauuggcaguucagcgaauuggaccagcaucccauggaccgaguccugacacacucugagcuggcgccccuucgugccucucugguccccauggagcauugcaucacacgguucuuugaggagugcgacccuaauaaagacaagcacauuacacugaaggaguggggccauuguuucggaauuaaggaagaggauauagacgaaaaucugcuuuuuuag

SEQ ID NO: 46237 - RNA, 171 nt, Artificial Sequence
  derived and/or modified sequence
augaagaccggccuuuuuuuucugugccuccucgggacagccgcugccauuccaacaaaugcacgccuccuaagcgaucauucuaagccuacugccgaaacagucgcccccgauaacaccgcuauuccaucucuacgggccgaagccgaagaaaacgagaaagagacuuag

SEQ ID NO: 46238 - RNA, 1620 nt, Artificial Sequence
  derived and/or modified sequence
augucugagccucaggaaaaaaaacugagcgagaauacggacuuccucgcucccggcguguccucuuuuaccgauucgaaucagcaggaauccaucacaaagcgcgaggaaaaccaggagcagccacggaauuacucucaccaccaacuuaacagaagcuccaaacacucccaaggccuccgugaccagggcaaccaggaacaggauccuaauaucucgaacggagaggaggaggaagagaaagagccaggcgaagugggcacucacaaugacaaucaagagcggaagaccgagcuaccgcgggaacacgccaauucaaagcaagaagaggacaauacccagucagacgacauacuugaggaaagugaccaacccacacaagucucaaaaaugcaagaggacgaguucgaccagggcaaccaggaacaggaagauaacucuaaugcugaaauggaggaagagaacgcaagcaacguuaacaagcacauccaagagacggaauggcagucacaagaaggaaagacaggauuggaggccauuucaaaccacaaagaaacagaggagaagacgguguccgaggcucuguuaauggaaccuaccgaugacggcaacaccacacccaggaaccacgguguagacgacgacggcgacgacgacggcgacgacggcgggacagacggcccaagacauuccgccagcgacgauuauuucauacccucucaagcauuucuggaagccgaacgugcucaaagcauagcauaccaccucaaaauugaggaacagagagagaaaguccacgagaaugaaaacauagggaccacggaaccgggcgaacaccaagaggccaaaaaggccgaaaacucaaguaaugaggaggagacaucuagcgaagguaauaugcgaguucacgcaguggacuccuguaugucguuccaguguaaacggggacacauuugcaaggcggaucaacagggcaaaccacauugugugugucaggauccugugacauguccaccaacuaaaccccucgaucagguuuguggcacugacaaccagacauaugccagcagcugccaucucuucgcuacuaagugccgccuggaaggaaccaaaaagggacaccagcuucaacuggacuacuuuggggccugcaagagcauaccgaccugcacugacuuugaagugauucaguuuccauugcggaugcgcgauuggcucaaaaauauccugaugcaacucuaugaagcuaacuccgagcacgcagguuaccucaacgaaaaacaacgcaauaagguaaaaaagauuuaucuugaugaaaagcgccuccuggcaggcgaccaccccaucgaccuucuccugcgagauuucaaaaaaaauuaucauauguauguguacccaguacacuggcaguucagugaacuugaccagcauccuauggacagggucuuaacgcacucugagcuggccccacuacgugcgucccucguccccauggagcacugcauaacccgguuuuuugaagaaugcgaucccaauaaagauaaacacauuacacugaaagaguggggacauugcuuugggaucaaagaggaagauaucgacgaaaauuuacuuuucuag

SEQ ID NO: 46239 - RNA, 435 nt, Artificial Sequence
  derived and/or modified sequence
augaaaaccggacuguucuuuuuaugccucuuaggaacugcggcggcuauccccacuaacgcccggcuucuguccgaucauuccaagccgaccgcagaaacaguagcccccgauaauaccgcaauccccagccuucgugcugaagccgaagagaaugaaaaagaaacagccgugagcaccgaagaugauucgcaccacaaggccgagaaaaguucaguacuaaagagcaaagaagagucccacgaacagagcgccgagcagggaaaaucaucaagucaggaacugggguuaaaagaccaagaagauucagauggccaccuuagcguuaaucuggaguacgccccaacugaaggcacacuggacaucaaggaagacauguccgagccucaggaaaaaaaauuaagcgagaauaccgauuuucuagcaccuggauag

SEQ ID NO: 46240 - RNA, 363 nt, Artificial Sequence
  derived and/or modified sequence
augaagaccggacuauuuuuccucugucugcugggaaccgcagcugcuauuccuaccaacgccagauugcuguccgaucauuccaaaccgaccgcagaaacgguggccccugacaauacggcaaucccaucgcucagggccgaggcagaagaaaaugaaaaggaaacugcugucucuaccgaagaugauucucaccauaaggcagagaaaagcucugugcugaagucuaaagaggaaucccaugaacaaagcgccgaacaaggaaagucuucaucucaagaauuaggcuugaaggaccaggaagacucagacggccaccugucaguaaacuuggaauaugcaccaaccgaaggaacccuguag

SEQ ID NO: 46241 - RNA, 384 nt, Artificial Sequence
  derived and/or modified sequence
augaagaccggacuguuuuuuuuaugccuucuuggcacugccgcagccauaccuacaaacgcccgccuguugucugaccauaguaagcccaccgccgagaccguagccccagauaacacugcuauuccaagccugcgcgcagaggcugaggagaacgagaaggagaccgcaguuucaaccgaagaugauucccaccacaaagccgaaaaaagcuccguucugaagagcaaagaagaaucgcaugaacaaagugccgagcaggggaagagcucaagccaggaguuaggauugaaggaucaagaggauucagacggccaucugagcguuaaccucgaguacgcaccuaccgagggaacacuugacauaaaagaggacaugaguuag

SEQ ID NO: 46242 - RNA, 270 nt, Artificial Sequence
  derived and/or modified sequence
augaagacuggccuguuuuuccugugccuccuggguacggcugccgccauucccacgaacgcucgacuucugucugaccauuccaagcccacugccgagaccguggcccccgauaauacugcaaucccgagucugagagccgaagccgaggagaaugagaaagaaacugccgucucaacagaagacgacucucaccacaaggcagagaaaucaucggugcucaaguccaaagaggaaagucacgaacaauccgcugagcaaggaaaguag

SEQ ID NO: 46243 - RNA, 1995 nt, Artificial Sequence
  derived and/or modified sequence
augaaaacgggcuuauuuuucuuauguuugcuagggaccgcugcugcaauccccaccaacgccagguugcuguccgaucacucuaaaccuaccgccgaaacuguagcuccagacaacaccgcgauccccagccugcgggcagaggcagaagaaaacgaaaaagaaaccgcagugaguacagaagaugacucucaucacaaggccgagaaguccuccgugcugaagucgaaggaggagucacaugaacaguccgccgagcagggaaaaucaucaucacaagagcuuggacucaaggaucaggaagacagcgauggccauuugucggucaacuuggaauaugcacccacagagggaacauuggauaucaaagaggauaugagugaaccccaagagaaaaaacucucagagaacacagacuuuuuagcgccaggcgugucaucauuuaccgauagcaaccagcaggaaucuauuacuaagcgcgaagaaaaccaggagcagccaagaaauuauagccaccaccaguugaacagaucuuccaagcacagucagggucugagagaucaggguaaucaggagcaggauccaaauaucucaaacggagaagaggaagaggaaaaagaaccaggugaaguaggaacccacaacgacaaucaggagagaaagaccgaacuuccacgggagcacgccaacucuaagcaagaagaagauaacacacagagcgacgacaucuuggaagagagugaucagcccacacaggugagcaaaaugcaggaagacgaauucgaccaagggaaucaggaacaggaggauaauaguaaugccgaaauggaggaagaaaaugcuaguaaugucaauaagcauauucaggaaacagaguggcagucccaggaagggaaaacaggacuugaagcaaucagcaaccauaaggagaccgaagaaaagacaguuagcgaagcguuguugauggagccuacagaugacggcaauacuacgccgcgcaaccacggugucgaugacgacggagaugaugacggggaugauggcggcacagacggacccaggcacucagcuucagaugacuauuucauucccucacaagcuuuccucgaagccgaacgggcccaaucuauugcguaccaucugaaaauugaggagcagagggagaaaguacaugagaaugagaauaucgggacuacagagcccggcgagcaucaggaagccaaaaaggcagagaauucgaguaacgaggaagagacuaguucugagggcaacaugagaguccaugcuguugacucuugcaugucauuccaguguaaaaggggccacaucuguaaagcagaccaacagggaaaaccacacuguguuugccaggacccugugacaugcccuccuacuaaaccacuggaccaaguaugcggaacugacaaccaaacauaugcauccagcugucaucuguucgcaaccaaaugcagacuagaggguacaaagaagggccaccagcuccaacuugauuauuucggcgcuugcaaaaguaucccaacuuguaccgacuuugagguuauccaauuuccccuuaggaugcgagacuggcugaagaacauccugaugcaauuguacgaggccaacagcgagcaugcaggguaccugaaugaaaaacaaaggaauaagguaaagaaaauauaccucgaugaaaagcgacuacucgccggcgaccauccuaucgaucugcuccucagggacuuuaaaaaaaauuaucauauguacgucuaucccguucacuggcaguucagugagcucgaccaacaucccauggaccgggucuugacacauucagaacuugccccacuuagagcuucgcuaguacccauggagcacugcauuacacgauuuuucgaagagugcgacccuaauaaggacaaacacaucacauugaaagaauggggacacuguuuuggcauaaaagaggaagauauugacgagaaccugcucuuuuag

SEQ ID NO: 46244 - RNA, 1995 nt, Artificial Sequence
  derived and/or modified sequence
augaagacaggacuguucuuccuuugccugcuaggcaccgcugcagcuaucccaaccaacgcgagacucuuauccgaucacucuaaaccuaccgccgaaacuguggcccccgacaacacagccaucccaagucugcgcgccgaagccgaagagaaugaaaaagaaaccgccgugagcacagaggaugacucccaccacaaagcugaaaaauccaguguccugaagucuaaagaagagucacacgaacaaagcgcugagcagggcaaguccuccagucaggaacuggggcucaaggaucaagaggauuccgauggucaccuguccgugaaucuggaauaugccccaacagagggaacacucgauaucaaggaagacauguccgagccccaggaaaaaaaacuuagcgaaaauacugacuuucucgcccccggcgucaguuccuuuacggacucgaaccagcaagaaucuauaacaaagagagaggaaaaucaagagcagccuagaaauuauucccaccaucaguuaaauagaucaucuaaacauagccagggguugagagaccaggggaaccaggagcaggaccccaauaucagcaacggagaggaggaagaagaaaaggagccgggagagguaggaacacacaacgauaaccaggaaagaaagacggaacugcccagagaacacgcaaacaguaagcaggaagaggauaauacgcagagugacgacauauuggaggaaagcgaucaacccacacaggugaguaaaaugcaggaggaugaguuugaucaggguaaucaagagcaggaggauaauucuaacgcggagauggaggaggaaaacgcuucuaaugucaauaaacacauccaggaaacagaguggcaaagccaggaaggaaagacaggucuggaggcaauaucaaaccacaaagaaacagaagagaaaaccguuucugaagcacuguuaauggagccgaccgacgacgggaauacaaccccccggaaccaugggguggaugacgauggggaugacgacggcgaugacggggguacagauggcccaaggcauagcgcuagcgaugauuacuuuauuccuucucaggcuuuucuagaagcugaacgcgcacagaguaucgcauaucaucuuaagaucgaggaacaacgggagaaaguacaugaaaacgaaaauaucgggaccacggaaccaggugaacaucaagaagcuaagaaagcugagaauaguagcaacgaggaagagacaucuucagagggaaauaugcgaguccaugcgguggacaguugcaugagcuuccaguguaaacgcggccacauuuguaaagccgaccagcaggggaagccgcacugcguuugccaggacccaguuacaugccccccaacaaagccccuggaccaaguaugcggcacagacaaucaaacuuaugcaaguagcugccaucuauucgccacaaagugcaggcuggaagggacuaagaaaggccaucaguuacagcuggauuacuucggagccuguaaaucgauaccaacauguacugauuuugaaguuauucaauucccccugagaaugcgagacuggcucaagaauauccugaugcaguuguacgaagcuaauagcgagcacgccggcuaucuuaacgaaaaacagcgcaacaaagugaagaaaauuuaucuugaugagaaacguuuguuggcaggcgaccaccccaucgaucuucugcugcgagauuucaaaaagaauuaucacauguacguauaccccgugcauuggcaauuuuccgagcuugaucagcaccccauggauagggugcucacccacucugaacuugccccacuccgcgccucuuuaguuccgauggaacauugcaucacccguuuuuuugaagaaugcgauccaaacaaagauaaacacauuacccucaaggaauggggccauuguuucggcaucaaggaggaagacauugaugaaaaccugcuuuucuag

SEQ ID NO: 46245 - RNA, 426 nt, Artificial Sequence
  derived and/or modified sequence
augaaaaccggauuauuuuuucuuugcuuguuaggcacagccgcagcaauacccacaaacgcaagacuacucucagaucacuccaagccgaccgcagagacaguagcuccagacaauaccgccauaccaagcuugcgugcagaggccgaggaaaaugaaaaagaaacugcuguuucuacugaggaugacucccaucacaaagccgaaaaauccagcguccugaagucaaaagaggagucccacgagcagagcgccgaacaaggaaaaucgagcagucaggagcuaggccugaaagaccaggaggauagugacggccauuugagcgucaaucuggaguaugcaccuaccgaggggaccuuagacaucaaggaagacaugagugaaccacaggagaagaaacugagcgagaacacagacuuucuguag

SEQ ID NO: 46246 - RNA, 1620 nt, Artificial Sequence
  derived and/or modified sequence
augagcgagccacaggaaaagaaacuaagcgagaacacugacuuuuuagcucccggcgugaguagcuucacagacagcaaccaacaggaguccaucacaaaaagggaggaaaaucaggagcaacccaggaauuacagucaccaucagcuuaauaggucgagcaagcacucacaggggcugagggaucaaggcaaucaggagcaggacccaaauauuagcaauggcgaagaggaggaggaaaaagaacccggugaaguaggcacacacaacgauaaucaggagcggaaaacugaguugccucgagaacaugcaaacagcaaacaagaagaggacaacacucagucugacgacauccuggaggaguccgaucagccaacacaagugucgaagaugcaagaagacgaguuugaucaggguaaucaggagcaagaggacaauucaaaugcggaaauggaggaggaaaacgccaguaacguuaauaaacacauucaggaaacagaguggcaaucacaggaggggaaaaccggacuagaggccauuagcaaccacaaggaaaccgaagaaaagaccguaagcgaggcuuuacucauggaaccaacugacgacggcaauaccacaccuagaaaucacggcguagacgaugacggggaugaugauggagaugacggaggcacagacggcccaagacacucugcgucugaugauuauuuuaucccuagucaggcguuucuugaagccgaaagagcccaguccaucgcguaucaucugaaaauugaggaacaacgggagaaagugcaugaaaaugagaauauaggaaccacagagccuggagaacaucaggaagccaaaaaggcugagaacagcagcaacgaagaagagacgagcucugaaggcaacaugcgcguccacgcaguugauuccugcaugagcuuccaguguaagcguggucacaucugcaaagcggaucaacaagggaagccccacugcguaugccaggacccaguuaccugcccuccaaccaaaccgcucgaccagguuugcggaaccgacaaccaaaccuacgccucaucaugccaucuauuugccacaaagugcaggcuggaaggaacaaagaaaggccaucagcugcaauuggacuauuucggcgcaugcaaaucuauaccuacuugcacggacuuugaggugauacaguuuccauugcgcaugagagacugguugaagaacauacuuaugcaguuauacgaggcgaauucugaacaugcuggguaccuaaaugaaaagcaacgcaacaaggugaagaagaucuaucuggacgaaaaacgguuacuggcaggggaccauccaaucgaccuucugcugcgagauuucaagaaaaacuaucacauguacguguaccccguccauuggcaguucuccgagcuugaccaacaucccauggaucgaguacugacccacuccgaacucgccccacugagagcaagucuaguuccaauggagcacuguaucacuagauucuuugaggaaugcgauccaaauaaagacaaacacaucacucugaaagaauggggacacuguuuugguauuaaggaggaggacauugaugagaaccugcuguuuuag

SEQ ID NO: 46247 - RNA, 1620 nt, Artificial Sequence
  derived and/or modified sequence
auguccgaaccccaggagaaaaaacuuagcgaaaacaccgauuucuuagcucccggaguuaguaguuuuaccgauuccaaccagcaggaaucuaucaccaaaagagaagaaaaccaagaacagcccagaaauuauagccaucaucaguugaacaggagcucgaagcacagccaaggcuuaagggaccaaggcaaccaggaacaggaccccaauauaucaaauggcgaagaggaagaggagaaggaacccggagagguaggaacucauaaugauaaucaggagcgaaagacggagcugccccgggagcaugccaauagcaagcaggaagaagauaacacucaaagcgacgacauucuggaggaaucagaucagccuacacaggucagcaagaugcaagaagacgaauuugaccaagggaaccaagaacaagaagauaacagcaacgcagagauggaagaagaaaaugcaucuaacguuaauaaacacauccaagagaccgaguggcagucccaggaagguaaaacuggacuggaggcaaucucaaaccauaaggaaacagaagaaaagaccguguccgaagcccugcugauggaaccuaccgacgacggaaacacaacuccaagaaaccacggaguagacgacgauggugacgacgauggugaugacggggguacagacggaccacggcauucagcuagugaugacuacuuuauccccucacaggcauuuuuagaggccgaaagggcacaaucuaucgcuuaccacuugaagaucgaagagcagagagagaaagugcacgagaacgagaacauugguacaacugagcccggcgagcaccaggaggcgaaaaaggccgagaauuccuccaacgaagaagaaacaaguuccgaagguaacaugagagugcacgcgguugauuccugcauguccuuucaaugcaagcgagggcacaucugcaaggcugaccagcaaggaaaaccgcacugugugugccaggacccuguuacuugccccccaacuaagccauuagaucagguauguggcaccgacaaccagaccuaugccuccucaugucaucucuucgcuacuaagugucgccucgaagggaccaagaaaggccaccaacuucaguuagacuacuucggcgccugcaaguccauuccaaccuguacagauuucgaagugauccaguucccacuucgcaugagggacuggcucaaaaacauuuugaugcaacucuaugaagccaacucagagcacgcgggauauuugaacgaaaaacagaggaacaaagugaaaaaaaucuaucucgacgagaaacgccugcuagccggcgaucacccuaucgacuugcuuuugagagacuuuaaaaagaauuaucacauguaugucuacccaguacacuggcaauuuucagaacuugaucagcaucccauggaucgagugcucacacauuccgaacuggccccccugcgagcuagccuugugccgauggaacauuguauuacuagauuuuuugaagaaugugauccgaauaaagauaagcauauuacacugaaagagugggggcauuguuuuggaauuaaagaagaggacauugacgagaaucuucuguuuuag

SEQ ID NO: 46248 - RNA, 435 nt, Artificial Sequence
  derived and/or modified sequence
augaaaacaggguuauuuuuucuguguuugcucgggacugcagccgcuauaccuaccaaugcccgcuuguugucugaucauuccaagccgacugcagagaccguggccccggacaacaccgcaauucccuccuuaagagcagaagccgaagaaaacgaaaaagaaaccgcugugaguacagaggacgauagucaucacaaagccgaaaagucaucagugcugaagaguaaggaagaaagucaugagcagagcgcugaacaaggcaagucaagcucacaagaauuggggcugaaggaucaggaggauagcgauggacaucugagcgucaauuuggaauaugcccccacagaaggaacccuugacauuaaagaggauaugagcgaaccucaggaaaagaaacuuagcgagaacacggauuucuuggcaccaggguag

SEQ ID NO: 46249 - RNA, 363 nt, Artificial Sequence
  derived and/or modified sequence
augaagacgggccuuuucuuucugugccuucuuggcaccgcugcugcgauacccaccaacgcucgccucuugucagaucauucaaaaccuacagcugagaccgucgccccugacaacacagcuauaccuucacugagagccgaggccgaagagaaugaaaaagaaacggccgucagcaccgaagaugauucacaucauaaggccgaaaaaucuaguguacucaagaguaaggaagaaucucaugaacaaucagccgagcagggaaagucauccucucaggagcuaggacugaaagaccaggaagacucagacggccaccugucaguaaacuuggaauaugcaccaaccgaaggaacccuguag

SEQ ID NO: 46250 - RNA, 384 nt, Artificial Sequence
  derived and/or modified sequence
augaagaccggacuguuuuuuuuaugccuucuuggcacugccgcagccauaccuacaaacgcccgccuguugucugaccauaguaagcccaccgccgagaccguagccccagauaacacugcuauuccaagccugcgcgcagaggcugaggagaacgagaaggagaccgcaguuucaaccgaagaugauucccaccacaaagccgaaaaaagcuccguucugaagagcaaagaagaaucgcaugaacaaagugccgagcaggggaagagcucaagccaggaguuaggauugaaggaucaagaagacagcgacggccaccucagcgugaaucuugaauacgccccaacagaaggcacccuggacauuaaggaggauaugaguuag

SEQ ID NO: 46251 - protein, 132 aa, Artificial Sequence
  derived and/or modified sequence
MGSLMLLFVETTRNSSACIFPVILNELSSTVETITHFPEVTDGECVFPFHYKNGTYYDCIKSKARHKWCSLNKTYEGYWKFCSAEDFANCVFPFWYRRLIYWECTDDGEAFGKKWCSLTKNFNKDRIWKYCE

SEQ ID NO: 46252 - DNA, 399 bp, Artificial Sequence
  derived and/or modified sequence
atggggtccttgatgttgctctttgtggaaaccacccgaaacagcagcgcatgtatatttccggtgatccttaacgaactgagcagcactgtggagaccatcacccacttccccgaggtgactgacggcgagtgcgtcttcccatttcactataaaaacgggacttattatgactgcattaaatctaaggcacggcataaatggtgctccctgaacaaaacttatgaaggatactggaaattctgttcagctgaggatttcgccaattgcgtgtttccgttttggtataggaggctgatatactgggaatgtacagatgacggcgaagcttttggaaagaaatggtgcagcctcaccaagaactttaacaaggaccgcatttggaagtactgcgaatag

SEQ ID NO: 46253 - DNA, 399 bp, Artificial Sequence
  derived and/or modified sequence
atgggcagcctgatgctgctgtttgtggagaccaccaggaacagcagcgcctgcatcttccctgtgatcctgaatgagctgagcagcacagtggagaccatcacccacttccctgaggtgacagatggagaatgtgtgttccccttccactacaagaatggcacctactatgactgcatcaagagcaaggcccggcacaagtggtgcagcctgaacaagacctatgagggctactggaagttctgcagcgcagaagattttgccaactgtgtgttccccttctggtacagaagactcatctactgggagtgcacagatgatggagaggccttcggcaagaagtggtgcagcctgaccaagaacttcaacaaggaccgcatctggaagtactgtgagtag

SEQ ID NO: 46254 - DNA, 399 bp, Artificial Sequence
  derived and/or modified sequence
atgggcagcctgatgctgctgttcgtggagaccacccggaacagcagcgcttgtatttttcctgtgatcctgaacgaactctcaagcaccgtggagacaatcacacattttccagaggtaactgatggtgagtgtgtatttccttttcattataagaacggcacttattatgattgtatcaaaagtaaagcccgacacaagtggtgtagcttgaacaagacgtacgagggctattggaagttttgcagtgccgaagacttcgcaaactgtgtcttccctttctggtatcgcaggcttatctattgggagtgcaccgacgatggagaggcgtttgggaaaaaatggtgtagcctgacaaaaaacttcaataaggatcgcatctggaagtactgcgagtag

SEQ ID NO: 46255 - DNA, 399 bp, Artificial Sequence
  derived and/or modified sequence
atgggctcccttatgctcctgttcgtcgaaacaactcgtaattcctcggcatgcatattccccgttatcctcaatgaactctctagcaccgtcgagacgataacacactttcctgaggtcacagatggagagtgtgtctttcctttccattacaagaacggcacctactacgactgtataaaaagtaaggcaagacacaagtggtgcagcctgaataagacctacgagggctactggaagttttgctcagcagaagacttcgctaactgcgtgttcccattttggtaccgcaggctgatctactgggagtgtactgatgatggtgaggcttttggaaagaagtggtgtagtctcaccaaaaatttcaataaagataggatctggaaatattgcgagtag

SEQ ID NO: 46256 - DNA, 654 bp, Artificial Sequence
  derived and/or modified sequence
aagcctccctgggcctctccaggggattcttgagccctggctgacaaagaccaggaagatctgagataccgggaagcctgtgactgcccatgggctccctgatgcttctcttcgtggaaacgacgcgaaattcctcagcttgcatcttccctgttattttaaatgaattatcatcaactgtggaaactataactcattttccagaagttacagatggggagtgtgtctttccattccactataaaaatggaacatattatgactgcatcaagtccaaggcaagacacaagtggtgctcgttaaacaagacctacgaaggatactggaagttttgcagtgcagaagattttgcaaactgtgtatttcccttctggtacagacgcttgatctactgggagtgtactgatgatggggaagcatttgggaaaaaatggtgttcactgaccaagaattttaacaaggaccgaatttggaaatactgtgaatgatggtttgcttgcatctgctggctatcagatacagacaaaacatgatcgatgcatccagcagtaataatcttcttcctgaaagccatggattcttcagcaggtcagaatggtctgatatacagtaacccccaattttcttaataaaataaaactctttttctccagc

SEQ ID NO: 46257 - DNA, 399 bp, Artificial Sequence
  derived and/or modified sequence
atgggcagcctgatgctgctgttcgtggagaccaccagaaacagcagcgcctgcatcttccccgtgatcctgaacgagctgagcagcaccgtggagaccatcacccacttccccgaggtgaccgacggcgagtgcgtgttccccttccactacaagaacggcacctactacgactgcatcaagagcaaggccagacacaagtggtgcagcctgaacaagacctacgagggctactggaagttctgcagcgccgaggacttcgccaactgcgtgttccccttctggtacagaagactgatctactgggagtgcaccgacgacggcgaggccttcggcaagaagtggtgcagcctgaccaagaacttcaacaaggacagaatctggaagtactgcgagtag

SEQ ID NO: 46258 - protein, 519 aa, Artificial Sequence
  derived and/or modified sequence
MTCPDKPGQLINWFICSLCVPRVRKLWSSRRPRTRRNLLLGTACAIYLGFLVSQVGRASLQHGQAAEKGPHRSRDTAEPSFPEIPLDGTLAPPESQGNGSTLQPNVVYITLRSKRSKPANIRGTVKPKRRKKHAVASAAPGQEALVGPSLQPQEAAREADAVAPGYAQGANLVKIGERPWRLVRGPGVRAGGPDFLQPSSRESNIRIYSESAPSWLSKDDIRRMRLLADSAVAGLRPVSSRSGARLLVLEGGAPGAVLRCGPSPCGLLKQPLDMSEVFAFHLDRILGLNRTLPSVSRKAEFIQDGRPCPIILWDASLSSASNDTHSSVKLTWGTYQQLLKQKCWQNGRVPKPESGCTEIHHHEWSKMALFDFLLQIYNRLDTNCCGFRPRKEDACVQNGLRPKCDDQGSAALAHIIQRKHDPRHLVFIDNKGFFDRSEDNLNFKLLEGIKEFPASAVSVLKSQHLRQKLLQSLFLDKVYWESQGGRQGIEKLIDVIEHRAKILITYINAHGVKVLPMNE

SEQ ID NO: 46259 - protein, 331 aa, Artificial Sequence
  derived and/or modified sequence
MTCPDKPGQLINWFICSLCVPRVRKLWSSRRPRTRRNLLLGTACAIYLGFLVSQVGRASLQHGQAAEKGPHRSRDTAEPSFPEIPLDGTLAPPESQGNGSTLQPNVVYITLRSKRSKPANIRGTVKPKRRKKHAVASAAPGQEALVGPSLQPQEAAREADAVAPGYAQGANLVKIGERPWRLVRGPGVRAGGPDFLQPSSRESNIRIYSESAPSWLSKDDIRRMRLLADSAVAGLRPVSSRSGARLLVLEGGAPGAVLRCGPSPCGLLKQPLDMSEVFAFHLDRILGLNRTLPSVSRKAEFIQGNRFTCFVICSCWGFWFIFFFPSLSFSK

SEQ ID NO: 46260 - DNA, 1560 bp, Artificial Sequence
  derived and/or modified sequence
atgacctgccccgacaagcccggccagctgatcaactggttcatctgcagcctgtgcgtgcccagagtgagaaagctgtggagcagcagaagacccagaaccagaagaaacctgctgctgggcaccgcctgcgccatctacctgggcttcctggtgagccaggtgggcagagccagcctgcagcacggccaggccgccgagaagggcccccacagaagcagagacaccgccgagcccagcttccccgagatccccctggacggcaccctggccccccccgagagccagggcaacggcagcaccctgcagcccaacgtggtgtacatcaccctgagaagcaagagaagcaagcccgccaacatcagaggcaccgtgaagcccaagagaagaaagaagcacgccgtggccagcgccgcccccggccaggaggccctggtgggccccagcctgcagccccaggaggccgccagagaggccgacgccgtggcccccggctacgcccagggcgccaacctggtgaagatcggcgagagaccctggagactggtgagaggccccggcgtgagagccggcggccccgacttcctgcagcccagcagcagagagagcaacatcagaatctacagcgagagcgcccccagctggctgagcaaggacgacatcagaagaatgagactgctggccgacagcgccgtggccggcctgagacccgtgagcagcagaagcggcgccagactgctggtgctggagggcggcgcccccggcgccgtgctgagatgcggccccagcccctgcggcctgctgaagcagcccctggacatgagcgaggtgttcgccttccacctggacagaatcctgggcctgaacagaaccctgcccagcgtgagcagaaaggccgagttcatccaggacggcagaccctgccccatcatcctgtgggacgccagcctgagcagcgccagcaacgacacccacagcagcgtgaagctgacctggggcacctaccagcagctgctgaagcagaagtgctggcagaacggcagagtgcccaagcccgagagcggctgcaccgagatccaccaccacgagtggagcaagatggccctgttcgacttcctgctgcagatctacaacagactggacaccaactgctgcggcttcagacccagaaaggaggacgcctgcgtgcagaacggcctgagacccaagtgcgacgaccagggcagcgccgccctggcccacatcatccagagaaagcacgaccccagacacctggtgttcatcgacaacaagggcttcttcgacagaagcgaggacaacctgaacttcaagctgctggagggcatcaaggagttccccgccagcgccgtgagcgtgctgaagagccagcacctgagacagaagctgctgcagagcctgttcctggacaaggtgtactgggagagccagggcggcagacagggcatcgagaagctgatcgacgtgatcgagcacagagccaagatcctgatcacctacatcaacgcccacggcgtgaaggtgctgcccatgaacgagtag

SEQ ID NO: 46261 - DNA, 996 bp, Artificial Sequence
  derived and/or modified sequence
atgacctgccccgacaagcccggccagctgatcaactggttcatctgcagcctgtgcgtgcccagagtgagaaagctgtggagcagcagaagacccagaaccagaagaaacctgctgctgggcaccgcctgcgccatctacctgggcttcctggtgagccaggtgggcagagccagcctgcagcacggccaggccgccgagaagggcccccacagaagcagagacaccgccgagcccagcttccccgagatccccctggacggcaccctggccccccccgagagccagggcaacggcagcaccctgcagcccaacgtggtgtacatcaccctgagaagcaagagaagcaagcccgccaacatcagaggcaccgtgaagcccaagagaagaaagaagcacgccgtggccagcgccgcccccggccaggaggccctggtgggccccagcctgcagccccaggaggccgccagagaggccgacgccgtggcccccggctacgcccagggcgccaacctggtgaagatcggcgagagaccctggagactggtgagaggccccggcgtgagagccggcggccccgacttcctgcagcccagcagcagagagagcaacatcagaatctacagcgagagcgcccccagctggctgagcaaggacgacatcagaagaatgagactgctggccgacagcgccgtggccggcctgagacccgtgagcagcagaagcggcgccagactgctggtgctggagggcggcgcccccggcgccgtgctgagatgcggccccagcccctgcggcctgctgaagcagcccctggacatgagcgaggtgttcgccttccacctggacagaatcctgggcctgaacagaaccctgcccagcgtgagcagaaaggccgagttcatccagggcaacagattcacctgcttcgtgatctgcagctgctggggcttctggttcatcttcttcttccccagcctgagcttcagcaagtag

SEQ ID NO: 46262 - DNA, 4900 bp, Artificial Sequence
  derived and/or modified sequence
gtgaactgttgcaccgtgcaattgcacactataaatgtctttccttatctgtgtgtactcttatctcactgttctattttttctcctcatttatattaactctttcttacctttttttctgaacttctaggccttctctttccagaactggtggaagacaaatgaaacggccaagatggtaagaaacaagccgcatttctccttggggagactgataatttaaaaggtttgttgtgtcagaaacattcccagcttcatcaccaaccctttccttccacctctgcccactggagaccacttatatcccgaagcggacgcggcagctgaagtcaggaaaccatgcatcacattagcaggagccaactgcagactttaaactccgttcaacatgtggatgcggcagagaaatgacctgtccagacaagccggggcagctcataaactggttcatctgctccctgtgcgtcccgcgggtgcgtaagctctggagcagccggcgtccaaggacccggagaaaccttctgctgggcactgcgtgtgccatctacttgggcttcctggtgagccaggtggggagggcctctctccagcatggacaggcggctgagaaggggccacatcgcagccgcgacaccgccgagccatccttccctgagatacccctggatggtaccctggcccctccagagtcccagggcaatgggtccactctgcagcccaatgtggtgtacattaccctacgctccaagcgcagcaagccggccaatatccgtggcaccgtgaagcccaagcgcaggaaaaagcatgcagtggcatcggctgccccagggcaggaggctttggtcggaccatcccttcagccgcaggaagcggcaagggaagctgatgctgtagcacctgggtacgctcagggagcaaacctggttaagattggagagcgaccctggaggttggtgcggggtccgggagtgcgagccgggggcccagacttcctgcagcccagctccagggagagcaacattaggatctacagcgagagcgccccctcctggctgagcaaagatgacatccgaagaatgcgactcttggcggacagcgcagtggcagggctccggcctgtgtcctctaggagcggagcccgtttgctggtgctggaggggggcgcacctggcgctgtgctccgctgtggccctagcccctgtgggcttctcaagcagcccttggacatgagtgaggtgtttgccttccacctagacaggatcctggggctcaacaggaccctgccgtctgtgagcaggaaagcagagttcatccaagatggccgcccatgccccatcattctttgggatgcatctttatcttcagcaagtaatgacacccattcttctgttaagctcacctggggaacttatcagcagttgctgaaacagaaatgctggcagaatggccgagtacccaagcctgaatcgggttgtactgaaatacatcatcatgagtggtccaagatggcactctttgattttttgttacagatttataatcgcttagatacaaattgctgtggattcagacctcgcaaggaagatgcctgtgtacagaatggattgaggccaaaatgtgatgaccaaggttctgcggctctagcacacattatccagcgaaagcatgacccaaggcatttggtttttatagacaacaagggtttctttgacaggagtgaagataacttaaacttcaaattgttagaaggcatcaaagagtttccagcttctgcagtttctgttttgaagagccagcacttacggcagaaacttcttcagtctctgtttcttgataaagtgtattgggaaagtcaaggaggtagacaaggaattgaaaagcttatcgatgtaatagaacacagagccaaaattcttatcacctatatcaatgcacacggggtcaaagtattacctatgaatgaatgacaaaagaatcttctggctagggtgttagatatatttatgcatttttggttttgtttttaaatcaagcacatcaacctcaagcccgtttagcaatgaggcagtgtagatgaatacgtaaaataaatgactttaaccaagtagctataatgggacttagcactgtatgcatacttaaaaaggttttgaaaaacaaactacttgagaaatatttgtttatatttttctctaacatcatgctatgtgtcagtctgaacatctgacaacagaaatttcagttattattctagctaagttttgaaaacatttgtcatgctgtttaatagaaaactgcaaaccagagacactgactccattaataaaccatattttgtgccgttttgactgttctgaccaaatactaatgggaacaattcttgacgtttttctgttgctgattgttaacatagagcagtctctacactaccctgaggcaactctacattggaacactgaggcttacagcctgcaagagcatcagagctgaccatacatttaaacagaaatgctggtttatttgcaaaatcaccagtatattttctattgtgtctataaaaaatcagtcatttaagtacaagaatcatattttccattcctttttagaaatttattttgttgtccctatggaaatcattcacatctgacaatttatatgttaaagagttttactctctctattttggtccaatttgtatctagtggctgagaaattaaataattctaaagtatgaagttacctatctgaaaatgtacttacagagtatcattttaaaatggatgtctctttaaaaattttgttacttttaccaacaatgtaatataatttatgtatattttattaataatagtgaattccttaaaatttgttctatgtacttatatttaatttgatttaatggttactgcccagatattgagaattggttcaaatattgagtgtgtttcaatatattatctggcttatttcaacatgagtaatatgagcaaaataagttaaaacctgcgtctgatcaattttcctcatgactagaactaaaacagtaaatttggacaatattaagcctcaaataatcatctccaaactccttctaacactttttaaatcagattggaagacatggacaaatcaggttcatgtgttgcatctttatgtcctttgccaatatccaagatcatcacatatggtagatattcacatggagtttcaaattcagaatagattaccattaccttcctgcccttacacatcctactccttatttaaaagttctatttgtgacttttcatttcctgaaagtttaaaaatacaatttgagaatgtttataatacattctctcctgtcttttcacggttacgtctgttattgctgaaatacaccacattttctttgttctggtcaaggttaactcaatatctgtgtgaaagagaactactaacaacgttacaatagaggctagatttgaaaaaaaaaatctatagatctaattgatacaattgtagaacaaaatgtcaaaataatgttttaagtataagagaagatggaccaaggagagagagatcatttgaaaatctaattgtagcttttctaggctcacattcatgtactacttttagcacccttatgggctgtgctcgccccctggacagttgagctttggattatcttcctcttcaattttccctctattgacccgagtgtctccctctgcttctacagatttatagtactccttggctcttttgagtctccacttttactcactgtctctgggatttttaagatccttttcttctcttataaatcatcctcttaatgaaaattagcctaacaaaagtttggagactggaatcctactttgagccactgacttgaaataactcttttggcaagttgcctgacatcctgtcttaccaaggtggcatatttgcatttttactgcttaaaacatttttttttttttaccatctttatccaaatttatcatattgatggtaggactaacaggctttttagaagctggctttaactttgagtctcaagctacaatgctgttgggcagcctggtcttcccacgtgagggtttaactttgtttatttgcctccagttattccaaaatgcttattaaatgaaagtcccaggaacatgtttattttagtcacctttgctttttaacaattttgttttgtaatcaatgagtaattcatgatgaattatttttgactaatggatagccgaaggccaggcttttaattctaataggtaatgttcttcttttgtcttattgaaacaatgagaatactctgtgcatttcaaatgcactccgattatgctgtggttttattcacataagcacaatatgtgttttatttataacttcataacaaacttataatataataatttaccttagcagacatgcaaaagcttattcttgtgtgacttactttctttaagctaataatataaaaataaatatgtatcttaaaaatctataataaaacattagaaattaaagatatgtgctttttattttgcagatgagttcatttgcttttgtagatgtgttttcagagctaggtacagaggaatgtttgctacctttagcggtgaaaaaagaaagagagtcaagaattttgttggattgtgtttgtgtgtgcatatatttgatatcatcattatatttgtaatctttggacttgtaatcatagcctgtttattctactgtgccattaaatatactttaccttatacataacgaataaaatacctagaagtagatttatttacacactgtcttatgaaattcttatgtttatgtcagcacagaacaagcacacatttagagcattcatctgaaaattatatggaaattgaacatgggtcaaataaagatg

SEQ ID NO: 46263 - DNA, 4985 bp, Artificial Sequence
  derived and/or modified sequence
ctcgatcttttgaacttcatgagactgacatttctgagtctgtttgcgaacaggacactagagggctcccaggggttaaaaataagtggaaatttatttgaatgaaaactgattctctacggcatttcttttttccgaatttaaaattaaagtttattttgttaactattgtttttaaaagctttgtatctcttaaaaccatgcagcagtcagtttccaagttttgctttgcaatcagtagttttcaagggagcttttaaagctgaactgaaatgtttgaaatgtggaacactcttgaccatgaaatatgttctacttacatgcctcagcctttaaaagttctttgcattagagtcaaggattacattcttcctggagccaagcatggggccagctgtaaacaagccgcatttctccttggggagactgataatttaaaaggtttgttgtgtcagaaacattcccagcttcatcaccaaccctttccttccacctctgcccactggagaccacttatatcccgaagcggacgcggcagctgaagtcaggaaaccatgcatcacattagcaggagccaactgcagactttaaactccgttcaacatgtggatgcggcagagaaatgacctgtccagacaagccggggcagctcataaactggttcatctgctccctgtgcgtcccgcgggtgcgtaagctctggagcagccggcgtccaaggacccggagaaaccttctgctgggcactgcgtgtgccatctacttgggcttcctggtgagccaggtggggagggcctctctccagcatggacaggcggctgagaaggggccacatcgcagccgcgacaccgccgagccatccttccctgagatacccctggatggtaccctggcccctccagagtcccagggcaatgggtccactctgcagcccaatgtggtgtacattaccctacgctccaagcgcagcaagccggccaatatccgtggcaccgtgaagcccaagcgcaggaaaaagcatgcagtggcatcggctgccccagggcaggaggctttggtcggaccatcccttcagccgcaggaagcggcaagggaagctgatgctgtagcacctgggtacgctcagggagcaaacctggttaagattggagagcgaccctggaggttggtgcggggtccgggagtgcgagccgggggcccagacttcctgcagcccagctccagggagagcaacattaggatctacagcgagagcgccccctcctggctgagcaaagatgacatccgaagaatgcgactcttggcggacagcgcagtggcagggctccggcctgtgtcctctaggagcggagcccgtttgctggtgctggaggggggcgcacctggcgctgtgctccgctgtggccctagcccctgtgggcttctcaagcagcccttggacatgagtgaggtgtttgccttccacctagacaggatcctggggctcaacaggaccctgccgtctgtgagcaggaaagcagagttcatccaagatggccgcccatgccccatcattctttgggatgcatctttatcttcagcaagtaatgacacccattcttctgttaagctcacctggggaacttatcagcagttgctgaaacagaaatgctggcagaatggccgagtacccaagcctgaatcgggttgtactgaaatacatcatcatgagtggtccaagatggcactctttgattttttgttacagatttataatcgcttagatacaaattgctgtggattcagacctcgcaaggaagatgcctgtgtacagaatggattgaggccaaaatgtgatgaccaaggttctgcggctctagcacacattatccagcgaaagcatgacccaaggcatttggtttttatagacaacaagggtttctttgacaggagtgaagataacttaaacttcaaattgttagaaggcatcaaagagtttccagcttctgcagtttctgttttgaagagccagcacttacggcagaaacttcttcagtctctgtttcttgataaagtgtattgggaaagtcaaggaggtagacaaggaattgaaaagcttatcgatgtaatagaacacagagccaaaattcttatcacctatatcaatgcacacggggtcaaagtattacctatgaatgaatgacaaaagaatcttctggctagggtgttagatatatttatgcatttttggttttgtttttaaatcaagcacatcaacctcaagcccgtttagcaatgaggcagtgtagatgaatacgtaaaataaatgactttaaccaagtagctataatgggacttagcactgtatgcatacttaaaaaggttttgaaaaacaaactacttgagaaatatttgtttatatttttctctaacatcatgctatgtgtcagtctgaacatctgacaacagaaatttcagttattattctagctaagttttgaaaacatttgtcatgctgtttaatagaaaactgcaaaccagagacactgactccattaataaaccatattttgtgccgttttgactgttctgaccaaatactaatgggaacaattcttgacgtttttctgttgctgattgttaacatagagcagtctctacactaccctgaggcaactctacattggaacactgaggcttacagcctgcaagagcatcagagctgaccatacatttaaacagaaatgctggtttatttgcaaaatcaccagtatattttctattgtgtctataaaaaatcagtcatttaagtacaagaatcatattttccattcctttttagaaatttattttgttgtccctatggaaatcattcacatctgacaatttatatgttaaagagttttactctctctattttggtccaatttgtatctagtggctgagaaattaaataattctaaagtatgaagttacctatctgaaaatgtacttacagagtatcattttaaaatggatgtctctttaaaaattttgttacttttaccaacaatgtaatataatttatgtatattttattaataatagtgaattccttaaaatttgttctatgtacttatatttaatttgatttaatggttactgcccagatattgagaattggttcaaatattgagtgtgtttcaatatattatctggcttatttcaacatgagtaatatgagcaaaataagttaaaacctgcgtctgatcaattttcctcatgactagaactaaaacagtaaatttggacaatattaagcctcaaataatcatctccaaactccttctaacactttttaaatcagattggaagacatggacaaatcaggttcatgtgttgcatctttatgtcctttgccaatatccaagatcatcacatatggtagatattcacatggagtttcaaattcagaatagattaccattaccttcctgcccttacacatcctactccttatttaaaagttctatttgtgacttttcatttcctgaaagtttaaaaatacaatttgagaatgtttataatacattctctcctgtcttttcacggttacgtctgttattgctgaaatacaccacattttctttgttctggtcaaggttaactcaatatctgtgtgaaagagaactactaacaacgttacaatagaggctagatttgaaaaaaaaaatctatagatctaattgatacaattgtagaacaaaatgtcaaaataatgttttaagtataagagaagatggaccaaggagagagagatcatttgaaaatctaattgtagcttttctaggctcacattcatgtactacttttagcacccttatgggctgtgctcgccccctggacagttgagctttggattatcttcctcttcaattttccctctattgacccgagtgtctccctctgcttctacagatttatagtactccttggctcttttgagtctccacttttactcactgtctctgggatttttaagatccttttcttctcttataaatcatcctcttaatgaaaattagcctaacaaaagtttggagactggaatcctactttgagccactgacttgaaataactcttttggcaagttgcctgacatcctgtcttaccaaggtggcatatttgcatttttactgcttaaaacatttttttttttttaccatctttatccaaatttatcatattgatggtaggactaacaggctttttagaagctggctttaactttgagtctcaagctacaatgctgttgggcagcctggtcttcccacgtgagggtttaactttgtttatttgcctccagttattccaaaatgcttattaaatgaaagtcccaggaacatgtttattttagtcacctttgctttttaacaattttgttttgtaatcaatgagtaattcatgatgaattatttttgactaatggatagccgaaggccaggcttttaattctaataggtaatgttcttcttttgtcttattgaaacaatgagaatactctgtgcatttcaaatgcactccgattatgctgtggttttattcacataagcacaatatgtgttttatttataacttcataacaaacttataatataataatttaccttagcagacatgcaaaagcttattcttgtgtgacttactttctttaagctaataatataaaaataaatatgtatcttaaaaatctataataaaacattagaaattaaagatatgtgctttttattttgcagatgagttcatttgcttttgtagatgtgttttcagagctaggtacagaggaatgtttgctacctttagcggtgaaaaaagaaagagagtcaagaattttgttggattgtgtttgtgtgtgcatatatttgatatcatcattatatttgtaatctttggacttgtaatcatagcctgtttattctactgtgccattaaatatactttaccttatacataacgaataaaa

SEQ ID NO: 46264 - DNA, 3425 bp, Artificial Sequence
  derived and/or modified sequence
actgttgcaccgtgcaattgcacactataaatgtctttccttatctgtgtgtactcttatctcactgttctattttttctcctcatttatattaactctttcttacctttttttctgaacttctaggccttctctttccagaactggtggaagacaaatgaaacggccaagatggtaagaaacaagccgcatttctccttggggagactgataatttaaaaggtttgttgtgtcagaaacattcccagcttcatcaccaaccctttccttccacctctgcccactggagaccacttatatcccgaagcggacgcggcagctgaagtcaggaaaccatgcatcacattagcaggagccaactgcagactttaaactccgttcaacatgtggatgcggcagagaaatgacctgtccagacaagccggggcagctcataaactggttcatctgctccctgtgcgtcccgcgggtgcgtaagctctggagcagccggcgtccaaggacccggagaaaccttctgctgggcactgcgtgtgccatctacttgggcttcctggtgagccaggtggggagggcctctctccagcatggacaggcggctgagaaggggccacatcgcagccgcgacaccgccgagccatccttccctgagatacccctggatggtaccctggcccctccagagtcccagggcaatgggtccactctgcagcccaatgtggtgtacattaccctacgctccaagcgcagcaagccggccaatatccgtggcaccgtgaagcccaagcgcaggaaaaagcatgcagtggcatcggctgccccagggcaggaggctttggtcggaccatcccttcagccgcaggaagcggcaagggaagctgatgctgtagcacctgggtacgctcagggagcaaacctggttaagattggagagcgaccctggaggttggtgcggggtccgggagtgcgagccgggggcccagacttcctgcagcccagctccagggagagcaacattaggatctacagcgagagcgccccctcctggctgagcaaagatgacatccgaagaatgcgactcttggcggacagcgcagtggcagggctccggcctgtgtcctctaggagcggagcccgtttgctggtgctggaggggggcgcacctggcgctgtgctccgctgtggccctagcccctgtgggcttctcaagcagcccttggacatgagtgaggtgtttgccttccacctagacaggatcctggggctcaacaggaccctgccgtctgtgagcaggaaagcagagttcatccaaggtaacagattcacatgcttcgttatttgcagctgttggggattctggttcattttcttttttccctcactctctttttctaaatgatttttctccacccacggttcacatttggacagcagcagcagcagcgtgtctttccatgcgcttggcattctttattttcccagcctgggaggatatgagagttccagggaaatgctgtattggacatgcaagagtaagcccatactgtataatctttgctctccatttccctcgcttcacttcccagtggcttattaaatctaattaaagccaacggcaatttgcatgatgaggagaggaagctaggctggaggcaaagaacttgctgacagtcaggcatactattaaataggttactatgggaggaagtagaagtttttaaaagtaagggggaagcgggttatcgttcttgagcagatggaatcttcttaagccgcgcagagccagaccatgttaggtttaaccccccctttttttttcaatggatttaacctctttatttaacaaataaaaagaatgagcaaaaattggtgatttgttcagtatgtatactaactagctgtgtggttttatcaagcccctgactatgatctattgagtctgtctttcaagattctcccgtcttgggtgacaaacattttggcaggttctaacacatgtagccagttactgcagttgccagcaaaaggactggtctgcggtcatgcccatgccatataaaggatattctctgaatattaaagctattccagggctcgaatacaaagtacagtgagtcagtggcttatgtttgaatgcagaatgatgccagaagttacaactttgaatccagattggcccaagaggctaaaatgtaccccaaagagattataagctgaaaggatacttaactttctccatgttaccatgaaatttagcatttcagtgaggttcccagggagcctagaatggaatggattaaaatccctgggagtggctgagacccaactgcatttccaatggctttagcattataatttcattttaaaatggatacccctggaagtaccagtgatttacttagaaaaattggacattccctactgatggtggttcttgtctaagtgctccagattcacaggtatgctttgatgtctcaagtttataaagcagtccaccacagttatgccaatgtaagaaaccttctcaaacatttaatctaatgttgataaaaatgaatttttattgggtgcccacaatttgctaaggattatacaaattgattcatatgtgttggctcctagaattttcataacaatgctatgaagtggggactattattatttccatttagtagatgagaaaattgaggcttattgagacaaagtaattggcctcaactcccacagctagtaggtggctaagctgggttttgactatagacccagcaaacttcagaacataacttcttagccactggacttaggtgaatatgtaacttattatccaaactggaaccgtgtggcgtgaaaggagatgctggtgggcattgggacaacaggcccacactgactgttctgagcagagtagagcacaggatcccccttgttatgctgaaatcccattcattttcatgtcataaaggccccagagaggagaagatgaactcctgtgtatatcctgaggcagagttctctgatatgtcctttgagcttcccttagacgctcttagactactgtattgggagaatgcagtagtggctaagagcctgggccgtggagttggactgactaggtttgaacttaccaatcatacgacttggaaatgttgccatgtctctttatgcctcagtttcctcagctgtaaaatgacaatactgcctaccatatgagattgttgttagttaatacagggaaaacacttagaaccagtatttgccacaagataaaccttcaataaatattggttattattattattattgtaccaagcacatgaggtaccaagttcattgaattcctcacataatctccaagtctcatgtgttacttcgttacgtgataggactatgactaaaactgctcaattaaacttttgtaatcccaa

SEQ ID NO: 46265 - DNA, 1560 bp, Artificial Sequence
  derived and/or modified sequence
atgacatgccctgacaaaccagggcagctaattaactggttcatttgctcgctgtgcgtacccagagttagaaagctctggtctagcagacgacctagaacgcgacgtaatctactccttgggaccgcttgtgccatatacttaggctttttagttagccaggtagggcgggcgtcgctgcagcacggacaggctgccgaaaagggacctcataggtcgcgagacaccgccgagccgtcattccccgagattcctctcgatggcacattggcgcctccggaaagtcaggggaacggatccacgctccagccgaatgtggtttacattaccttaagatctaagcgctctaagccagccaacattcgcggcaccgtcaagccaaagcgtaggaaaaaacatgctgtcgccagcgctgctcccggacaggaagccctcgttggtccatcactccagccccaggaagctgctcgggaggcagatgctgtggccccagggtatgcacagggcgccaatctggtgaaaattggcgaacgtccatggcggctggttcgcggaccaggtgtgcgcgcaggcggaccggattttttgcagccctctagccgcgaaagtaacatacggatctactccgagtcagcaccctcatggctctcaaaagatgacattcgcagaatgaggctgctggctgattcggctgtggccgggcttaggccggtgtccagccgcagcggagcaaggctgttagtgttggaagggggagccccgggggcggttctcagatgcggtcctagcccttgtggtctgcttaagcagccacttgacatgagcgaagtctttgctttccatttggaccggatcctggggcttaaccgcaccctgccaagtgtctctagaaaggccgaatttatccaagatggccgcccctgccccattatcttatgggatgctagcttgtcctctgcatccaatgacactcattcctccgtgaagctgacgtgggggacctatcagcagctattgaagcagaaatgctggcagaacggccgggtccccaagccggaaagtggttgtacagagattcatcaccatgagtggagcaagatggctctttttgacttcctgctgcaaatctataaccgcctggatacaaattgctgcggttttcggccacggaaggaagatgcctgcgtgcagaacggccttaggcctaaatgcgatgaccagggcagtgcggctctggcacatattattcagcggaaacacgatcccaggcaccttgtgttcatagacaacaaaggcttttttgatcgaagcgaagacaacttgaacttcaaactgcttgaagggatcaaggagttccccgcatccgccgtgagcgttttgaagtctcagcatttgcggcaaaagctcctccagagtttgttcttagacaaagtgtattgggagagtcagggcggacgacaagggattgaaaaacttatcgatgtcatcgagcaccgagcgaaaattcttatcacctacattaatgctcatggggtgaaagtgctgcctatgaacgagtag

SEQ ID NO: 46266 - DNA, 1560 bp, Artificial Sequence
  derived and/or modified sequence
atgacctgcccggataagccggggcagcttatcaactggtttatctgctccctgtgtgtgcctagagtacgcaagctctggagcagtcgacgcccaaggacaagacggaacctattgctgggtacagcctgcgctatttacctcggattccttgtcagtcaagtggggagggccagcttgcagcacggtcaggcagccgaaaaaggccctcatcggtcaagggacactgcagaaccgagtttccccgagatccccttagatggcacgctggccccccctgagtcccagggcaacgggtcgacactgcagccaaacgtagtctatattacccttcggagtaagcggagtaaacctgccaacattcggggaaccgtgaagccaaaaagacgaaaaaagcatgcagtggcctctgctgctccgggccaggaagccctcgtcggcccaagcttacaaccgcaggaggctgcgagagaggccgatgcagtggccccgggctacgcccaaggcgccaaccttgtgaagattggagaaagaccctggcgtctggtcaggggccccggggtcagggctggagggcccgacttcttgcagccctcttcccgggagtccaacattagaatctacagcgaatccgccccttcttggctgtctaaggatgatataaggcgcatgagactgcttgccgattccgccgtggcgggcctccggccagtgtcatctagaagtggcgctcgcctgttggtcttggaagggggggccccaggggctgtcctacggtgcggaccttccccttgtggcctgctcaaacagcctctcgatatgtctgaggtgttcgccttccatttggaccgcattctcggcctgaatcgtactcttcctagcgtcagtcggaaagctgagttcattcaggacggccggccatgtcccattattctgtgggacgctagtctctctagcgcttcgaacgacacccactcatccgtgaagctaacgtggggaacttatcagcaacttttgaaacaaaaatgctggcagaacgggcgcgttcccaagcccgagtctggatgcactgagattcaccaccatgaatggagcaagatggcactcttcgacttcctcttgcaaatctacaatcgcctcgataccaattgctgtggcttcagaccccgcaaggaggacgcctgtgtccagaacggtctgaggccaaagtgtgacgaccagggcagtgctgcactggctcacattatccaacgaaaacatgaccctcggcacttggtctttatagataataagggcttctttgaccgctctgaggacaatctgaactttaaactcctggagggcatcaaggagttcccagccagcgccgtctccgtgctaaaatcgcagcaccttcggcaaaaactgcttcagtctcttttcctggacaaggtatattgggagagccaaggtggtcgacaaggaattgagaagttaatcgacgttatcgaacatcgcgcaaagatattgatcacatatattaatgcccacggcgttaaagttctgccaatgaacgagtag

SEQ ID NO: 46267 - DNA, 1560 bp, Artificial Sequence
  derived and/or modified sequence
atgacatgcccggataagccaggtcagcttattaactggttcatttgcagcctctgtgtgcctcgcgtgcgaaagctctggtctagtcgcagacctcggactcgaagaaacctcctcctcggtactgcatgcgctatatacctgggttttcttgtatcccaggtcggcagagcaagtttgcagcatggtcaggctgccgaaaaagggccccataggtcacgggatacggcagaaccttccttcccagaaatccccctggatggcacactggctccccccgagtctcaggggaacggtagcacactccagccgaacgtagtctatatcactctgaggtctaagaggtcaaagcctgctaatatccgtggcaccgtcaagccaaaaagacgtaaaaagcatgccgtcgccagcgccgccccaggacaggaagctcttgtgggtcctagccttcaacctcaagaagcagcccgcgaggctgacgccgtggctcccggctatgcccagggagccaatctggttaagataggggagcgcccatggcgcctagtgagggggccaggggtccgagccggcggacccgatttcttgcagccctccagccgggaaagcaatatacgaatttactccgagagcgctccttcctggctgtcaaaggacgatatcagaagaatgagactactggctgatagtgccgtggccgggctccgccccgtgagcagtcgctccggggcgagactcctggtgctggaggggggcgcccccggcgcagtgctgagatgcgggccatccccttgcgggctcctcaaacagccactcgatatgtctgaagtcttcgcttttcatctggatagaatcctgggcctaaatcgcacattacccagcgtgtctcgaaaagccgaatttattcaggatggccggccatgcccaattatcctgtgggacgccagcttatcctccgcctccaatgacacccattctagcgttaagctgacatgggggacctaccagcagttgctcaagcagaagtgttggcaaaacggaagagttcccaaaccagagtcagggtgtaccgagatccaccaccacgaatggtcaaagatggcactgttcgacttcctactgcaaatctacaatcgtctcgataccaactgttgcggcttcaggccccgtaaggaagacgcctgcgtgcagaatggcctgcgccctaagtgcgatgatcaagggtcagcagcactggcccatatcatacagcggaagcatgatccacggcaccttgtttttatagacaacaagggctttttcgatagaagcgaggataatctcaactttaaattactggaagggattaaagagttccctgctagcgcagtctctgtgctcaagagccagcatctacgccagaagcttttgcagagcctgttcctcgataaagtctactgggaaagtcagggcgggagacagggaatcgagaagcttattgacgtgattgagcatcgcgcaaaaatcctgattacatatatcaatgcccatggggtgaaagttctccctatgaatgaatag

SEQ ID NO: 46268 - DNA, 996 bp, Artificial Sequence
  derived and/or modified sequence
atgacctgccccgacaaacccggtcagctgatcaattggttcatttgctctctgtgtgtgcccagggtgagaaaactgtggagctcacgtcgaccaaggacaaggcgaaatctactgcttggaaccgcatgcgccatctacctgggttttctcgtgtcacaagttggacgcgcttccttgcaacacggccaagccgccgagaagggtccccaccgtagccgagacaccgccgagcctagctttcccgaaattcctctggacgggaccctggcccctcctgaaagtcagggaaatggcagcactctgcagccaaacgtggtttacatcacccttagatctaaacggagcaagccagccaatatcagaggaactgttaagccaaaaagacgcaagaagcacgccgtagcctccgccgcccctggccaagaagccctcgtcggacccagccttcagcctcaggaggctgcaagagaggcagatgctgtggctccaggatatgcccagggagctaacctggtgaaaatcggggagcgcccctggaggttggtgaggggcccaggcgttcgcgcaggggggcctgacttcctacagcctagctcccgggagagtaacatccggatttacagcgaatccgcaccgtcctggctgtccaaagacgatatccgaaggatgagacttctggccgacagtgccgttgctgggctgagaccggtgagctctcgttccggggcacgactgctggtgctggaaggcggcgcgcccggcgctgtccttcggtgcggaccaagtccatgtgggttgcttaagcagcctctggacatgtctgaagtgtttgcctttcatttagatagaatcctggggctgaataggactctgccctctgtgtcccgcaaggccgagttcattcagggtaatcggtttacttgtttcgtcatctgtagctgctggggcttttggttcatctttttcttcccatccttatccttttccaagtag

SEQ ID NO: 46269 - DNA, 1560 bp, Artificial Sequence
  derived and/or modified sequence
atgacctgcccagacaagccaggccagctgatcaactggttcatctgcagcctgtgtgtgccccgggtgaggaagctgtggagcagccggcggcccaggaccaggaggaacctgctgctgggcacagcctgtgccatctacctgggcttcctggtgtcccaggtgggccgggccagcctgcagcacggccaggccgctgagaagggcccccacaggagccgggacacagctgagcccagcttccctgagatccccctggatggcaccctggcccctcctgagagccagggcaatggcagcaccctgcagcccaacgtggtgtacatcaccctgcggagcaagaggagcaagccagccaacatccggggcaccgtgaagcccaagaggaggaagaagcatgctgtggccagcgctgcccctggccaggaggccctggtgggccccagcctgcagccccaggaggccgcccgggaggctgatgctgtggcccctggctacgcccagggcgccaacctggtgaagattggagagcggccctggaggctggtgcggggccctggggtgcgggccggcggccctgacttcctgcagcccagcagccgggagagcaacatccgcatctacagcgagagcgcccccagctggctgagcaaggatgacatccggaggatgaggctgctggccgacagcgctgtggccggcctgcggcctgtgagcagccgcagcggggcccggctgctggtgctggagggcggggcccctggagctgtgctgcgctgtggccccagcccctgtggcctgctgaagcagcccctggacatgtctgaggtgtttgccttccacctggaccgcatcctgggcctgaacagaaccctgcccagcgtgtccaggaaggccgagttcatccaggacggccggccctgccccatcatcctgtgggatgccagcctgagcagcgccagcaatgacacccacagctctgtgaagctgacctggggcacctaccagcagctgctgaagcagaagtgctggcagaatggccgggtgcccaagccagagagcggctgcacagagatccaccaccacgagtggagcaagatggccctgtttgacttcctgctgcagatctacaaccggctggacaccaactgctgcggcttccggcccaggaaggaggatgcctgtgtgcagaatggcctgcggcccaagtgtgatgaccagggcagcgctgccctggcccacatcatccagaggaagcatgaccccaggcacctggtgttcatcgacaacaagggcttctttgacagaagtgaggacaacctgaacttcaagctgctggagggcatcaaggagttccctgccagcgctgtgtctgtgctgaagagccagcacctgcggcagaagctgctgcagagcctcttcctggacaaggtgtactgggagagccagggcggccggcagggcatcgagaagctgattgatgtgattgagcaccgggccaagatcctgatcacctacatcaatgcccacggcgtgaaggtgctgcccatgaatgaatag

SEQ ID NO: 46270 - DNA, 996 bp, Artificial Sequence
  derived and/or modified sequence
atgacctgcccagacaagccaggccagctgatcaactggttcatctgcagcctgtgtgtgccccgggtgaggaagctgtggagcagccggcggcccaggaccaggaggaacctgctgctgggcacagcctgtgccatctacctgggcttcctggtgtcccaggtgggccgggccagcctgcagcacggccaggccgctgagaagggcccccacaggagccgggacacagctgagcccagcttccctgagatccccctggatggcaccctggcccctcctgagagccagggcaatggcagcaccctgcagcccaacgtggtgtacatcaccctgcggagcaagaggagcaagccagccaacatccggggcaccgtgaagcccaagaggaggaagaagcatgctgtggccagcgctgcccctggccaggaggccctggtgggccccagcctgcagccccaggaggccgcccgggaggctgatgctgtggcccctggctacgcccagggcgccaacctggtgaagattggagagcggccctggaggctggtgcggggccctggggtgcgggccggcggccctgacttcctgcagcccagcagccgggagagcaacatccgcatctacagcgagagcgcccccagctggctgagcaaggatgacatccggaggatgaggctgctggccgacagcgctgtggccggcctgcggcctgtgagcagccgcagcggggcccggctgctggtgctggagggcggggcccctggagctgtgctgcgctgtggccccagcccctgtggcctgctgaagcagcccctggacatgtctgaggtgtttgccttccacctggaccgcatcctgggcctgaacagaaccctgcccagcgtgtccaggaaggccgagttcatccagggcaaccgcttcacctgcttcgtcatctgcagctgctggggcttctggttcatcttcttcttccccagcctgtccttcagcaagtag

SEQ ID NO: 46271 - DNA, 1560 bp, Artificial Sequence
  derived and/or modified sequence
atgacctgccccgacaagcccggccagctgatcaactggttcatctgctctctgtgtgtgccccgcgtcaggaagttatggtcaagccgaagacctcgtaccagacggaacttgcttctgggcactgcgtgcgcaatttacctcggctttctagtgagccaagtcggaagagctagcctgcaacacggacaggccgcagaaaaggggccccaccggtctagagacaccgcagaacccagctttccggaaatcccactggatggaacgctcgctccgcccgagtctcaaggcaatggatcaactttgcagcctaacgtcgtctatattacacttaggtctaaacgctccaagccagccaatatccgcggcaccgtgaagccaaagcgaaggaaaaaacatgccgtggccagtgctgcacccgggcaggaggcactggtaggtcccagcctgcagccccaggaagcagccagagaggcagatgccgtggcgccgggctacgctcagggggctaacctggtgaagatcggagagcggccatggcgtctggttcgtggaccgggcgtgcgagccggggggccggatttcctgcaaccctcgagcagggagtccaacatacgcatctattcggagtctgctccatcatggttgagcaaggacgatataagacgaatgcgacttctggcagattcagcggttgcaggcttgagacccgtgtcctccagaagcggggccagattgctggtactcgaaggtggagcgcccggcgctgtgctccgatgcggccccagcccttgcggcctgttgaaacaacctctagacatgtcagaggtgttcgccttccacctcgataggattctcggactaaatagaacgctgccatccgtctctcgcaaagcagaatttattcaggacggacgcccatgccctatcatcctctgggacgccagtctgtctagtgcatccaacgatacacacagcagcgttaaattgacctgggggacgtatcagcaactgctcaagcagaaatgctggcagaatggacgagtgcctaaacccgagtcaggctgcaccgaaattcatcatcacgagtggtccaagatggcactgttcgattttctgctacagatctataatcgcctcgacaccaattgttgtggttttaggcctcggaaagaggacgcttgtgtgcagaacggccttcggccaaagtgcgatgatcaaggatctgcagcgcttgcccatatcattcaacggaagcacgatccccgccacctcgtcttcatcgacaacaaagggttctttgaccgcagcgaggataatttgaatttcaagctgctcgaaggcattaaagaattcccagcctccgcagtgtcagttctaaaaagccagcacttgcggcaaaagttacttcaaagcctttttttggacaaagtctattgggagtcccagggcgggaggcagggcatcgaaaagctgatcgatgttattgagcaccgcgccaagatcctgatcacctacataaatgctcatggggtgaaagtcctaccaatgaacgagtag

SEQ ID NO: 46272 - DNA, 1560 bp, Artificial Sequence
  derived and/or modified sequence
atgacctgccccgacaagcccggccagctgatcaactggttcatctgtagcctctgtgtccctcgggttcggaaactatggtcatcacgaaggccaaggacacggagaaatctgctcctggggactgcgtgcgcgatttacctcgggtttcttgttagtcaggtagggagggcttccctgcaacatgggcaggccgcagagaaaggcccacacagatcacgcgacactgccgagccgagttttcctgagatccctcttgatggaacgttggccccaccagaaagccagggtaacgggtcaacacttcaaccaaatgtggtctatattacgctcagatctaagcgaagcaaacccgcgaatattagggggaccgtaaaaccaaagcggagaaaaaaacatgcggtcgccagtgcagcaccaggacaggaggcattggtgggcccctccctgcagcctcaggaggccgcaagagaagccgacgcagtggcaccaggctatgcccaaggggcgaatctagtgaaaatcggagaaagaccatggcgtctcgtacgaggaccaggtgtcagagccggggggccagattttctgcagccatcctcaagggaatctaacattcgcatttatagcgagtcggcacccagctggctgagcaaagacgacattcggagaatgcgtctgttggcagactccgctgtggccgggttgagacctgtctcctctagaagcggtgcgagactgctagtgctcgagggaggggccccaggagcagtcctgcgctgcggtccctccccgtgtggtctgctcaaacagccgctggatatgagcgaagtgtttgcgtttcaccttgataggattctcggcttgaatagaacccttccgagcgtcagccggaaggcagagttcattcaagacggccgcccttgccctattattctctgggacgcctctctgtcgtccgcatctaatgacactcattcctccgtcaagttgacctggggaacgtaccagcagctgctgaaacagaagtgttggcagaatggcagggttcccaagcccgaaagcggatgcactgaaattcatcaccacgaatggtccaagatggcacttttcgactttctgcttcagatttacaatcggcttgacaccaattgctgtggcttccgcccaaggaaagaggacgcatgcgtgcagaatggcttacgccctaagtgcgatgatcagggcagcgctgcgctcgcgcatattatccagcgcaagcatgacccaagacatctggtgttcattgataataagggcttcttcgaccgaagcgaagataatctaaattttaagctgctggagggcatcaaggagttcccagcaagcgccgtatcggtcttgaagagccaacatctgcggcagaaactccttcaatctttattcctggataaggtgtattgggaatcccaggggggcaggcaaggaatcgagaagctgattgacgtgatcgaacacagagccaagatactcatcacctatatcaatgcccacggggtaaaggtgctgccaatgaacgaatag

SEQ ID NO: 46273 - DNA, 1560 bp, Artificial Sequence
  derived and/or modified sequence
atgacctgccccgacaagcccggccagctgatcaactggttcatctgcagtctctgcgtgccgcgagtgaggaaactgtggtcatctagaagacctcggactagaagaaatcttctgcttggcaccgcctgtgctatctacttggggtttctggtctcccaagtaggtagggccagcctacagcatggacaggccgcggagaaggggcctcacagaagtcgagatactgcagaaccttcattcccagaaattccgctcgatgggaccctcgctccgccggaatcacagggcaacggctcaactctgcagcccaatgttgtgtatataaccctgcggtctaaacgttctaaaccggctaacatcagggggactgttaagcctaagcggaggaaaaagcatgctgtcgcctccgcggctcccggtcaagaagccctggttggtcccagcctccagccacaagaggccgcaagggaggcagatgctgttgcaccaggatacgcccaaggagccaacctggtcaaaatcggcgaacgaccctggcggctagtgagaggtcctggtgtgcgggccggaggacctgacttcttgcagcccagctccagagaatcgaatatccgcatatacagcgagtccgctcccagttggctctccaaggacgatataagacgcatgagactgcttgcagactctgcggtcgcgggattgcgtcctgtctcctctaggtccggcgctcgcctcctcgtgttggaggggggagcaccaggggcggtcctccggtgcggaccctcaccctgcggtctgctcaagcaacccctggatatgagcgaggtcttcgcctttcatcttgaccggatcctcggactgaacaggacactgccgtctgtctccaggaaagccgaatttattcaggatggtcggccctgccctatcattctgtgggatgccagtttatccagcgcctccaatgacacacactcatccgtcaagctcacttgggggacctaccagcagctgttgaaacagaagtgctggcagaatggcagggtacctaaacccgagtcagggtgtaccgaaattcaccatcacgaatggagtaagatggccctttttgatttcctgctgcaaatctacaatagattagataccaattgttgtggcttcaggccgaggaaggaagatgcatgcgttcagaacggtctgcgccccaaatgtgacgaccagggctctgccgccctggcccacataatccaaaggaagcatgacccaagacatcttgtgtttattgacaacaaaggcttcttcgacagaagcgaggacaatctgaattttaaactactggaagggatcaaagaattcccagcatctgcagtctctgttctgaagagccagcatctgcgtcagaaactcttgcagtcactgtttctcgacaaggtctattgggagtcgcagggagggcggcaggggattgagaaactcatcgacgtcatagagcacagggccaagattctgatcacatatatcaatgcgcatggggtgaaggttctgcctatgaatgaatag

SEQ ID NO: 46274 - DNA, 996 bp, Artificial Sequence
  derived and/or modified sequence
atgacctgccccgacaagcccggccagctgatcaactggttcatctgcagcctctgtgtcccacgggtgcgcaagctttggagctctcggcgacccaggacccgaagaaatctactgcttggaaccgcctgtgctatctacctcggctttctggtgtcccaggtcgggagggcaagcctacagcacgggcaagctgccgagaaagggccccatcgctcccgcgacacagctgagccctcattccctgaaatccccctggatggaacactggccccccccgaaagccaagggaacggctccacactgcagccaaacgttgtctacatcaccctacggagtaagcgttccaagcccgctaacatacggggcacagtaaagcctaagagacgtaaaaagcatgctgtggcgagtgccgcccctggtcaggaggcattggtgggaccttccctccaacctcaggaagccgcacgggaggctgacgctgtggcccccgggtatgcgcaaggagctaatctggtaaaaatcggtgaacgaccctggcgactagtgcgaggtcctggagtgcgggcaggtggccctgactttctccagccatcttccagggaatccaacattcggatatactctgagtccgcaccatcatggctctccaaagacgatattcgccgcatgcggctactggctgatagtgccgtggctgggttaaggcccgtgagttcaaggtctggcgcaagactgctcgtgctggaaggcggcgctccaggcgctgtgcttaggtgcggccccagcccctgcgggctgctcaaacaaccattggacatgtccgaagtgtttgcctttcatctggatcgcatcctaggccttaatcgcactctgccctcagtgtccagaaaagctgagttcatccaagggaacagatttacatgcttcgttatctgcagctgctggggcttctggttcatcttctttttccccagcctaagcttttcaaagtag

SEQ ID NO: 46275 - DNA, 1560 bp, Artificial Sequence
  derived and/or modified sequence
atgacatgtccagataagcctggccagctaatcaattggtttatttgctccctctgcgtgccgagagtgcgtaagctgtggtccagccgaagaccccgtactcggagaaacctcctcctagggactgcttgtgctatatacctgggctttctggtgtctcaagtgggaagggcatcgctgcagcatgggcaggctgccgagaaaggcccacaccgtagccgggacaccgccgagcctagcttccccgagatcccgttggacggaactctggccccacccgagagccagggtaatggtagcacgctgcaacctaacgttgtgtatattaccctgcgctctaagaggtcaaaaccagcaaacatccggggaaccgtgaagcctaagcgacggaagaagcatgccgtagcttccgccgctccgggacaggaagccctggtggggccttcgttgcagccacaggaggccgctcgcgaagctgacgcagtggcccctggctatgctcagggagccaatctcgtaaagattggagaacggccatggcggcttgtcagaggacccggagtgcgggcaggcggacctgacttcctccaaccttcctctcgagagtccaatattcgaatctactccgaaagtgctccctcctggctgtcaaaggacgatattagacgaatgcgactcctggccgactccgccgtggccggactaaggccagtgtccagtagatcaggcgcacgtcttctggtgttagaaggcggtgcccctggtgcggtgcttcgatgcggcccatccccttgtgggttgctgaagcaacccctcgacatgtccgaggtctttgctttccatttggaccgaatcctgggccttaacaggactctgcctagtgtaagccggaaggcagagtttatacaggacgggagaccttgtccgatcatcttgtgggatgcctcgttatcatccgccagcaatgatacccactctagtgtgaaacttacatgggggacctatcagcagctgctcaaacagaagtgctggcagaatggacgtgtccctaaaccagaatccggctgtaccgaaatccatcatcatgaatggtcgaaaatggcccttttcgatttcctcctgcagatctacaaccgcctggacaccaattgctgcggttttcgccctcgcaaagaagacgcttgcgtgcagaacggactccggcctaagtgcgacgaccagggctcagccgcactggcacacatcatccagaggaagcacgaccctcgccacttggtatttattgataataaaggatttttcgaccgcagcgaggataacttgaactttaaactgctggaggggattaaagagttccccgcatccgcagtaagcgtgcttaagtcgcaacatctgcgccagaagcttctgcaatccctgttcttagacaaagtatactgggagagccaaggaggccgacaggggatcgagaaactgattgacgttatcgagcatcgggcaaagattctgatcacctatatcaatgcgcacggcgtcaaggtcctgccgatgaacgaatag

SEQ ID NO: 46276 - DNA, 1560 bp, Artificial Sequence
  derived and/or modified sequence
atgacatgccccgacaaaccaggacagctgatcaattggtttatctgtagcctttgtgttcccagagtgaggaagctgtggagttcacggaggcctaggaccaggcggaacctactgctcgggactgcctgtgcaatatacttggggttcctagtaagtcaggtggggcgagcaagcctccagcacggccaggcggcagagaagggccctcacaggtctcgtgatactgcggaaccgtcatttcctgagataccactggacggcaccctggcccctcccgaatctcaaggcaacgggagcactctccagccaaatgtcgtgtatattacccttcggtccaaaagatcgaagcccgctaatattcggggtacagtaaaacctaagcgtcgtaaaaaacatgctgtggcctctgcagctccgggacaagaagcccttgtggggccaagcttacagccacaggaggcagcccgtgaggccgatgccgtggctccaggatatgcgcagggagccaaccttgtgaaaataggcgaaaggccttggcggctcgtgcgtggaccaggtgtcagagccggagggccagactttctgcagccttcctcaagggagtccaatattcgaatttacagcgaatcagctcccagttggctgtccaaggatgatattagacgaatgaggctactggccgattctgcagtggcgggtcttcgcccagttagttcacgctctggcgcaagactcctggtgctcgaaggcggagccccaggtgccgttcttagatgcggtccttctccatgtgggcttctgaaacagcctctcgatatgtccgaggtgtttgccttccatctagacaggattctgggtctcaacagaaccctgccctcagtgagtaggaaagccgagttcatccaggatgggcgaccgtgccccattatcctctgggacgcctctctcagcagcgcaagtaacgatacccacagcagcgtgaaactcacctggggtacctaccagcagttgttgaagcagaaatgttggcagaacgggagggtacccaagccagaaagcggctgtaccgaaatccatcatcatgagtggtccaagatggcgctcttcgatttcctcctgcagatatacaatcgccttgataccaactgctgtggcttccgtcccaggaaggaagacgcttgcgtgcagaatggccttcgccctaaatgtgacgaccagggttcagcagcactagcccatataattcagcggaaacacgaccccaggcaccttgtttttattgataataagggctttttcgatcgctccgaggataatctgaactttaagctgctcgagggcataaaagaattcccagctagcgccgtaagcgttctcaaatcacagcacctcagacaaaagctgctgcaaagcctgtttctggacaaagtgtattgggagtctcagggcggacgccagggtattgaaaagttaatcgacgtgatagagcacagagccaagatcctgataacatacattaacgctcatggggtgaaggtgctgcctatgaacgaatag

SEQ ID NO: 46277 - DNA, 1560 bp, Artificial Sequence
  derived and/or modified sequence
atgacatgcccagacaaacctggtcagttaataaactggttcatttgctcactatgcgtgccgagggtgcggaagttgtggtcctccaggagacctcggactcgtagaaatttgttactcggcaccgcgtgcgctatatacttgggtttcctggtcagccaggtgggccgagcttcattgcagcacggacaggccgctgaaaaggggcctcatagaagccgagatactgccgagccctctttcccggagattcctctggacggcactctggccccacccgaaagccaaggcaatggctcaactctccagccaaacgtcgtgtacatcaccctcaggtcgaaaagatccaagcccgctaacataagagggacagtcaaaccaaagaggcgcaaaaagcacgccgtcgcttccgctgcacccggacaagaagctttagtaggcccatcccttcagccgcaggaggcagctcgtgaggcggacgcggtcgcacccggttacgcccagggggctaatcttgtgaagattggcgaaaggccttggcggctggtccgtggcccaggcgttcgcgctggaggccctgattttctgcagccatcaagccgcgagagcaacatacggatttactcagagagtgccccaagttggctatccaaggatgacattcgcaggatgcgactgcttgcagactctgctgtcgcaggcttgcgcccagtgtcaagccggagcggcgctcgccttctagtgctcgagggaggagccccaggagccgttcttcggtgtggcccatctccatgcggactgctgaaacagccgctggacatgagcgaagtgttcgcttttcatctggatagaatattaggactgaatcgcacactgccttcggtgtcccgaaaggcagaattcattcaagatggaagaccatgtccaatcatcctgtgggacgcctctctcagtagcgcgagtaatgatacccacagttctgtgaagctcacctggggcacctatcagcaactactcaagcagaaatgctggcagaatggccgtgttcctaaacctgaatctggctgtactgaaatacaccaccacgagtggtccaagatggccctgtttgacttcctgcttcagatctacaatagactcgatactaattgctgcgggtttaggcctcggaaagaagacgcttgtgtacagaacggcctcaggccaaagtgtgatgatcaggggtcagctgcactggcccacatcatccaacggaaacacgacccccgtcacctcgtgtttatcgacaacaaaggcttcttcgacagatccgaggacaacctgaattttaagctgttggaaggaattaaggagttcccagcttctgcagtttctgtactgaaaagccaacatctgcgacagaagctgttacagagcctttttctcgataaggtgtattgggaatcccagggcggaaggcaagggattgagaagctgatcgacgtgatcgagcacagggccaaaatcttgatcacctatatcaatgcccatggggtaaaagtgctccccatgaacgagtag

SEQ ID NO: 46278 - DNA, 996 bp, Artificial Sequence
  derived and/or modified sequence
atgacctgccctgacaaacctggacaactgatcaactggttcatttgcagcctgtgcgttcctagggtaagaaaattgtggtcgtcaagacgcccaaggaccaggagaaatctactcctgggcactgcatgcgcgatttatctcggatttttagtttcacaggtcggcagagcctccctgcaacatggacaggccgcagaaaaaggacctcacagatcccgcgataccgctgaaccaagttttccggagattccactcgatggcaccctggcccctccagagagccaaggcaatgggtctacgctgcagcctaatgtcgtttatattaccctccgttcaaagcgatccaaacctgctaacatacgaggcacagttaagcctaagaggcggaagaaacacgctgtagcctcagctgcgcctggccaggaagctctggtgggcccatccttacagccccaggaagccgcacgcgaggccgacgccgtggcgcctggctacgcgcaaggtgctaatctggttaaaattggagagaggccatggcgattagtgagaggaccaggggtgcgagctggaggacctgactttctccagccttcctcacgagaatccaacatccgcatttactccgagtccgctccttcctggctgtccaaggacgacatccgacgaatgagattgctagctgactctgcggttgccggactgcgaccagtgtccagtagaagcggagctagactgctggttctagaagggggagccccaggggcagttctacgatgcggcccttccccttgcggtttgctgaaacagcctttggacatgtctgaagtgttcgccttccatcttgaccggatcctagggctcaatagaactctgccctccgttagccggaaggcagaattcatccaagggaaccggttcacatgtttcgtgatatgtagctgctggggtttttggtttattttctttttccccagcctgtcattctccaagtag

SEQ ID NO: 46279 - protein, 269 aa, Artificial Sequence
  derived and/or modified sequence
MGNCCWTQCFGLLRKEAGRLQRVGGGGGSKYFRTCSRGEHLTIEFENLVESDEGESPGSSHRPLTEEEIVDLRERHYDSIAEKQKDLDKKIQKEQERQRIVQQYHPSNNGEYQSSGPEDDFESCLRNMKSQYEVFRSSRLSSDATVLTPNTESSCDLMTKTKSTSGNDDSTSLDLEWEDEEGMNRMLPMRERSKTEEDILRAALKYSNKKTGSNPTSASDDSNGLEWENDFVSAEMDDNGNSEYSGFVNPVLELSDSGIRHSDTDQQTR

SEQ ID NO: 46280 - DNA, 810 bp, Artificial Sequence
  derived and/or modified sequence
atggggaattgctgctggacacaatgcttcgggcttctgcgtaaagaagctgggcgactgcagcgagtgggtggcggaggcgggagcaaatatttcaggacctgctcacgcggagagcacctaacgattgagtttgagaatttagtggaaagcgatgagggggagagccccgggagcagccatcggcctctcactgaagaggagattgtagatttacgtgagcggcactatgattctatagcggagaagcagaaggaccttgacaagaagatacagaaagagcaagagcgccagcgtattgtccagcagtaccacccctctaataacggagagtatcagtccagcggacctgaggatgatttcgaatcatgccttaggaacatgaagtcgcagtatgaagtgttccgatcttcaagattatcctccgatgccactgtcctgactccaaatacggagtcaagctgtgaccttatgaccaagacaaaatccacctctgggaacgacgactccaccagcctcgatttagagtgggaggatgaggaaggtatgaatcgcatgctccccatgagagaaaggagcaaaacagaggaagacatcctgcgagccgctttaaagtatagtaataaaaagaccgggagtaatcccacctctgcctctgacgatagcaacggcctcgagtgggagaatgattttgtttcagccgaaatggacgacaatggaaatagcgaatacagcggtttcgtaaaccccgtactagaactgtccgactcagggattcgccacagtgataccgatcaacagacacgctag

SEQ ID NO: 46281 - DNA, 810 bp, Artificial Sequence
  derived and/or modified sequence
atgggcaactgctgctggacccagtgcttcggcctgctgaggaaggaggccggccgcctgcagagggtgggcggcggcggcggcagcaagtacttccgcacctgcagcagaggagagcacctgaccattgaatttgagaacctggtggagagtgatgaaggagagagccctggcagcagccaccggcccctgacagaggaggagatcgtggacctgcgggagcggcactatgacagcattgctgagaagcagaaggacctggacaagaagatccagaaggagcaggagcggcagagaattgtgcagcagtaccaccccagcaacaatggagagtaccagagcagcggcccagaagatgactttgagagctgcctgaggaacatgaagagccagtatgaggtgttccgcagcagccggctgagcagtgatgccaccgtgctgacccccaacacagagagcagctgtgacctgatgaccaagaccaagagcaccagcggaaatgatgacagcaccagcctggacctggagtgggaggatgaggagggcatgaacaggatgctgcccatgagggagaggagcaagacagaggaggacatcctgcgggccgccctgaagtacagcaacaagaagacaggcagcaaccccaccagcgccagtgatgacagcaatggcctggagtgggagaatgactttgtgtctgctgagatggatgacaatggaaacagcgagtacagcggctttgtgaaccctgtgctggagctgagtgacagcggcatccgccacagcgacacagaccagcagaccaggtag

SEQ ID NO: 46282 - DNA, 810 bp, Artificial Sequence
  derived and/or modified sequence
atgggcaactgctgctggacccagtgcttcggcctgctgcggaaggaagccgggagactccaaagagtgggtggcggaggcgggtctaagtactttcggacatgctcccgcggcgagcacctgactatcgaattcgagaatctcgttgaaagcgacgaaggcgagtcaccaggaagctcacatagaccattgacagaagaagaaattgtcgatttaagagaacggcactatgactccatcgctgaaaaacagaaagacctggacaagaaaattcaaaaagagcaggaacgtcaacgcatagtgcaacaatatcaccccagtaataacggtgagtaccagtcatcaggacccgaggacgactttgagagttgtttaaggaacatgaaaagccagtatgaggtctttagaagtagcaggctgtcctcagatgccacagtgctgactccgaataccgaatccagctgcgatctgatgacaaaaacaaagtcaacaagtgggaacgacgattcgacatctctggacctggaatgggaagatgaggagggcatgaatcgcatgctgcccatgagggaacggtcgaaaactgaggaagatatactgcgcgctgctttaaaatatagcaacaagaagactgggagcaaccctacgtcagcaagcgacgatagtaacggtttagagtgggagaatgacttcgtcagcgccgagatggatgacaatggcaactccgaatacagcgggttcgttaatcccgttttggagctttctgactctggaattcgacactctgacactgatcagcagaccagatag

SEQ ID NO: 46283 - DNA, 810 bp, Artificial Sequence
  derived and/or modified sequence
atggggaactgttgttggacccagtgcttcggcttgcttaggaaggaagcaggtagactgcagcgcgtgggtggcggaggaggaagtaaatatttccgaacgtgtagccggggagagcatttaacaattgagttcgagaatctcgtagaatcagacgagggtgaaagcccagggtccagccataggccactgaccgaggaggagattgtcgaccttagagagaggcattatgactccattgcggaaaaacaaaaggacctcgataagaagattcagaaagaacaggagagacaacggatagtgcagcagtatcacccctctaacaacggtgaatatcagagtagtggtccagaggacgacttcgagagctgtctacggaatatgaaatcccagtatgaagtctttagatcttctcgtctatcaagcgacgccactgtgcttacccccaacacagagtcttcttgtgacctgatgactaagacgaagtcgacttctggcaacgatgacagtacatctctcgatcttgagtgggaggatgaggagggtatgaacaggatgctgcctatgcgcgagcgctccaagaccgaggaggacatcctgagggcagcactgaaatattcaaataagaaaaccggaagcaatccaacgtcagcctcagacgactccaacggcctcgaatgggaaaatgatttcgtgtcagcagagatggatgataacggcaactctgaatactctggatttgtgaaccccgtcctggagctctcagatagcggcattaggcacagcgatacagaccaacaaacacggtag

SEQ ID NO: 46284 - DNA, 2337 bp, Artificial Sequence
  derived and/or modified sequence
cgagggagtccagagccttgagcccggtgctcctccctcgcgcagcggtggctctgcggccgctggagtaaacactgcctttgttccctagcgcctcgtctttcgtcgccccgtgccctcacgccgccgggctctggccggcccgccctcggtccttgaaccccatttcggctcgtgccgtgcggatgcagctgccgggcctgggtttgggcattgagcgggaggaggaggaggagcggcggcgcctgggcggcatgcgatggggaactgctgctggacgcagtgcttcggactgcttcgcaaggaagcggggcggctgcagcgagtaggcggcggcggaggatccaagtattttagaacatgctcaagaggtgagcacttaacaatagagtttgagaatctagtagaaagtgatgaaggggagagcccaggaagcagtcataggcctcttactgaggaagaaattgttgacctaagagaaaggcattatgattccattgccgaaaaacaaaaagatcttgataagaaaattcaaaaagagcaagaaaggcagagaattgtgcagcaatatcatccttccaacaatggagaatatcaaagttcaggaccagaagatgacttcgaatcttgtttgagaaatatgaagtcacagtatgaagtttttcgaagtagtagactctcatcagatgctacagttttgacaccaaatacagaaagcagttgtgatttaatgaccaaaactaaatcaactagtggaaatgacgacagcacatccttagatctagagtgggaagatgaagaaggaatgaatagaatgcttccaatgagagaacgttccaaaacagaggaagacattctacgggcagcacttaagtatagcaacaagaagactggaagtaatcctacatcagcctctgatgattccaatgggctggagtgggaaaatgattttgttagtgccgaaatggatgataatggaaattccgagtattctggatttgtaaatcctgtattagaactgtctgattctggcataaggcattctgacacagatcaacagactcgatagggtaaaattgtgtgaccttgtttatcagttatgaccaaatgttaaaaaccaactagaatgtataagtgattgtgcttagcctttttgtaagggagatgtgtaagaaaccatgttgtaaatgcttattttattacaaaggagtagggatgataggatctgaattgatacagaattaagtgcaatttcatcatctgccttctgcttttcaagaccaatttaatggtcctgtcatgttactgattaaatttactttgtcttgtctttatagcatttctgtttactatggtagatttccactttcaatttttaaaattaattttactttgaatgatttatgaagcctatttcattgtctaactatgaaaatattaagacttttttgttaattctcagccgatgtgaaggaagcatgaggagggatcgtcagattcagatttagaatagtgttcccgtttccagcattatttatttctatgacttctttggattttattatctaatagtaagtacagttgatgtgggtagatgactctaagaaatgctgaagtatcggcattacatgtgtttatttacatgtcctagtatgataatgttgattcaatctgaacaaaagataatataaaaataacccttcagagtttggacatttcaagttggtaataataaaaaataatatttaagaagatatatatatatatatatttagttttttccacttcattttacatgccactatattgactttaattgatatacagtattaagtttttaggtgccattatttttaaaaaattctatatttccaatgaacgatgttagattttacacagaacatattctctgcatgatttcagaaaagaaaatctaaaaaggtaatacgggtatttcaaataaaatcctttctggtatgaaaggctccattgattttattaagccttcctttaccttgtagtacaaggtgctttaatgggatagaactaagcatatcaatatctataactgcattttgtgctagacaattactgttcttttctctaaaatgtatatgtcaatttacaaggccagggatagaaaacactccataattgctttccttgattttgctgaggatttggtatgattttagtaagcaaactgttttttggtttttccttaatgtttttaattttttttcctcttgcaacaatgacggtgcatgttcttataaatataggaaggtccagatataaatagtaacctaaagttcttgctgtgcttaaaaaaaaaaa

SEQ ID NO: 46285 - DNA, 810 bp, Artificial Sequence
  derived and/or modified sequence
atgggcaactgctgctggacccagtgcttcggcctgctgagaaaggaggccggcagactgcagagagtgggcggcggcggcggcagcaagtacttcagaacctgcagcagaggcgagcacctgaccatcgagttcgagaacctggtggagagcgacgagggcgagagccccggcagcagccacagacccctgaccgaggaggagatcgtggacctgagagagagacactacgacagcatcgccgagaagcagaaggacctggacaagaagatccagaaggagcaggagagacagagaatcgtgcagcagtaccaccccagcaacaacggcgagtaccagagcagcggccccgaggacgacttcgagagctgcctgagaaacatgaagagccagtacgaggtgttcagaagcagcagactgagcagcgacgccaccgtgctgacccccaacaccgagagcagctgcgacctgatgaccaagaccaagagcaccagcggcaacgacgacagcaccagcctggacctggagtgggaggacgaggagggcatgaacagaatgctgcccatgagagagagaagcaagaccgaggaggacatcctgagagccgccctgaagtacagcaacaagaagaccggcagcaaccccaccagcgccagcgacgacagcaacggcctggagtgggagaacgacttcgtgagcgccgagatggacgacaacggcaacagcgagtacagcggcttcgtgaaccccgtgctggagctgagcgacagcggcatcagacacagcgacaccgaccagcagaccagatag

SEQ ID NO: 46286 - protein, 846 aa, Artificial Sequence
  derived and/or modified sequence
MFKCWSVVLVLGFIFLESEGRPTKEGGYGLKSYQPLMRLRHKEKNQESSRVKGFMIQDGPFGSCENKYCGLGRHCVTSRETGQAECACMDLCKRHYKPVCGSDGEFYENHCEVHRAACLKKQKITIVHNEDCFFKGDKCKTTEYSKMKNMLLDLQNQKYIMQENENPNGDDISRKKLLVDQMFKYFDADSNGLVDINELTQVIKQEELGKDLFDCTLYVLLKYDDFNADKHLALEEFYRAFQVIQLSLPEDQKLSITAATVGQSAVLSCAIQGTLRPPIIWKRNNIILNNLDLEDINDFGDDGSLYITKVTTTHVGNYTCYADGYEQVYQTHIFQVNVPPVIRVYPESQAREPGVTASLRCHAEGIPKPQLGWLKNGIDITPKLSKQLTLQANGSEVHISNVRYEDTGAYTCIAKNEAGVDEDISSLFVEDSARKTLANILWREEGLGIGNMFYVFYEDGIKVIQPIECEFQRHIKPSEKLLGFQDEVCPKAEGDEVQRCVWASAVNVKDKFIYVAQPTLDRVLIVDVQSQKVVQAVSTDPVPVKLHYDKSHDQVWVLSWGTLEKTSPTLQVITLASGNVPHHTIHTQPVGKQFDRVDDFFIPTTTLIITHMRFGFILHKDEAALQKIDLETMSYIKTINLKDYKCVPQSLAYTHLGGYYFIGCKPDSTGAVSPQVMVDGVTDSVIGFNSDVTGTPYVSPDGHYLVSINDVKGLVRVQYITIRGEIQEAFDIYTNLHISDLAFQPSFTEAHQYNIYGSSSTQTDVLFVELSSGKVKMIKSLKEPLKAEEWPWNRKNRQIQDSGLFGQYLMTPSKDSLFILDGRLNKLNCEITEVEKGNTVIWVGDA

SEQ ID NO: 46287 - DNA, 2541 bp, Artificial Sequence
  derived and/or modified sequence
atgtttaaatgttggagcgttgtgctcgtcctgggatttattttcctcgagtctgagggccgacctaccaaagaggggggttatgggctgaagagctatcaaccactgatgcggctccgacacaaagagaagaatcaggagtccagtcgagttaagggtttcatgatccaggatggaccattcgggagttgtgagaacaaatattgtggcctcggcagacactgtgtgaccagtcgagagactggccaagcggagtgtgcgtgcatggatctctgtaagcggcattacaaaccagtatgcggtagcgatggcgagttttacgagaatcactgtgaggtgcatcgtgccgcttgtttgaagaaacagaaaattacgatcgtccataatgaggactgtttcttcaagggtgataaatgcaagacgacagagtatagtaagatgaagaacatgctccttgacctccagaatcaaaaatacattatgcaggagaatgaaaatcctaacggtgatgacatctcacgtaaaaagctactggttgaccagatgtttaaatactttgatgctgactcaaatggactagttgatatcaacgagctgacccaagtgataaaacaagaggagctgggcaaagatctgtttgactgtactctctatgtgctcctgaagtacgacgacttcaatgcagacaaacacctggctctggaggagttctacagggcctttcaggtgattcagttatccctcccagaagatcaaaaactgtcgataaccgcggctaccgtggggcagtccgcagtactgtcctgtgctattcagggcaccctgagacccccaatcatctggaagcggaataacatcatcctcaataacctcgatctggaagacatcaacgatttcggggatgacggatctctgtatataactaaggtaaccactacgcatgtgggaaattacacctgctacgcagacggctacgagcaggtgtaccaaactcatatctttcaggtgaacgtgccacctgtgatcagagtctaccccgaatcacaggcccgtgagccgggagttacagcgagtctcagatgtcacgctgaaggcatacccaaaccccagctcggctggctgaagaatggtatcgatataacccctaagctgagcaagcaacttactttacaggccaacggtagcgaggtgcacattagtaacgtcagatatgaagacactggcgcatatacttgcatcgccaaaaatgaagctggagttgacgaagacatatcttctctctttgtggaggatagcgccaggaagacacttgctaacatattgtggcgcgaagaggggctggggatcggcaacatgttctacgtgttctacgaagacgggataaaggtgatccaacctattgagtgtgaatttcagcgccacattaagccctctgaaaagctgctcggctttcaagacgaggtatgcccaaaagcagagggagatgaggttcagcggtgcgtgtgggcttctgctgtcaatgtcaaagacaagttcatctatgttgcccaacctacgctcgatcgggtcttgatcgtggatgttcagtcccagaaggtagtgcaggctgtgtccacggatccagtgccggtgaagctgcactatgataaatcacatgaccaggtgtgggttctgagctggggcacccttgagaaaacaagccctaccctccaggtcatcaccttggcctctggcaacgtcccacaccacactatccatacgcaacctgtcggtaagcagtttgatcgcgtagatgacttctttattcctacaaccacgttaattattacccacatgcgctttggttttattctgcataaggatgaggcggctctccagaaaatcgacctcgagactatgagttacatcaagacaatcaatctcaaagattacaagtgcgtaccgcagtctctggcttatacacatctcgggggatactactttataggctgtaaacctgatagcacgggagccgttagtcctcaagtcatggttgatggggtgactgactccgtgattggcttcaactccgatgtgaccggcaccccatacgtgtcccccgacggtcattatttggtcagcattaacgatgtgaagggactcgtgcgagtgcagtatatcacaataagaggggagattcaggaagcgttcgatatctacacaaaccttcacatttccgatctggcctttcaaccctcctttaccgaagctcatcagtataacatttatggctcttcctctacgcaaaccgacgtcttgttcgtggagctgagtagcggaaaagtgaagatgattaagtcccttaaagaacctctgaaagctgaagaatggccttggaatcgcaagaacaggcagatccaggacagcggccttttcggccagtacttgatgactccaagtaaagattccttgttcattctggacggtaggctgaataagcttaattgtgagatcactgaagtcgagaagggtaatacagttatctgggtgggggacgcttag

SEQ ID NO: 46288 - DNA, 2541 bp, Artificial Sequence
  derived and/or modified sequence
atgttcaagtgctggtcggttgttcttgtgttggggtttatctttctagaatccgaagggcgacctaccaaagagggcggatacgggctgaaatcatatcagccactcatgaggctccggcacaaggagaagaaccaggaaagcagtagggtaaagggatttatgattcaggacggacctttcgggtcttgtgagaacaaatattgcggtctgggacgacactgcgtcacttccagggaaacaggccaggcagagtgcgcctgcatggatttgtgtaaaagacactataagcctgtatgcggctccgatggcgagttttatgaaaaccattgtgaagttcatagggctgcctgtctaaagaaacaaaaaattaccattgtacataacgaggattgtttcttcaagggcgacaagtgcaagactaccgaatattcgaagatgaagaacatgctgctcgacttgcaaaatcaaaagtacatcatgcaggaaaacgaaaacccaaacggtgacgacatttccaggaagaagctcctcgtcgaccagatgtttaaatattttgacgcagacagtaatgggctcgtcgatataaacgaattgacccaggttataaaacaagaggagctggggaaagatttgtttgactgcacactctatgttctcctgaagtacgacgacttcaatgcagataagcacctggccctcgaagaattctatagggcttttcaagttatccagctatccttacccgaggatcagaaacttagcattaccgccgcaacggtgggccagtcagccgttttaagctgtgctatccagggcaccctccgaccacccatcatctggaaacgaaataacataatcctaaataacctggatctggaagatattaacgatttcggtgacgatggcagcctttatattactaaggttaccaccactcacgtcggtaattatacatgctacgctgatggttacgagcaggtgtaccagacacacattttccaggtaaatgttccccctgtaatccgcgtctatcctgaaagccaggcgagggagcctggcgtaacagccagtctgcggtgccatgcagaggggattcctaagcctcaactgggttggctcaagaacggcatagacattacacctaaactttccaaacagctgactctgcaggccaatgggagcgaggttcatatcagtaacgtcagatatgaggacaccggggcttatacctgcatcgctaaaaatgaagctggcgtggatgaagatatctcttcactctttgtggaggacagtgctaggaaaacactcgccaatatcctgtggcgggaggagggcttgggaattggaaacatgttctacgtgttctatgaggatggcatcaaagtcatccaaccaatcgaatgcgaattccagaggcatatcaagccctccgaaaaattactcggctttcaagatgaggtatgtccaaaagccgagggagacgaggttcagaggtgcgtttgggctagcgctgtgaatgtgaaagacaaatttatctacgttgcccagccgaccttggacagagtgttaattgtggacgtacagtcccagaaagtggttcaggcagtctctaccgaccctgtacctgtgaagttgcactacgataaatctcacgatcaggtgtgggtgctgtcctggggcaccttagaaaagaccagccctacccttcaagttatcacattagcctcgggaaacgttcctcaccacacaatccacacacaaccagttggaaaacaattcgatagagttgacgatttttttatcccaactaccacgctaatcatcactcacatgcgatttggtttcatactgcataaagatgaggcggctctccaaaagatagatctggagacaatgtcctacataaagaccataaacctcaaagactacaagtgcgtgccccaaagcttggcttacacacacctaggaggatactacttcatcgggtgcaagccagactccactggggctgtgtctccgcaagtgatggtcgatggcgttacagatagcgtcataggattcaattcggacgtcaccggaactccctacgtcagtccagacgggcactacctggtgagcatcaacgacgtcaaggggctggtcagggttcagtacatcactatccggggagagattcaggaggcctttgacatttacacaaaccttcatatctctgacttagcctttcagccctccttcaccgaggcacatcagtacaacatttacggaagtagctccacgcagactgatgtgttgtttgtggagctgtcgtcggggaaggtcaaaatgataaagtccctcaaagaaccactaaaagcagaggaatggccttggaacagaaaaaaccggcaaatccaggatagcggactgtttgggcagtacctgatgaccccctccaaggatagtctgttcattctggacggaagactgaataaacttaactgcgaaataacagaagtagagaaaggaaacacagtaatctgggtgggcgacgcatag

SEQ ID NO: 46289 - DNA, 2541 bp, Artificial Sequence
  derived and/or modified sequence
atgttcaagtgctggtccgtggtcctggtgcttggattcatttttttggaatccgaagggagacccacgaaggagggcggatacggactgaaatcctatcagccacttatgcgcctacggcacaaggagaaaaaccaggagtcatcacgcgtgaaagggttcatgatccaggatgggccttttgggtcatgtgagaacaagtattgcggtctgggaagacattgcgtgacctccagagaaaccggccaggcagaatgtgcatgtatggacttatgtaagcggcactataaaccagtttgtggatcagatggcgagttctacgagaaccactgcgaggttcatcgtgccgcgtgccttaaaaagcaaaaaatcaccatcgtgcacaacgaggactgtttcttcaagggcgacaagtgtaagacaacagaatatagtaagatgaagaatatgttgttagaccttcaaaaccaaaagtatattatgcaagaaaacgaaaatcccaacggcgacgatattagtaggaagaagcttttggtcgatcagatgtttaagtactttgacgcagacagtaatgggttggtggacatcaatgagctgacacaggtgatcaagcaggaggagctgggtaaagacctttttgattgcactctgtatgtgctccttaaatatgatgattttaatgccgacaagcatctagctctcgaggaattttaccgggcttttcaggttatacagctttctctgccagaagatcagaaactgtcaattactgcagctactgtcggacagagcgctgttctgtcttgcgctatacaaggaactctaagacctcctatcatctggaaacgtaataatataattttgaataatctcgaccttgaagatattaacgactttggagacgatggcagtctctacattaccaaagtgaccacgacacacgttggtaactatacttgctatgctgacggctatgagcaggtatatcagactcacattttccaggtgaacgtacctcccgtgatccgcgtctacccagaaagtcaggcccgcgagccgggtgtcacagccagcttacgctgccatgctgagggaattccaaaaccacagctgggctggttgaagaatggcatcgacatcacacctaagctcagcaaacagctcactttgcaagccaacgggagcgaggtgcatatctctaatgtcagatatgaggataccggagcctacacctgcatcgctaaaaatgaagctggcgttgacgaggacatctcttcattattcgtcgaggattccgcgagaaagacactggcgaacattctttggcgcgaggagggcctcggcatcggaaatatgttttatgtcttttatgaggatggcatcaaagtgattcagcctattgagtgcgagtttcagagacatattaaaccttctgaaaaactgcttggttttcaggacgaagtctgccctaaagcggagggcgacgaggtgcagagatgcgtgtgggcctctgccgtcaacgttaaagataagttcatttacgtggcccagccaacactggaccgtgtgctgatcgtggacgtgcagagccagaaggtcgtgcaggccgtgagcaccgacccggtccccgtgaagcttcattacgataaatcacacgaccaagtctgggttctgtcttgggggacattagagaaaacttcacccaccctccaggtcatcaccctggcctctgggaacgtgccacaccatacgattcatacacagcctgtggggaagcagtttgatcgggtggacgatttctttataccaaccactaccctcattattactcacatgagatttgggttcatactgcataaggatgaggccgctctgcagaagatcgatctggaaaccatgtcatacattaagaccattaaccttaaagattacaagtgcgttccccagtcactggcgtatactcatctagggggttactatttcatcggttgcaagccagactcaacaggggcagtatcacctcaagtaatggtcgatggggttacagattcagtgattggttttaatagcgacgtgaccgggacgccatatgtatctcctgacggacactacctggtaagcatcaatgatgtcaaagggcttgtcagagtgcaatatattactataagaggcgagatacaggaagcattcgatatttacacgaacttacacatttcggacctcgcatttcagccaagtttcactgaagctcaccaatataatatctatgggtcaagcagtacacagacagatgtgttattcgtcgagctctcctctggcaaggtgaaaatgatcaagtccctgaaggagcctctcaaagctgaggaatggccatggaacagaaagaaccgtcaaatccaggattcaggcttattcgggcagtacttgatgacaccttcaaaggactctctcttcattttggacgggcggctgaacaaactgaactgtgagataacagaagtggagaaaggaaatacggtaatctgggttggagatgcatag

SEQ ID NO: 46290 - DNA, 2541 bp, Artificial Sequence
  derived and/or modified sequence
atgttcaaatgctggtccgtggtgttggtactcggttttatttttctcgagtccgagggcaggcccacaaaggaaggagggtatgggctcaaaagttaccaaccccttatgcggctgcgacataaggagaaaaaccaagagagtagcagggtgaaagggtttatgatccaggatgggcctttcggctcttgcgaaaacaaatactgtggactcggaaggcattgtgtgactagcagggagacaggtcaggccgagtgcgcatgcatggacctctgtaagcggcattacaaaccagtgtgtggaagcgacggagagttttatgagaaccactgtgaagtacacagggccgcttgtctcaagaagcagaagatcactatcgtgcataacgaggactgcttcttcaaaggtgataagtgcaagaccacagagtacagcaagatgaaaaatatgctgctggatttacagaaccaaaagtatatcatgcaagagaatgaaaatccaaatggcgatgatattagcagaaagaagctcttggtggaccagatgtttaagtatttcgacgccgactcgaatggccttgtggacattaacgagcttacacaggttattaaacaggaagaactggggaaagatctgttcgactgcaccctgtacgtacttcttaaatacgatgatttcaacgcggacaaacatctcgccctggaagaattttacagagcctttcaggtgatccagctgagtctgcccgaagaccagaaactgagtataacagccgcgaccgtgggccagtccgccgtgctgtcttgcgcgatccagggtactctgagaccccctataatctggaaaagaaataacattattctgaacaacttagatctcgaggacatcaatgactttggggatgatggctctctgtatataacaaaagttacgacgacacacgtgggaaattacacatgctatgccgatggctacgaacaggtgtatcaaacacacatatttcaggttaacgtcccgccagtgattcgagtttaccctgagagtcaggcccgggagcctggtgtcactgcctccctccgatgtcacgcggaaggcatcccaaaacctcagttaggatggttgaaaaatgggatcgatataactccgaagctgagcaaacagctaaccctacaggccaatggatcggaagtgcacataagtaatgtgaggtacgaagatacaggcgcttacacttgtatcgctaaaaatgaggcaggggtggatgaagatatctctagcctcttcgtggaggacagcgctagaaagacattggctaacatcttatggagggaggagggacttggcattgggaatatgttttatgtcttctatgaggacggaatcaaagtcatccagccaatcgaatgtgaatttcagagacacatcaaacccagcgagaaactcctcggttttcaggacgaagtgtgccctaaagcggagggtgacgaagtgcagaggtgtgtttgggccagcgctgtgaatgtcaaagacaagtttatctacgtagctcaacctacattggaccgtgtactgatcgtggatgtgcagtctcaaaaagtagtccaggccgtgtccacagacccggtgcccgtgaaattgcactacgataaatctcatgaccaggtgtgggtcctgtcatgggggactttggaaaagaccagtcctacgctccaggtcatcacactcgccagcggaaatgtacctcatcacaccatccatacacagccagttggtaaacagttcgatcgcgtggacgattttttcatccccacaaccactttaatcatcacacatatgaggttcggattcatcctgcacaaggacgaagctgcgctacaaaagattgacctggaaactatgtcctacattaaaactataaacttaaaggactataagtgcgtgccacaatcactggcatatacccacctggggggctactattttataggatgcaagccagatagtaccggcgctgtatcaccccaggttatggtcgatggcgtcaccgattctgtaattgggtttaactccgatgtgacaggcaccccctacgtcagccctgatggccactacctcgtgagcatcaatgacgttaaaggcctggtgcgcgtgcagtatattacaattcgcggcgagattcaggaagcgttcgatatttacacaaatctccatatctccgacctggctttccagccttcctttactgaggcacaccagtacaatatttacgggtcctccagcacccaaaccgacgtcctattcgttgaattgagctccggtaaggtgaagatgatcaaatcgctgaaggaaccgcttaaagccgaagagtggccatggaatcgtaagaatagacagattcaggacagcgggttatttggtcagtaccttatgacgcctagcaaagacagtcttttcattctagatggccgccttaacaagctgaattgtgaaatcacagaagtcgaaaagggcaacaccgtgatatgggttggggatgcttag

SEQ ID NO: 46291 - DNA, 2541 bp, Artificial Sequence
  derived and/or modified sequence
atgtttaagtgttggtctgttgtactggttttgggctttatctttctggaaagcgagggcaggcctacaaaggagggcggttacggactaaagagctaccaacccctgatgcgacttaggcataaagagaagaaccaggagtcgagtcgggtaaaaggcttcatgattcaagatggtccctttggctcctgtgaaaataaatattgtgggctcggtaggcactgcgtcacaagccgcgagactgggcaagccgaatgtgcatgtatggatctgtgtaaaaggcattataagcctgtctgcggcagcgacggcgagttttatgagaatcattgcgaggttcaccgcgccgcctgcctcaagaaacagaaaattacaatcgttcataatgaagactgcttttttaaaggagataaatgtaagaccactgaatactctaaaatgaagaacatgcttttagatttgcagaaccagaaatatatcatgcaggagaacgagaaccccaatggagatgatatttcacggaagaagttgctggtggaccagatgtttaaatacttcgatgcagattccaatggcctcgtcgacatcaacgaactgacgcaggtgatcaagcaggaggagctgggtaaagacctttttgattgcactctgtatgtgctccttaaatatgatgattttaatgccgacaagcatctagctctcgaggaattttaccgggcttttcaggttatacagctttctctgccagaagatcagaaactgtcaattactgcagctactgtcggacagagcgctgttctgtcttgcgctatacaaggaactctaagacctcctatcatctggaaacgtaataatataattttgaataatctcgaccttgaagatattaacgactttggagatgacggatccctatacattactaaggtcacaacaacacatgttggtaattatacctgctatgcagatgggtatgagcaggtttatcagactcacatttttcaagtcaatgtccctccagtgatccgcgtgtatccagaatcacaggccagagaaccaggagtcaccgcctctctaagatgtcacgccgagggtataccaaaaccccagttagggtggctaaagaatggtatagacattacaccaaaactaagtaaacagctcaccctgcaagctaacggatctgaggtgcacatttcgaacgtgcggtacgaagataccggggcctatacatgtattgcgaagaacgaagcaggtgttgacgaagatatcagtagcctgttcgtggaggattccgcccggaagacactggccaacattttatggagagaggaaggactagggatagggaatatgttttacgttttttacgaagacggcattaaggtgatccagcctatcgaatgcgaatttcagcgacacatcaaaccctcagagaaactgctggggtttcaggacgaggtttgtcccaaggctgaaggagatgaagtgcagagatgcgtctgggcgagcgccgttaatgtcaaggacaaattcatttatgtggcccaacccactctggaccgcgtactgatcgttgatgtccagtctcaaaaagtggttcaagcagtgtctacagaccccgtgccagtgaaattgcattacgataagtcacatgatcaggtttgggttctgtcttggggcaccctggaaaaaacatcaccaactctgcaggtaattacactcgcctccggaaacgttccccaccataccatccacacccagcctgtgggtaaacaattcgaccgggttgatgacttttttatccctacaactaccctgataatcacccacatgcggttcgggttcatactccacaaagacgaagcagctctacaaaaaatagatctagagaccatgtcctatatcaagacgatcaacctgaaggattacaaatgtgttccccaatccttagcctatacacatctaggaggctactacttcatcggttgtaaacctgactctaccggtgcggtgtccccacaggtcatggtcgacggagtcacggattcagttattggcttcaacagcgatgtcaccggtaccccttacgttagcccagacgggcactacttagtatcaatcaacgatgtcaaaggtttggtgagagtccagtacatcactatcaggggcgagatccaagaggcattcgacatctataccaacctacacatctctgacctggctttccaaccctcattcacagaggctcatcaatacaacatatatggctcctctagcactcagactgatgtcttgtttgttgaactctcaagcggtaaggttaaaatgatcaaatctctgaaggaacccctgaaagcggaggaatggccatggaaccgcaaaaatcgccaaattcaagattccggactctttgggcagtatctcatgacacctagcaaagacagtctcttcattttggatggacggctcaataagctgaactgcgagattacagaagtagagaaggggaacacagttatttgggttggtgatgcttag

SEQ ID NO: 46292 - DNA, 2541 bp, Artificial Sequence
  derived and/or modified sequence
atgttcaagtgttggagtgtagttctcgtgcttggtttcatatttctggaaagcgaggggcggcccacaaaagaaggcggctatggccttaagtcataccagcctttgatgcgactgaggcacaaagagaagaaccaggaaagtagtagagtgaaggggttcatgatacaggatggcccgtttggaagctgcgaaaataaatattgcggactcggccgacattgcgtgacatcacgggaaacaggacaagcagagtgcgcctgcatggatctgtgcaaaaggcattataagcccgtgtgcggcagcgatggcgagttttatgaaaatcattgtgaggttcacagagcagcttgtctaaagaaacagaagataaccatcgttcataatgaagactgctttttcaagggggataagtgcaagactacagagtattcaaaaatgaaaaatatgttactggatcttcaaaatcaaaaatacattatgcaggaaaatgaaaaccccaacggcgacgatatcagccgcaaaaaactgctggtggatcagatgttcaagtattttgacgcagatagtaatggcctcgttgatattaacgaactcacacaggtcattaagcaggaggaactgggcaaagacttatttgattgcactctgtacgttctccttaagtacgatgattttaacgccgataagcacctagccctggaagagttttatcgggcctttcaggttatacagctatcacttcctgaggatcagaaattgagtattacagccgccacagtaggacagtctgccgttttaagttgcgccattcaaggtaccctacgaccaccaatcatctggaagcgaaacaacattatccttaacaacctggatctcgaggatataaatgacttcggagacgatgggagcctctacattaccaaagttacgacaacgcacgttggtaattacacctgttatgctgacggatatgagcaagtgtatcagacccatattttccaagtcaatgtgccacccgtgatccgcgtttacccagagtcccaggccagggagcccggagtgactgcctccctccgctgccacgcagagggaatcccgaaacctcagctcggatggctaaagaatggcatcgacataacacccaaactctccaaacagttgactcttcaggccaatggaagcgaagtccatatcagtaatgtgcggtatgaagacacgggtgcttacacctgtattgctaagaatgaggcaggcgtggatgaggatatttctagtctgtttgtggaagactctgctcggaagacattggctaatattttgtggagagaggagggtttaggcattggtaacatgttttatgtattttacgaggacggcattaaagttatccaacccattgagtgcgagtttcagcgccatatcaagccaagtgagaagctgctgggattccaggacgaggtgtgcccaaaggccgaaggagatgaagtgcagcgttgcgtttgggcctcagcagtgaacgtcaaagataaatttatatatgttgcgcagcctaccttagatcgggtactaatcgttgacgtgcaatcgcagaaggtagtccaggccgtcagcacagaccccgtgccagtgaaattgcattatgacaagagccatgatcaggtatgggtcctgtcctggggcaccttagagaaaacctccccaacactccaggtcattactctcgcttccgggaacgtgccccatcataccattcatacccaacccgttggaaaacagttcgacagagtagatgatttctttatccccaccacaactctgattattacccatatgagattcggttttattcttcacaaggacgaggctgctctgcagaaaatcgatttagagaccatgtcttacatcaagacgattaaccttaaagactacaaatgcgtgccccagagcctagcttatacacaccttggcggctattatttcatcgggtgcaagccagatagcacaggtgccgtcagcccacaggtcatggtggacggagtaactgatagcgtgatcggcttcaacagcgatgtcacgggaaccccatatgtgtccccagatggacattacttggtaagcatcaatgacgttaaaggactcgtaagggtgcagtatatcacaatcagaggagagattcaggaggcctttgacatctatactaatttacatatttccgacctggctttccaaccctcatttaccgaggcacatcaatataatatttatggttcatcaagtacacagaccgacgtcctgtttgtcgagctgtccagcggcaaggttaagatgataaagtctttgaaggaacccctgaaggcggaagaatggccatggaatcgcaagaatcggcagatccaagactctggactgttcgggcaatatctaatgaccccttcaaaagattctttattcatactggatggaagacttaataaacttaattgcgagataactgaagtcgagaaagggaatactgtgatctgggtgggggacgcgtag

SEQ ID NO: 46293 - DNA, 2541 bp, Artificial Sequence
  derived and/or modified sequence
atgtttaagtgctggtcagttgtcttggttctcggattcatttttctggagtcggaaggaaggccaaccaaagaaggaggatatggccttaaatcctatcagcctctaatgagattgcgacataaggaaaaaaatcaagaaagttcaagagtcaaaggatttatgattcaggatggcccttttggatcttgtgaaaataagtactgtggtttgggaagacactgtgttaccagcagagagacagggcaagcagaatgtgcctgtatggacctttgcaaacgtcactacaaacctgtgtgtggatctgacggagaattctatgaaaaccactgtgaagtgcacagagctgcttgcctgaaaaaacaaaagattaccattgttcacaatgaagactgcttctttaaaggagataagtgcaagactactgaatacagcaagatgaaaaatatgctattagatttacaaaatcaaaaatatattatgcaagaaaatgaaaatcctaatggcgacgacatatctcggaagaagctattggtggatcaaatgtttaaatattttgatgcagacagtaatggacttgtagatattaatgaactaactcaggtgataaaacaggaagaacttggcaaggatctctttgattgtactttgtatgttctattgaaatatgatgattttaatgctgacaagcacctggctcttgaagaattttatagagcattccaagtgatccagttgagtctgccagaagatcagaaactaagcatcactgcagcaactgtgggacaaagtgctgttctgagctgtgccattcaaggaaccctgagacctcccattatctggaaaaggaacaatattattctaaataatttagatttggaagacatcaatgactttggagatgatgggtccttgtatattactaaggttaccacaactcacgttggcaattacacctgctatgcagatggctatgaacaagtctatcagactcacatcttccaagtgaatgttcctccagtcatccgggtgtatccagagagtcaggctagagagcctggggtaactgccagtcttaggtgccatgcagagggcataccaaagcctcagcttggctggttgaagaatggaattgatattacaccaaagctttccaaacaactcacgcttcaagcaaatggcagtgaggttcacataagcaatgtgcgctatgaagatactggagcatacacttgtatcgcaaagaatgaagcaggagtggatgaagacatctcttctctttttgtggaagactctgctagaaagaccctagctaacatattatggagagaagaaggtctgggaattgggaacatgttctatgttttttatgaagatggaatcaaagtgatacaacccatagaatgtgaatttcagaggcacattaagcctagtgaaaagctccttggatttcaggatgaagtctgtcccaaagctgagggagatgaagttcagaggtgtgtgtgggcatcagctgttaatgtcaaagacaagttcatttatgttgcacagccaactttggacagagtccttattgttgatgtgcagtcccaaaaagttgttcaggcagtgagcacagaccctgtcccagttaaattacactatgacaaatcacatgatcaggtctgggtgctaagctggggtaccttggagaagacatcaccaacactacaggtaattaccctggccagtgggaatgtgcctcaccacacgatccacacccaaccagtgggaaagcaatttgacagagtggatgattttttcattcccaccacaacactcattatcacccatatgaggtttggatttattcttcataaagatgaagctgcactacaaaaaattgatcttgaaaccatgtcatacatcaagacaattaacttgaaggactataagtgcgttcctcagtcattggcatatacacacttgggaggctactacttcattggctgcaaacctgacagcaccggagcagtttccccacaggtcatggtggacggtgtaactgactcagtcattgggttcaatagtgatgtgacgggcactccatatgtctctccagatggccactaccttgtcagcattaatgatgtgaaaggtcttgtaagggttcagtacattaccatcagaggagaaatacaggaggcttttgatatttacacaaatctgcacatatctgatctggcatttcaaccatcctttactgaagcccaccaatataacatctacggtagttcaagcacacaaactgatgtgctctttgtggagctctcttctgggaaggtcaagatgataaagagtctcaaggaaccactcaaggcagaagaatggccttggaaccggaaaaacaggcaaatccaggacagtggcttgtttggtcaatacctgatgacaccttccaaggactctctcttcatcctagatggacgactcaataaattaaactgtgagatcactgaagttgaaaaaggaaatacagtcatttgggttggagatgcctaa

SEQ ID NO: 46294 - DNA, 2541 bp, Artificial Sequence
  derived and/or modified sequence
atgttcaagtgctggagcgtggtgctggtgctgggcttcatcttcctggagagcgagggcagacccaccaaggagggcggctacggcctgaagagctaccagcccctgatgagactgagacacaaggagaagaaccaggagagcagcagagtgaagggcttcatgatccaggacggccccttcggcagctgcgagaacaagtactgcggcctgggcagacactgcgtgaccagcagagagaccggccaggccgagtgcgcctgcatggacctgtgcaagagacactacaagcccgtgtgcggcagcgacggcgagttctacgagaaccactgcgaggtgcacagagccgcctgcctgaagaagcagaagatcaccatcgtgcacaacgaggactgcttcttcaagggcgacaagtgcaagaccaccgagtacagcaagatgaagaacatgctgctggacctgcagaaccagaagtacatcatgcaggagaacgagaaccccaacggcgacgacatcagcagaaagaagctgctggtggaccagatgttcaagtacttcgacgccgacagcaacggcctggtggacatcaacgagctgacccaggtgatcaagcaggaggagctgggcaaggacctgttcgactgcaccctgtacgtgctgctgaagtacgacgacttcaacgccgacaagcacctggccctggaggagttctacagagccttccaggtgatccagctgagcctgcccgaggaccagaagctgagcatcaccgccgccaccgtgggccagagcgccgtgctgagctgcgccatccagggcaccctgagaccccccatcatctggaagagaaacaacatcatcctgaacaacctggacctggaggacatcaacgacttcggcgacgacggcagcctgtacatcaccaaggtgaccaccacccacgtgggcaactacacctgctacgccgacggctacgagcaggtgtaccagacccacatcttccaggtgaacgtgccccccgtgatcagagtgtaccccgagagccaggccagagagcccggcgtgaccgccagcctgagatgccacgccgagggcatccccaagccccagctgggctggctgaagaacggcatcgacatcacccccaagctgagcaagcagctgaccctgcaggccaacggcagcgaggtgcacatcagcaacgtgagatacgaggacaccggcgcctacacctgcatcgccaagaacgaggccggcgtggacgaggacatcagcagcctgttcgtggaggacagcgccagaaagaccctggccaacatcctgtggagagaggagggcctgggcatcggcaacatgttctacgtgttctacgaggacggcatcaaggtgatccagcccatcgagtgcgagttccagagacacatcaagcccagcgagaagctgctgggcttccaggacgaggtgtgccccaaggccgagggcgacgaggtgcagagatgcgtgtgggccagcgccgtgaacgtgaaggacaagttcatctacgtggcccagcccaccctggacagagtgctgatcgtggacgtgcagagccagaaggtggtgcaggccgtgagcaccgaccccgtgcccgtgaagctgcactacgacaagagccacgaccaggtgtgggtgctgagctggggcaccctggagaagaccagccccaccctgcaggtgatcaccctggccagcggcaacgtgccccaccacaccatccacacccagcccgtgggcaagcagttcgacagagtggacgacttcttcatccccaccaccaccctgatcatcacccacatgagattcggcttcatcctgcacaaggacgaggccgccctgcagaagatcgacctggagaccatgagctacatcaagaccatcaacctgaaggactacaagtgcgtgccccagagcctggcctacacccacctgggcggctactacttcatcggctgcaagcccgacagcaccggcgccgtgagcccccaggtgatggtggacggcgtgaccgacagcgtgatcggcttcaacagcgacgtgaccggcaccccctacgtgagccccgacggccactacctggtgagcatcaacgacgtgaagggcctggtgagagtgcagtacatcaccatcagaggcgagatccaggaggccttcgacatctacaccaacctgcacatcagcgacctggccttccagcccagcttcaccgaggcccaccagtacaacatctacggcagcagcagcacccagaccgacgtgctgttcgtggagctgagcagcggcaaggtgaagatgatcaagagcctgaaggagcccctgaaggccgaggagtggccctggaacagaaagaacagacagatccaggacagcggcctgttcggccagtacctgatgacccccagcaaggacagcctgttcatcctggacggcagactgaacaagctgaactgcgagatcaccgaggtggagaagggcaacaccgtgatctgggtgggcgacgcctag

SEQ ID NO: 46295 - DNA, 2541 bp, Artificial Sequence
  derived and/or modified sequence
atgttcaagtgttggagtgtcgtgttggtcttggggttcattttcctggaaagtgagggtagacctactaaggagggcggatacggtctgaaatcttatcaacctctgatgagactacgccataaggagaaaaatcaggaatcttcccgtgtcaagggcttcatgattcaagacggtccattcggaagctgcgagaacaaatattgtggccttgggaggcattgcgtgacttcccgggagaccgggcaggccgagtgtgcttgtatggatctttgtaaacgccactacaagccagtctgcggttcagacggtgaattttacgagaaccactgcgaggtgcatagagctgcctgcctcaagaagcagaagattaccatcgtgcacaatgaggattgtttttttaaaggagacaaatgcaagacaacagaatattccaaaatgaaaaatatgctccttgaccttcagaaccagaaatatattatgcaggaaaacgaaaatccaaatggggatgatatcagtaggaagaagctgctagtggaccagatgtttaagtattttgacgcagatagcaacgggctagtggacattaacgagcttacacaggtgattaagcaggaagagctgggcaaggatctgttcgattgcacgttgtacgttctgctgaagtacgacgattttaatgctgacaaacaccttgccctggaggaattctatagagcatttcaggtgatccaattgtcattgcctgaggaccagaagttgtcaatcacggccgctacagttggccagtcagcagtgctttcctgtgccatccaggggacactccgcccccccataatttggaaacggaacaacatcatcttgaacaacctcgacttagaggatataaatgatttcggcgacgacgggtctctgtatattacaaaagtcaccacgactcatgtgggaaattacacttgttacgctgatggttacgagcaggtttatcaaacacatatcttccaggtgaacgtgccccccgtgatcagagtctatcccgaaagtcaggccagagagcctggcgtgactgccagcttgcgctgtcacgctgaagggattcctaaacctcagctgggctggctgaagaacggcatagatattacaccaaagctgtccaaacaactcaccctgcaggccaatgggtcggaggtccacatttcaaacgtgaggtacgaggatactggggcttacacatgcatcgcaaaaaacgaagccggcgtggatgaggacatctctagtctgttcgtggaggattccgctcggaagacactggcaaacatcctgtggagggaggaaggactgggcatcggtaatatgttttacgtgttttatgaagacggcatcaaagttattcagccaatcgagtgcgaattccaaaggcacatcaagcccagtgagaagctgttgggctttcaggacgaggtgtgtccaaaagctgagggagacgaggtccagaggtgcgtctgggcttctgccgtaaacgtgaaggacaagttcatttacgtagctcagcctaccctggatagagttctgatagtcgacgtgcaatcccaaaaggtcgtgcaggctgtatctactgacccggtcccagttaagctccactacgacaagtcccacgatcaagtgtgggtgctcagctggggcaccctggagaagacctcacctactctgcaggtgatcacactcgcctcaggaaacgtgccacaccacacgattcacacacaaccagtgggcaaacaattcgacagagtagatgatttttttattcccacaacaactctaattatcacccatatgcggttcggatttatattacataaggacgaagcggcacttcaaaagatagatttggagacaatgtcctatattaagacaatcaatctcaaagactataaatgcgtaccgcagtctctggcttacactcatcttggcgggtactacttcatcggctgcaaacctgattccacgggggccgtgagtccccaagtgatggtggatggagtgaccgattccgttatcgggtttaattcagacgttacaggcaccccatatgtcagccccgatgggcactacttagtgtcaattaatgacgtaaaggggctggtgcgtgttcaatacatcactattcggggcgagattcaggaggccttcgacatctacaccaacctgcatatatcggacttagctttccagccatccttcaccgaggcacaccagtataacatctacggctcaagctctactcagactgatgtgctgtttgtggaattgtccagcgggaaagtcaagatgatcaaatctctcaaagagcctctcaaagccgaggagtggccttggaacagaaaaaatcgtcagatccaggatagcggtctctttggacagtacctgatgaccccttctaaagacagcctgttcattctggatggcaggctgaacaagcttaactgtgaaattacggaggtcgagaaaggtaacaccgttatatgggtcggcgatgcttag

SEQ ID NO: 46296 - DNA, 2541 bp, Artificial Sequence
  derived and/or modified sequence
atgttcaagtgctggagcgtagtgctcgtgctgggcttcatttttctggagtctgaagggagaccgacgaaggaggggggctacggacttaagagctatcagcctctgatgaggctgcgccataaggaaaaaaatcaggagtcaagtcgggtgaaaggattcatgattcaagacggcccattcggttcgtgtgaaaacaagtattgtggtttgggtaggcattgtgtcacctcgagagagactggacaggcagaatgcgcctgcatggatttatgtaaacgtcactacaagcctgtgtgtggtagtgacggcgaattttatgaaaatcactgcgaggtacacagggccgcctgcctgaaaaaacagaagatcaccatagtccataatgaagactgtttttttaagggtgacaaatgcaaaactacagagtacagcaagatgaagaatatgctcctcgacctgcagaaccagaagtacatcatgcaggaaaatgagaatccaaatggcgatgatatctctcggaagaaactgcttgtggaccagatgttcaaatattttgacgctgactccaacggccttgtggacatcaacgagctcacccaagtcattaagcaggaagaattaggaaaagacctctttgactgtaccttgtacgtactgctgaaatatgacgactttaacgccgacaagcacctcgctcttgaggaattctatcgcgcttttcaagtgatacaactgtcactgcctgaagatcagaagctgtccataacagcagccacggttggacagtccgccgtgctctcctgcgcaattcaggggactctgagacctccaatcatatggaagcggaataacatcattctgaacaacctggatttggaggatatcaatgacttcggcgacgacggttcactctacattacaaaggtgacaaccacacacgttggaaattacacctgctatgcagatgggtacgaacaggtctaccaaacacacattttccaggttaatgttcccccggtcatccgagtgtatccagagtcgcaagcccgagaaccaggcgtgactgccagtctgaggtgtcacgccgagggcatcccaaagccccaacttggatggctgaagaacggtatcgatattactccgaagcttagcaagcagctgactctgcaggccaatgggagtgaggtacacatctcgaacgtccgttatgaggacacaggcgcctacacttgtatcgcaaaaaatgaagcaggtgtagacgaggatatttccagcttattcgtagaggattccgctaggaagacgctcgccaatatcctgtggcgggaggagggtctcggcattggtaacatgttctatgtattttacgaggacgggattaaggtgatccagccgatcgagtgtgagtttcaaaggcacattaagccatctgagaagctcttgggattccaggacgaggtgtgccccaaggccgaaggcgacgaagtgcagaggtgtgtgtgggccagtgcagttaacgtcaaagacaagttcatatacgtggcacagcccacactggatcgtgtgctgatagtggatgttcagtcacagaaagtggtccaggccgtgtctacagaccccgtgcccgttaaactgcattacgataaaagccatgaccaggtttgggtcctttcatggggtacgctggagaagacctccccaacactccaggtgatcacactggcctcagggaacgtacctcaccatactattcacacccaaccagtgggcaaacagttcgaccgagtcgacgatttctttattcctaccacaacactaataattacacatatgagatttggatttatattacataaagatgaggctgccctacagaagatagacctcgagaccatgagttacattaagacaatcaatctaaaagattataaatgtgtgccccagtcactggcgtacacccacctcgggggctactacttcataggctgtaagccagacagcaccggcgctgtcagtccccaggtgatggtagatggcgtgaccgacagcgtaatcggattcaatagcgacgtgactggcaccccatatgtgagcccggatggccactacctggtcagtattaatgatgtgaaagggctggttcgtgtgcagtatattactattaggggggaaatccaggaagcgttcgatatttataccaatcttcacatctctgacttggccttccagccatctttcactgaggctcatcagtataatatatatggatcctccagtactcagactgatgtcctgttcgttgagctgtcctctggtaaagtcaaaatgattaagtcattgaaagaaccccttaaagctgaagaatggccctggaaccgcaagaaccgccagattcaggactccggacttttcgggcagtatctgatgactccttcaaaggattctctgttcattctggacggaaggctgaataagctgaactgcgaaataacagaggtggaaaaaggcaatactgtcatttgggtaggcgacgcttag

SEQ ID NO: 46297 - DNA, 2541 bp, Artificial Sequence
  derived and/or modified sequence
atgttcaagtgctggagcgtggtgctggtgctgggcttcatcttcctggagagcgagggccggcccaccaaggagggcggctacggcctgaagagctaccagcccctgatgaggctgcggcacaaggagaagaaccaggagagcagccgggtgaagggcttcatgatccaggacggccccttcggcagctgtgagaacaagtactgcggcctgggccgccactgtgtgaccagccgggagaccggccaggctgaatgtgcctgcatggacctgtgcaagaggcactacaagcctgtgtgtggcagtgatggagagttctatgagaaccactgtgaggtgcaccgggccgcctgcctgaagaagcagaagatcaccatcgtgcacaatgaagactgcttcttcaagggggacaagtgcaagaccacagagtacagcaagatgaagaacatgctgctggacctgcagaaccagaagtacatcatgcaggagaatgaaaaccccaatggagatgacatcagcaggaagaagctgctggtggaccagatgttcaagtactttgatgctgacagcaatggcctggtggacatcaatgagctgacccaggtgatcaagcaggaggagctgggcaaggacctgtttgactgcaccctgtatgtgctgctgaagtatgatgacttcaatgctgacaagcacctggccctggaggagttctaccgggccttccaggtgatccagctgagcctgcctgaggaccagaagctgagcatcacagctgccaccgtgggccagagcgctgtgctgagctgtgccatccagggcaccctgcggccccccatcatctggaagaggaacaacatcatcctgaacaacctggacctggaggacatcaatgactttggagatgatggcagcctgtacatcaccaaggtgaccaccacccacgtgggcaactacacctgctacgcagatggctatgagcaggtgtaccagacccacatcttccaggtgaatgtgccccctgtgatccgggtgtacccagagagccaggcccgggagcccggggtgacagccagcctgcgctgccacgccgagggcatccccaagccccagctgggctggctgaagaatggcatcgacatcacccccaagctgagcaagcagctgaccctgcaggccaatggaagtgaggtgcacatcagcaatgtgcgctatgaagatactggagcctacacctgcatcgccaagaatgaggccggcgtggatgaggacatcagcagcctgtttgtggaggacagcgccaggaagaccctggccaacatcctgtggagggaggagggcctgggcatcggcaacatgttctacgtgttctatgaagatggcatcaaggtgatccagcccattgaatgtgagttccagaggcacatcaagcccagcgagaagctgctgggcttccaggatgaggtgtgccccaaggccgagggagatgaggtgcagagatgtgtgtgggccagcgctgtgaatgtgaaggacaagttcatctacgtggcccagcccaccctggacagagtgctgattgtggatgtgcagagccagaaggtggtgcaggccgtgtccacagatcctgtgcctgtgaagctgcactatgacaagagccatgaccaggtgtgggtgctgtcctggggcaccctggagaagaccagccccaccctgcaggtgatcaccctggccagcggaaatgtgccccaccacaccatccacacccagcctgtgggcaagcagtttgacagagtggatgacttcttcatccccaccaccaccctcatcatcacccacatgagatttggcttcatcctgcacaaggatgaagctgccctgcagaagattgacctggagaccatgagctacatcaagaccatcaacctgaaggactacaagtgtgtgccccagagcctggcctacacccacctgggcggctactacttcatcggctgcaagccagacagcactggagctgtgagcccccaggtgatggtggatggagtgacagacagcgtcatcggcttcaacagtgatgtgacaggcaccccctacgtgtccccagatggccactacctggtgtccatcaatgatgtgaagggcctggtgcgggtgcagtacatcaccatccggggggagatccaggaggcctttgacatctacaccaacctgcacatcagtgacctggccttccagcccagcttcacagaggcccaccagtacaacatctacggcagcagcagcacccagacagatgtgctgtttgtggagctgagcagcggcaaggtgaagatgatcaagagcctgaaggagcccctgaaggccgaggagtggccctggaacaggaagaaccggcagatccaggacagcggcctgtttggccagtacctgatgacccccagcaaggacagcctcttcatcctggatggccgcctgaacaagctgaactgtgagatcacagaggtggagaagggcaacacagtcatctgggtgggagatgcctag

SEQ ID NO: 46298 - DNA, 4757 bp, Artificial Sequence
  derived and/or modified sequence
gtactgtccactgtgctgtcggtgctgaacctgagacgcgagcggaccagttgctccagcacctgaaggcaacgccctcttgcaccctctgtgccctgtgggacccgcttcaccaacaggacccatatcaacttgacaaaggagtgtggtatcggacgtgggagagagtcctctgtttgccacctgggcgctcattcaggcgtgactttggagatttctatagttttagaccaaactatttttttttccccagctaagacgatcttttgagagttttttttttttattgtgatttatatttccacagcgtttaggaatctttctgggggacttttgtgactgttaaaataaggtgaaaagcaataaggatgtttaagtgctggtcagttgtcttggttctcggattcatttttctggagtcggaaggaaggccaaccaaagaaggaggatatggccttaaatcctatcagcctctaatgagattgcgacataaggaaaaaaatcaagaaagttcaagagtcaaaggatttatgattcaggatggcccttttggatcttgtgaaaataagtactgtggtttgggaagacactgtgttaccagcagagagacagggcaagcagaatgtgcctgtatggacctttgcaaacgtcactacaaacctgtgtgtggatctgacggagaattctatgaaaaccactgtgaagtgcacagagctgcttgcctgaaaaaacaaaagattaccattgttcacaatgaagactgcttctttaaaggagataagtgcaagactactgaatacagcaagatgaaaaatatgctattagatttacaaaatcaaaaatatattatgcaagaaaatgaaaatcctaatggcgacgacatatctcggaagaagctattggtggatcaaatgtttaaatattttgatgcagacagtaatggacttgtagatattaatgaactaactcaggtgataaaacaggaagaacttggcaaggatctctttgattgtactttgtatgttctattgaaatatgatgattttaatgctgacaagcacctggctcttgaagaattttatagagcattccaagtgatccagttgagtctgccagaagatcagaaactaagcatcactgcagcaactgtgggacaaagtgctgttctgagctgtgccattcaaggaaccctgagacctcccattatctggaaaaggaacaatattattctaaataatttagatttggaagacatcaatgactttggagatgatgggtccttgtatattactaaggttaccacaactcacgttggcaattacacctgctatgcagatggctatgaacaagtctatcagactcacatcttccaagtgaatgttcctccagtcatccgggtgtatccagagagtcaggctagagagcctggggtaactgccagtcttaggtgccatgcagagggcataccaaagcctcagcttggctggttgaagaatggaattgatattacaccaaagctttccaaacaactcacgcttcaagcaaatggcagtgaggttcacataagcaatgtgcgctatgaagatactggagcatacacttgtatcgcaaagaatgaagcaggagtggatgaagacatctcttctctttttgtggaagactctgctagaaagaccctagctaacatattatggagagaagaaggtctgggaattgggaacatgttctatgttttttatgaagatggaatcaaagtgatacaacccatagaatgtgaatttcagaggcacattaagcctagtgaaaagctccttggatttcaggatgaagtctgtcccaaagctgagggagatgaagttcagaggtgtgtgtgggcatcagctgttaatgtcaaagacaagttcatttatgttgcacagccaactttggacagagtccttattgttgatgtgcagtcccaaaaagttgttcaggcagtgagcacagaccctgtcccagttaaattacactatgacaaatcacatgatcaggtctgggtgctaagctggggtaccttggagaagacatcaccaacactacaggtaattaccctggccagtgggaatgtgcctcaccacacgatccacacccaaccagtgggaaagcaatttgacagagtggatgattttttcattcccaccacaacactcattatcacccatatgaggtttggatttattcttcataaagatgaagctgcactacaaaaaattgatcttgaaaccatgtcatacatcaagacaattaacttgaaggactataagtgcgttcctcagtcattggcatatacacacttgggaggctactacttcattggctgcaaacctgacagcaccggagcagtttccccacaggtcatggtggacggtgtaactgactcagtcattgggttcaatagtgatgtgacgggcactccatatgtctctccagatggccactaccttgtcagcattaatgatgtgaaaggtcttgtaagggttcagtacattaccatcagaggagaaatacaggaggcttttgatatttacacaaatctgcacatatctgatctggcatttcaaccatcctttactgaagcccaccaatataacatctacggtagttcaagcacacaaactgatgtgctctttgtggagctctcttctgggaaggtcaagatgataaagagtctcaaggaaccactcaaggcagaagaatggccttggaaccggaaaaacaggcaaatccaggacagtggcttgtttggtcaatacctgatgacaccttccaaggactctctcttcatcctagatggacgactcaataaattaaactgtgagatcactgaagttgaaaaaggaaatacagtcatttgggttggagatgcctaaaaaccctacgatacaattattgaatgaagcgttttacaatacattgcacttaatccattgtttaaatttacaacttaactttccaagtttatatcctagtcaaacaaaatttacttggttggtccaaataaaataaattgtttttgactaagtgactaagacatacacaattaattatattggttaattagaaatactcagcacaatatttaatgagaaatcacatcagtcacaagaatcaaatatgtaaattatgctttaaacaataaagtaggatttaaatcatttaaaaaactaaactgcagggaatttcagatgacataaagcattatttcattttgagggtagtttattttttttctctgtccttttggtatgattaaacaagaaataaaaggtgttgtggaaacttaaaattcttaattcaaaatattcggtcctgtccactgtttataatattttgtgccttgaagggaatgtcacaggaggaaaaggaagactaaagcctgcatactaaatgctctcataactataaatctcttgttgttaaaaaacatctcttgcaccaaatcctgtcttcagtcttttgtttaaccctcaatgaactaccaattgaaggcataagttggtcttaggttgtatacaggtgtcaaactccacttgacatttactgtataatctgcagcatgctatagaaagtggggaggaagggaggaaaaataattacagtcaaaatatttgcaatctatctactcattttgctttcaatcactagagtgcattatgtttttaatgcaagtttgtctgggatgtcaactgcctacagatgtttattactagcagaatagattatttattaatagattgtttcttttcatatagtccaatgtttcatcatcaggaactttcggttttaaaaaagaaacattacttttgtctgctaaagtaaaccatatatagggaaattaacacctaggaaaagaaaactggcaagagaattgatgaggtattagtggcttagaagaattagtaatataagttgggaataaaggggtagcccgacagtggtaagtaaaaatgtagtactccattgtttttgctatttaaatataatgtatcaaaaacctttattctaaaatttccacaaatgattccttttatccatcttcttgtaatcctaaaagcatcttctcactatgtgctgtagtttgaaacctaacgaatcctcctacttgagacactgtagaaaagtaaaaattgttgcttctgttttgttttaagaggaaatgagaaggccagcagaagtagattaaaactagagagctggtttattaaaataagcagataattatccaggcttaaagtaatagcttacatgttttgaaaatccttgtacttatttttgtttttattgttgcaaaaaaatgttaatgggctgttgaaatgacctccatttacttaaggtaatccaataaggtcttttttaaatatacaaattttactcaagtttaaattgtataaaactgcttagaaacctgaaattttatagtgtgtaatatcttatgtgtatatagcatcctgagctgtgtgatacagtagatttcttcttagcagaaacatgcgaggtagatttaataaacaacaaaaatcagcttatgtttctacttattgaatctgctttactttttagcaattttcttccttgtgaacatgaaccatataaagtgtctgtgacttaatgatttcatgtaagtctgtcgcatacatccttcttttgtagcttacaccatgtggatgctctgtctgtagacactgcttgataaaaggagaataaacctcttacatttt

SEQ ID NO: 46299 - DNA, 2541 bp, Artificial Sequence
  derived and/or modified sequence
atgttcaagtgctggagcgtggtgctggtgctgggcttcatcttcttggagtctgagggtaggcctacaaaagagggcggctacggtctaaaatcttaccagcccctcatgcggctcaggcacaaagagaagaaccaggaatccagcagagtaaaaggttttatgatccaagatgggccgttcggctcttgcgagaacaaatattgtggccttgggcgccactgcgtgacaagtagggagacggggcaagcagagtgcgcctgcatggacctctgcaagcgccattataagcccgtctgtggctccgacggcgagttttacgaaaaccactgcgaggtgcatagggccgcttgccttaagaagcagaaaattacaattgtccacaatgaagactgtttttttaagggagataagtgcaagaccaccgagtattccaaaatgaagaatatgcttctggacctccagaaccaaaagtacatcatgcaagaaaacgagaatccaaacggtgatgacatcagccggaagaaactgctggtcgatcagatgtttaaatacttcgacgcggacagcaacggtctggtggacataaacgagctcacccaggtcataaagcaggaagagctggggaaggatctctttgactgtactttgtatgtgctgcttaagtatgatgattttaacgccgataagcatctggccctcgaggagttttatagagctttccaagtcattcagcttagcctccctgaggatcagaaacttagcattacagctgccaccgtgggacagtctgccgtgctgtcctgcgctatccaaggaacactccgacctcctattatttggaagaggaacaatatcatcctgaataatctcgatctcgaagacattaatgattttggcgacgatggctccctctacatcactaaggttacaacgactcatgtaggcaactatacatgctacgctgacggctacgaacaggtgtatcagacgcatatattccaggttaacgtccctccagtaatacgggtgtaccctgaatcgcaggctagggaacctggggtcaccgctagcttaagatgccacgccgaggggatacccaagccccagcttggatggctaaagaatggaatcgacatcacgccaaagctgtcaaagcagctcactctccaggctaatggtagtgaggtacatatctctaacgtgcgatatgaggatactggcgcttacacctgcatcgcaaagaatgaggcaggagtggatgaggacatcagttcactttttgtcgaggattcagcccgcaaaaccttagcgaatattctctggcgggaagagggactcgggatagggaatatgttctacgttttctacgaagatggcattaaggtcatccagccgatcgagtgtgaattccagaggcatataaagccatctgaaaagttgctcggattccaggatgaagtgtgccccaaggcggaaggtgacgaggtgcagcggtgtgtgtgggctagcgccgtgaacgtgaaggataagtttatttacgtggcccagcccacactggaccgtgtgctcatcgtcgatgttcagtctcagaaagtcgtacaggcagtaagcactgatccagtgccagtgaagttacactacgacaagagccatgaccaggtatgggtcttgtcctggggaacgctggagaaaacctcaccaacactccaagtcattactcttgcaagcggaaatgtaccgcatcataccattcacacgcagcccgtgggtaagcagttcgacagggtcgatgattttttcattcctacaacaaccctcattataacccacatgagattcggattcatcctgcacaaggatgaagctgctctgcagaagatcgatctggaaactatgagttacatcaagaccatcaatcttaaagattacaagtgcgtgccccaatccttggcctatactcacctcgggggctattatttcattggctgcaagcctgactctaccggtgccgtgtcacctcaggtcatggtcgacggggtgacagacagcgtcatcggattcaatagcgatgttaccggcaccccgtatgtgtctcctgacggtcactacctggtgtcgataaatgacgtcaagggcctggtgcgggttcagtacattactatccgcggcgagatacaggaagcttttgatatatatactaatctgcacatctccgacttagcgtttcagccaagcttcacggaagcccaccagtacaatatttacggaagctcatctacacagacggatgtactgtttgtggagctcagttctgggaaggttaagatgattaagtctctaaaggagccactgaaggcagaggaatggccctggaaccgcaagaacagacagattcaggattccgggttgtttggccagtatctcatgaccccatctaaggactctctcttcattttagatgggcgccttaataagctcaactgcgagatcacggaggtcgagaagggaaacacagtgatctgggttggggatgcttag

SEQ ID NO: 46300 - DNA, 2541 bp, Artificial Sequence
  derived and/or modified sequence
atgttcaagtgctggagcgtggtgctggtgctgggcttcatcttcttagaatctgaaggccgcccaactaaggaaggaggatacggcttaaagagctaccagccgctgatgaggctccgtcacaaggagaagaaccaggaatccagcagagttaaagggtttatgatacaggacggcccatttggaagctgcgaaaacaagtactgcgggctgggaagacactgcgttacctctcgcgagactgggcaagccgagtgtgcttgcatggatttatgtaagaggcattataagcctgtgtgtggcagcgacggtgagttttatgagaatcactgcgaagtccatcgcgcagcatgcttgaagaagcaaaagatcaccatcgttcataacgaagactgcttcttcaagggagacaaatgtaagaccaccgaatattcaaaaatgaagaatatgcttttggatctgcagaaccagaagtatataatgcaggaaaacgaaaacccgaatggcgacgacatttcaagaaaaaagttgctggtcgatcagatgttcaaatactttgacgcggattctaacggactagtagatatcaatgagctgacccaggtcattaaacaggaagaattgggcaaagacctgtttgattgcacactctacgtgctgttgaagtatgacgactttaatgccgataagcatttggctctggaggaattctacagagccttccaggtgatccaactatctcttcccgaagatcagaaactgtccattaccgctgccacggttggccaatcggctgtgttgtcctgcgcaatccagggaacattacgtcccccaatcatttggaaacgtaacaatatcattctcaataatctggatctcgaggacattaacgatttcggcgacgatggcagcctctacattaccaaggtcaccactacccatgtagggaattacacttgttacgccgatggatacgagcaggtgtaccagacacatattttccaggtgaacgtgccccccgtgattagggtgtaccccgaaagtcaggctagagagccaggggtgaccgcctcattacgttgtcacgcagaggggatcccgaagccacaattgggctggctgaaaaacggcatcgatatcaccccaaagttaagtaagcagttgacgctgcaggccaacggttctgaggtgcacatatctaacgtccgctatgaggatactggagcatatacctgcatagctaagaatgaggccggcgtggatgaagacatctcatcactttttgtggaggactcggccaggaagacactggcaaatattctgtggagagaggagggtctggggatcgggaatatgttttatgtgttttatgaagatgggattaaagtcatccagcctatcgaatgtgaattccagcggcatattaaaccctctgaaaaactgttaggttttcaggatgaggtctgtcctaaggctgaaggtgacgaggtccagcgatgtgtgtgggcatctgccgtcaacgtgaaagacaagttcatatatgtcgcacagccaacattggatcgcgtgctgatcgtggatgtgcagagtcaaaaggtcgttcaggcagtgagcaccgatcccgtgccagttaaacttcattacgataagtcccacgaccaagtgtgggtattgtcttggggcaccctagagaagacctctcctactctccaggttataaccttggccagcggcaatgttccccaccataccattcacacccagcccgtaggcaaacaatttgacagggttgacgacttcttcatcccaacaacgactctgataattacccatatgaggttcggcttcattctgcacaaagatgaggctgcacttcagaagatcgacttggagacaatgtcctacattaagacaattaatctgaaagactacaaatgcgttccacaaagcctggcttatactcacttaggaggatattacttcatcggctgtaaaccagactctaccggcgccgtgtccccacaggtaatggtggatggcgtgaccgatagtgttatcgggttcaactcggatgtgaccgggaccccgtatgtttcccctgacggccactacctggtgagcattaacgatgtgaaggggctggtgagagtacagtatataacaatacgaggagaaattcaggaagccttcgatatctataccaacctgcacatcagcgacttggcatttcagcctagctttaccgaggcacaccagtacaatatatatggatcatcctccacacagactgatgtgctatttgtcgagctgtcatctggcaaggtgaagatgatcaagagtttgaaagagccactgaaggccgaggagtggccatggaataggaaaaaccggcagatccaggactctggcctgttcggacaatacttaatgacaccctctaaagattcactgtttatcctagatgggagactcaataaactgaattgcgaaattaccgaggtggaaaagggtaacaccgttatctgggtcggggacgcctag

SEQ ID NO: 46301 - RNA, 2541 nt, Artificial Sequence
  derived and/or modified sequence
auguucaagugcugguccgugguccuggugcuuggauucauuuuuuuggaauccgaagggagacccacgaaggagggcggauacggacugaaauccuaucagccacuuaugcgccuacggcacaaggagaaaaaccaggagucaucacgcgugaaaggguucaugauccaggaugggccuuuugggucaugugagaacaaguauugcggucugggaagacauugcgugaccuccagagaaaccggccaggcagaaugugcauguauggacuuauguaagcggcacuauaaaccaguuuguggaucagauggcgaguucuacgagaaccacugcgagguucaucgugccgcgugccuuaaaaagcaaaaaaucaccaucgugcacaacgaggacuguuucuucaagggcgacaaguguaagacaacagaauauaguaagaugaagaauauguuguuagaccuucaaaaccaaaaguauauuaugcaagaaaacgaaaaucccaacggcgacgauauuaguaggaagaagcuuuuggucgaucagauguuuaaguacuuugacgcagacaguaauggguugguggacaucaaugagcugacacaggugaucaagcaggaggagcuggguaaagaccuuuuugauugcacucuguaugugcuccuuaaauaugaugauuuuaaugccgacaagcaucuagcucucgaggaauuuuaccgggcuuuucagguuauacagcuuucucugccagaagaucagaaacugucaauuacugcagcuacugucggacagagcgcuguucugucuugcgcuauacaaggaacucuaagaccuccuaucaucuggaaacguaauaauauaauuuugaauaaucucgaccuugaagauauuaacgacuuuggagacgauggcagucucuacauuaccaaagugaccacgacacacguugguaacuauacuugcuaugcugacggcuaugagcagguauaucagacucacauuuuccaggugaacguaccucccgugauccgcgucuacccagaaagucaggcccgcgagccgggugucacagccagcuuacgcugccaugcugagggaauuccaaaaccacagcugggcugguugaagaauggcaucgacaucacaccuaagcucagcaaacagcucacuuugcaagccaacgggagcgaggugcauaucucuaaugucagauaugaggauaccggagccuacaccugcaucgcuaaaaaugaagcuggcguugacgaggacaucucuucauuauucgucgaggauuccgcgagaaagacacuggcgaacauucuuuggcgcgaggagggccucggcaucggaaauauguuuuaugucuuuuaugaggauggcaucaaagugauucagccuauugagugcgaguuucagagacauauuaaaccuucugaaaaacugcuugguuuucaggacgaagucugcccuaaagcggagggcgacgaggugcagagaugcgugugggccucugccgucaacguuaaagauaaguucauuuacguggcccagccaacacuggaccgugugcugaucguggacgugcagagccagaaggucgugcaggccgugagcaccgacccgguccccgugaagcuucauuacgauaaaucacacgaccaagucuggguucugucuugggggacauuagagaaaacuucacccacccuccaggucaucacccuggccucugggaacgugccacaccauacgauucauacacagccuguggggaagcaguuugaucggguggacgauuucuuuauaccaaccacuacccucauuauuacucacaugagauuuggguucauacugcauaaggaugaggccgcucugcagaagaucgaucuggaaaccaugucauacauuaagaccauuaaccuuaaagauuacaagugcguuccccagucacuggcguauacucaucuaggggguuacuauuucaucgguugcaagccagacucaacaggggcaguaucaccucaaguaauggucgaugggguuacagauucagugauugguuuuaauagcgacgugaccgggacgccauauguaucuccugacggacacuaccugguaagcaucaaugaugucaaagggcuugucagagugcaauauauuacuauaagaggcgagauacaggaagcauucgauauuuacacgaacuuacacauuucggaccucgcauuucagccaaguuucacugaagcucaccaauauaauaucuaugggucaagcaguacacagacagauguguuauucgucgagcucuccucuggcaaggugaaaaugaucaagucccugaaggagccucucaaagcugaggaauggccauggaacagaaagaaccgucaaauccaggauucaggcuuauucgggcaguacuugaugacaccuucaaaggacucucucuucauuuuggacgggcggcugaacaaacugaacugugagauaacagaaguggagaaaggaaauacgguaaucuggguuggagaugcauag

SEQ ID NO: 46302 - RNA, 2541 nt, Artificial Sequence
  derived and/or modified sequence
auguucaaaugcugguccgugguguugguacucgguuuuauuuuucucgaguccgagggcaggcccacaaaggaaggaggguaugggcucaaaaguuaccaaccccuuaugcggcugcgacauaaggagaaaaaccaagagaguagcagggugaaaggguuuaugauccaggaugggccuuucggcucuugcgaaaacaaauacuguggacucggaaggcauugugugacuagcagggagacaggucaggccgagugcgcaugcauggaccucuguaagcggcauuacaaaccaguguguggaagcgacggagaguuuuaugagaaccacugugaaguacacagggccgcuugucucaagaagcagaagaucacuaucgugcauaacgaggacugcuucuucaaaggugauaagugcaagaccacagaguacagcaagaugaaaaauaugcugcuggauuuacagaaccaaaaguauaucaugcaagagaaugaaaauccaaauggcgaugauauuagcagaaagaagcucuugguggaccagauguuuaaguauuucgacgccgacucgaauggccuuguggacauuaacgagcuuacacagguuauuaaacaggaagaacuggggaaagaucuguucgacugcacccuguacguacuucuuaaauacgaugauuucaacgcggacaaacaucucgcccuggaagaauuuuacagagccuuucaggugauccagcugagucugcccgaagaccagaaacugaguauaacagccgcgaccgugggccaguccgccgugcugucuugcgcgauccaggguacucugagacccccuauaaucuggaaaagaaauaacauuauucugaacaacuuagaucucgaggacaucaaugacuuuggggaugauggcucucuguauauaacaaaaguuacgacgacacacgugggaaauuacacaugcuaugccgauggcuacgaacagguguaucaaacacacauauuucagguuaacgucccgccagugauucgaguuuacccugagagucaggcccgggagccuggugucacugccucccuccgaugucacgcggaaggcaucccaaaaccucaguuaggaugguugaaaaaugggaucgauauaacuccgaagcugagcaaacagcuaacccuacaggccaauggaucggaagugcacauaaguaaugugagguacgaagauacaggcgcuuacacuuguaucgcuaaaaaugaggcagggguggaugaagauaucucuagccucuucguggaggacagcgcuagaaagacauuggcuaacaucuuauggagggaggagggacuuggcauugggaauauguuuuaugucuucuaugaggacggaaucaaagucauccagccaaucgaaugugaauuucagagacacaucaaacccagcgagaaacuccucgguuuucaggacgaagugugcccuaaagcggagggugacgaagugcagagguguguuugggccagcgcugugaaugucaaagacaaguuuaucuacguagcucaaccuacauuggaccguguacugaucguggaugugcagucucaaaaaguaguccaggccguguccacagacccggugcccgugaaauugcacuacgauaaaucucaugaccagguguggguccugucaugggggacuuuggaaaagaccaguccuacgcuccaggucaucacacucgccagcggaaauguaccucaucacaccauccauacacagccaguugguaaacaguucgaucgcguggacgauuuuuucauccccacaaccacuuuaaucaucacacauaugagguucggauucauccugcacaaggacgaagcugcgcuacaaaagauugaccuggaaacuauguccuacauuaaaacuauaaacuuaaaggacuauaagugcgugccacaaucacuggcauauacccaccuggggggcuacuauuuuauaggaugcaagccagauaguaccggcgcuguaucaccccagguuauggucgauggcgucaccgauucuguaauuggguuuaacuccgaugugacaggcacccccuacgucagcccugauggccacuaccucgugagcaucaaugacguuaaaggccuggugcgcgugcaguauauuacaauucgcggcgagauucaggaagcguucgauauuuacacaaaucuccauaucuccgaccuggcuuuccagccuuccuuuacugaggcacaccaguacaauauuuacggguccuccagcacccaaaccgacguccuauucguugaauugagcuccgguaaggugaagaugaucaaaucgcugaaggaaccgcuuaaagccgaagaguggccauggaaucguaagaauagacagauucaggacagcggguuauuuggucaguaccuuaugacgccuagcaaagacagucuuuucauucuagauggccgccuuaacaagcugaauugugaaaucacagaagucgaaaagggcaacaccgugauauggguuggggaugcuuag

SEQ ID NO: 46303 - RNA, 2541 nt, Artificial Sequence
  derived and/or modified sequence
auguuuaaguguuggucuguuguacugguuuugggcuuuaucuuucuggaaagcgagggcaggccuacaaaggagggcgguuacggacuaaagagcuaccaaccccugaugcgacuuaggcauaaagagaagaaccaggagucgagucggguaaaaggcuucaugauucaagauggucccuuuggcuccugugaaaauaaauauugugggcucgguaggcacugcgucacaagccgcgagacugggcaagccgaaugugcauguauggaucuguguaaaaggcauuauaagccugucugcggcagcgacggcgaguuuuaugagaaucauugcgagguucaccgcgccgccugccucaagaaacagaaaauuacaaucguucauaaugaagacugcuuuuuuaaaggagauaaauguaagaccacugaauacucuaaaaugaagaacaugcuuuuagauuugcagaaccagaaauauaucaugcaggagaacgagaaccccaauggagaugauauuucacggaagaaguugcugguggaccagauguuuaaauacuucgaugcagauuccaauggccucgucgacaucaacgaacugacgcaggugaucaagcaggaggagcuggguaaagaccuuuuugauugcacucuguaugugcuccuuaaauaugaugauuuuaaugccgacaagcaucuagcucucgaggaauuuuaccgggcuuuucagguuauacagcuuucucugccagaagaucagaaacugucaauuacugcagcuacugucggacagagcgcuguucugucuugcgcuauacaaggaacucuaagaccuccuaucaucuggaaacguaauaauauaauuuugaauaaucucgaccuugaagauauuaacgacuuuggagaugacggaucccuauacauuacuaaggucacaacaacacauguugguaauuauaccugcuaugcagauggguaugagcagguuuaucagacucacauuuuucaagucaaugucccuccagugauccgcguguauccagaaucacaggccagagaaccaggagucaccgccucucuaagaugucacgccgaggguauaccaaaaccccaguuaggguggcuaaagaaugguauagacauuacaccaaaacuaaguaaacagcucacccugcaagcuaacggaucugaggugcacauuucgaacgugcgguacgaagauaccggggccuauacauguauugcgaagaacgaagcagguguugacgaagauaucaguagccuguucguggaggauuccgcccggaagacacuggccaacauuuuauggagagaggaaggacuagggauagggaauauguuuuacguuuuuuacgaagacggcauuaaggugauccagccuaucgaaugcgaauuucagcgacacaucaaacccucagagaaacugcugggguuucaggacgagguuugucccaaggcugaaggagaugaagugcagagaugcgucugggcgagcgccguuaaugucaaggacaaauucauuuauguggcccaacccacucuggaccgcguacugaucguugauguccagucucaaaaagugguucaagcagugucuacagaccccgugccagugaaauugcauuacgauaagucacaugaucagguuuggguucugucuuggggcacccuggaaaaaacaucaccaacucugcagguaauuacacucgccuccggaaacguuccccaccauaccauccacacccagccuguggguaaacaauucgaccggguugaugacuuuuuuaucccuacaacuacccugauaaucacccacaugcgguucggguucauacuccacaaagacgaagcagcucuacaaaaaauagaucuagagaccauguccuauaucaagacgaucaaccugaaggauuacaaauguguuccccaauccuuagccuauacacaucuaggaggcuacuacuucaucgguuguaaaccugacucuaccggugcgguguccccacaggucauggucgacggagucacggauucaguuauuggcuucaacagcgaugucaccgguaccccuuacguuagcccagacgggcacuacuuaguaucaaucaacgaugucaaagguuuggugagaguccaguacaucacuaucaggggcgagauccaagaggcauucgacaucuauaccaaccuacacaucucugaccuggcuuuccaacccucauucacagaggcucaucaauacaacauauauggcuccucuagcacucagacugaugucuuguuuguugaacucucaagcgguaagguuaaaaugaucaaaucucugaaggaaccccugaaagcggaggaauggccauggaaccgcaaaaaucgccaaauucaagauuccggacucuuugggcaguaucucaugacaccuagcaaagacagucucuucauuuuggauggacggcucaauaagcugaacugcgagauuacagaaguagagaaggggaacacaguuauuuggguuggugaugcuuag

SEQ ID NO: 46304 - RNA, 2541 nt, Artificial Sequence
  derived and/or modified sequence
auguucaaguguuggaguguaguucucgugcuugguuucauauuucuggaaagcgaggggcggcccacaaaagaaggcggcuauggccuuaagucauaccagccuuugaugcgacugaggcacaaagagaagaaccaggaaaguaguagagugaagggguucaugauacaggauggcccguuuggaagcugcgaaaauaaauauugcggacucggccgacauugcgugacaucacgggaaacaggacaagcagagugcgccugcauggaucugugcaaaaggcauuauaagcccgugugcggcagcgauggcgaguuuuaugaaaaucauugugagguucacagagcagcuugucuaaagaaacagaagauaaccaucguucauaaugaagacugcuuuuucaagggggauaagugcaagacuacagaguauucaaaaaugaaaaauauguuacuggaucuucaaaaucaaaaauacauuaugcaggaaaaugaaaaccccaacggcgacgauaucagccgcaaaaaacugcugguggaucagauguucaaguauuuugacgcagauaguaauggccucguugauauuaacgaacucacacaggucauuaagcaggaggaacugggcaaagacuuauuugauugcacucuguacguucuccuuaaguacgaugauuuuaacgccgauaagcaccuagcccuggaagaguuuuaucgggccuuucagguuauacagcuaucacuuccugaggaucagaaauugaguauuacagccgccacaguaggacagucugccguuuuaaguugcgccauucaagguacccuacgaccaccaaucaucuggaagcgaaacaacauuauccuuaacaaccuggaucucgaggauauaaaugacuucggagacgaugggagccucuacauuaccaaaguuacgacaacgcacguugguaauuacaccuguuaugcugacggauaugagcaaguguaucagacccauauuuuccaagucaaugugccacccgugauccgcguuuacccagagucccaggccagggagcccggagugacugccucccuccgcugccacgcagagggaaucccgaaaccucagcucggauggcuaaagaauggcaucgacauaacacccaaacucuccaaacaguugacucuucaggccaauggaagcgaaguccauaucaguaaugugcgguaugaagacacgggugcuuacaccuguauugcuaagaaugaggcaggcguggaugaggauauuucuagucuguuuguggaagacucugcucggaagacauuggcuaauauuuuguggagagaggaggguuuaggcauugguaacauguuuuauguauuuuacgaggacggcauuaaaguuauccaacccauugagugcgaguuucagcgccauaucaagccaagugagaagcugcugggauuccaggacgaggugugcccaaaggccgaaggagaugaagugcagcguugcguuugggccucagcagugaacgucaaagauaaauuuauauauguugcgcagccuaccuuagaucggguacuaaucguugacgugcaaucgcagaagguaguccaggccgucagcacagaccccgugccagugaaauugcauuaugacaagagccaugaucagguauggguccuguccuggggcaccuuagagaaaaccuccccaacacuccaggucauuacucucgcuuccgggaacgugccccaucauaccauucauacccaacccguuggaaaacaguucgacagaguagaugauuucuuuauccccaccacaacucugauuauuacccauaugagauucgguuuuauucuucacaaggacgaggcugcucugcagaaaaucgauuuagagaccaugucuuacaucaagacgauuaaccuuaaagacuacaaaugcgugccccagagccuagcuuauacacaccuuggcggcuauuauuucaucgggugcaagccagauagcacaggugccgucagcccacaggucaugguggacggaguaacugauagcgugaucggcuucaacagcgaugucacgggaaccccauauguguccccagauggacauuacuugguaagcaucaaugacguuaaaggacucguaagggugcaguauaucacaaucagaggagagauucaggaggccuuugacaucuauacuaauuuacauauuuccgaccuggcuuuccaacccucauuuaccgaggcacaucaauauaauauuuaugguucaucaaguacacagaccgacguccuguuugucgagcuguccagcggcaagguuaagaugauaaagucuuugaaggaaccccugaaggcggaagaauggccauggaaucgcaagaaucggcagauccaagacucuggacuguucgggcaauaucuaaugaccccuucaaaagauucuuuauucauacuggauggaagacuuaauaaacuuaauugcgagauaacugaagucgagaaagggaauacugugaucugggugggggacgcguag

SEQ ID NO: 46305 - protein, 837 aa, Artificial Sequence
  derived and/or modified sequence
MFKCWSVVLVLGFIFLESEGRPTKEGGYGLKSYQPLMRLRHKEKNQESSRVKGFMIQDGPFGSCENKYCGLGRHCVTSRETGQAECACMDLCKRHYKPVCGSDGEFYENHCEVHRAACLKKQKITIVHNEDCFFKGDKCKTTEYSKMKNMLLDLQNQKYIMQENENPNGDDISRKKLLVDQMFKYFDADSNGLVDINELTQVIKQEELGKDLFDCTLYVLLKYDDFNADKHLALEEFYRAFQVIQLSLPEDQKLSITAATVGQSAVLSCAIQGTLRPPIIWKRNNIILNNLDLEDINDFGDDGSLYITKVTTTHVGNYTCYADGYEQVYQTHIFQVNVPPVIRVYPESQAREPGVTASLRCHAEGIPKPQLGWLKNGIDITPKLSKQLTLQANGSEVHISNVRYEDTGAYTCIAKNEAGVDEDISSLFVEDSARKTRLGIGNMFYVFYEDGIKVIQPIECEFQRHIKPSEKLLGFQDEVCPKAEGDEVQRCVWASAVNVKDKFIYVAQPTLDRVLIVDVQSQKVVQAVSTDPVPVKLHYDKSHDQVWVLSWGTLEKTSPTLQVITLASGNVPHHTIHTQPVGKQFDRVDDFFIPTTTLIITHMRFGFILHKDEAALQKIDLETMSYIKTINLKDYKCVPQSLAYTHLGGYYFIGCKPDSTGAVSPQVMVDGVTDSVIGFNSDVTGTPYVSPDGHYLVSINDVKGLVRVQYITIRGEIQEAFDIYTNLHISDLAFQPSFTEAHQYNIYGSSSTQTDVLFVELSSGKVKMIKSLKEPLKAEEWPWNRKNRQIQDSGLFGQYLMTPSKDSLFILDGRLNKLNCEITEVEKGNTVIWVGDA

SEQ ID NO: 46306 - DNA, 2514 bp, Artificial Sequence
  derived and/or modified sequence
atgttcaaatgctggtctgtggtcctcgtgctcggattcatttttctggagtccgaggggagaccaacaaaagaggggggttacggattgaagagttaccaacccctgatgaggctccgacacaaggaaaagaaccaggaaagctcccgcgtcaagggattcatgattcaggatggaccttttgggtcgtgtgagaacaaatactgtggccttgggaggcattgtgtcacaagtagggaaactggccaggccgaatgtgcctgcatggacttatgcaagcgccactacaagccagtatgtgggagcgatggagagttttacgagaaccactgcgaagttcacagagcagcctgtctcaaaaaacagaaaatcacgatagtgcataatgaggattgtttcttcaaaggcgataagtgcaagactacagagtactccaagatgaagaacatgctgctggaccttcagaaccagaagtatataatgcaggagaatgagaatcccaacggggacgacatcagtcggaaaaagctccttgttgatcagatgttcaagtattttgacgcagatagcaacggactcgtagacatcaacgagctgactcaagtcatcaagcaggaggagttagggaaagatttgttcgactgcacactttacgtgctattaaaatacgatgactttaacgccgacaaacacctggctctggaggagttctaccgggcttttcaggtgatccagctgtcccttccagaagaccaaaaactgtccatcaccgcagcaaccgtggggcagagtgctgtactgtcttgtgcgatccagggcacacttaggccgcctattatctggaagaggaataacatcatactcaacaatttggacctggaggacattaacgactttggagatgacggaagcctgtatattaccaaggtaactacaacccatgttggtaactatacttgctatgccgacgggtatgagcaggtttatcaaacacatatattccaggtcaatgtgcccccagtgattagggtgtatcccgagtcccaggccagggagccgggagtcaccgcttctttacgctgccacgccgagggaataccaaaaccacaactgggatggctgaaaaacggcatcgacatcaccccaaagcttagcaaacaattaacactccaggcaaatggcagcgaggttcatattagcaacgtgaggtatgaagatacaggcgcatatacatgtattgcgaagaacgaagccggtgtggacgaagacatcagctcactcttcgtggaggacagcgcgcgaaagactcgtctcggaatcgggaatatgttttatgtgttttatgaggacggcataaaggtaatccaaccaatcgagtgcgagttccagagacatattaaaccaagtgaaaagctcctggggtttcaagacgaggtgtgtccgaaagccgaaggcgatgaggttcaaagatgcgtgtgggcatctgccgtcaatgtgaaagataaattcatctatgtcgcccagccaacactggatcgcgtgctaatcgtcgacgtgcaaagccagaaagtggtgcaggctgtcagtacggaccctgttcccgtgaaactccattatgataaatcccatgatcaggtgtgggtcctcagctgggggaccttggagaagaccagcccaaccttgcaggtcatcactttggctagtggtaatgtgcctcaccacacgatccacacccagcccgtaggcaagcagtttgatcgggtggatgacttcttcattccaacaaccacactgatcattactcatatgcgctttgggtttattctgcataaggatgaagccgcattgcagaagatcgatctggagaccatgagttacatcaaaaccattaaccttaaggactacaagtgcgtccctcagagtctggcttacacgcacttggggggttactacttcatcggttgcaagccagactcaactggagcagtatcgccccaggtgatggtggatggagtaaccgactctgtgattgggtttaattccgacgtgactggaacaccctatgtgagtcccgacggtcactatctggtcagtataaatgatgtcaagggcctagtaagagttcaatatattaccataagaggagagatccaagaagctttcgacatttacactaacctccacatctctgacctcgctttccagccaagtttcaccgaagcacatcaatataacatatatggttcgtcaagcacccagacagacgtgctgttcgtagagctgtccagcggaaaggtcaagatgattaagtccctaaaggagccactcaaagctgaagagtggccctggaatcgtaaaaaccggcagattcaggactccggactgttcggccaatatttgatgacaccctctaaggatagcctcttcatactcgacggtaggctcaataagctaaactgtgaaattacagaggtggagaagggcaatactgtgatctgggtaggggacgcctag

SEQ ID NO: 46307 - DNA, 2920 bp, Artificial Sequence
  derived and/or modified sequence
gttcagtgactgagacaaactggaggtgaaaggagctggtactgtccactgtgctgtcggtgctgaacctgagacgcgagcggaccagttgctccagcacctgaaggcaacgccctcttgcaccctctgtgccctgtgggacccgcttcaccaacaggacccatatcaacttgacaaaggagtgtggtatcggacgtgggagagagtcctctgtttgccacctgggcgctcattcaggcgtgactttggagatttctatagttttagaccaaactatttttttttccccagctaagacgatcttttgagagttttttttttttattgtgatttatatttccacagcgtttaggaatctttctgggggacttttgtgactgttaaaataaggtgaaaagcaataaggatgtttaagtgctggtcagttgtcttggttctcggattcatttttctggagtcggaaggaaggccaaccaaagaaggaggatatggccttaaatcctatcagcctctaatgagattgcgacataaggaaaaaaatcaagaaagttcaagagtcaaaggatttatgattcaggatggcccttttggatcttgtgaaaataagtactgtggtttgggaagacactgtgttaccagcagagagacagggcaagcagaatgtgcctgtatggacctttgcaaacgtcactacaaacctgtgtgtggatctgacggagaattctatgaaaaccactgtgaagtgcacagagctgcttgcctgaaaaaacaaaagattaccattgttcacaatgaagactgcttctttaaaggagataagtgcaagactactgaatacagcaagatgaaaaatatgctattagatttacaaaatcaaaaatatattatgcaagaaaatgaaaatcctaatggcgacgacatatctcggaagaagctattggtggatcaaatgtttaaatattttgatgcagacagtaatggacttgtagatattaatgaactaactcaggtgataaaacaggaagaacttggcaaggatctctttgattgtactttgtatgttctattgaaatatgatgattttaatgctgacaagcacctggctcttgaagaattttatagagcattccaagtgatccagttgagtctgccagaagatcagaaactaagcatcactgcagcaactgtgggacaaagtgctgttctgagctgtgccattcaaggaaccctgagacctcccattatctggaaaaggaacaatattattctaaataatttagatttggaagacatcaatgactttggagatgatgggtccttgtatattactaaggttaccacaactcacgttggcaattacacctgctatgcagatggctatgaacaagtctatcagactcacatcttccaagtgaatgttcctccagtcatccgggtgtatccagagagtcaggctagagagcctggggtaactgccagtcttaggtgccatgcagagggcataccaaagcctcagcttggctggttgaagaatggaattgatattacaccaaagctttccaaacaactcacgcttcaagcaaatggcagtgaggttcacataagcaatgtgcgctatgaagatactggagcatacacttgtatcgcaaagaatgaagcaggagtggatgaagacatctcttctctttttgtggaagactctgctagaaagacccgtctgggaattgggaacatgttctatgttttttatgaagatggaatcaaagtgatacaacccatagaatgtgaatttcagaggcacattaagcctagtgaaaagctccttggatttcaggatgaagtctgtcccaaagctgagggagatgaagttcagaggtgtgtgtgggcatcagctgttaatgtcaaagacaagttcatttatgttgcacagccaactttggacagagtccttattgttgatgtgcagtcccaaaaagttgttcaggcagtgagcacagaccctgtcccagttaaattacactatgacaaatcacatgatcaggtctgggtgctaagctggggtaccttggagaagacatcaccaacactacaggtaattaccctggccagtgggaatgtgcctcaccacacgatccacacccaaccagtgggaaagcaatttgacagagtggatgattttttcattcccaccacaacactcattatcacccatatgaggtttggatttattcttcataaagatgaagctgcactacaaaaaattgatcttgaaaccatgtcatacatcaagacaattaacttgaaggactataagtgcgttcctcagtcattggcatatacacacttgggaggctactacttcattggctgcaaacctgacagcaccggagcagtttccccacaggtcatggtggacggtgtaactgactcagtcattgggttcaatagtgatgtgacgggcactccatatgtctctccagatggccactaccttgtcagcattaatgatgtgaaaggtcttgtaagggttcagtacattaccatcagaggagaaatacaggaggcttttgatatttacacaaatctgcacatatctgatctggcatttcaaccatcctttactgaagcccaccaatataacatctacggtagttcaagcacacaaactgatgtgctctttgtggagctctcttctgggaaggtcaagatgataaagagtctcaaggaaccactcaaggcagaagaatggccttggaaccggaaaaacaggcaaatccaggacagtggcttgtttggtcaatacctgatgacaccttccaaggactctctcttcatcctagatggacgactcaataaattaaactgtgagatcactgaagttgaaaaaggaaatacagtcatttgggttggagatgcctaa

SEQ ID NO: 46308 - DNA, 2514 bp, Artificial Sequence
  derived and/or modified sequence
atgtttaagtgctggtctgtggtgttagtgcttggatttatttttttagagagcgagggcaggcctactaaggaaggcggatacggcttgaaaagctatcagccactcatgcgattgagacacaaggagaaaaatcaggaatcttcaagagtaaaggggttcatgatccaagacggaccgtttggctcctgtgaaaataagtactgcggtctgggccgccactgcgttacctctcgcgaaaccgggcaggctgaatgtgcttgcatggacctatgcaagagacactacaaacccgtgtgtggatccgatggggagttctatgagaaccactgtgaagtgcacagggcggcctgtctgaagaagcagaagatcaccatcgtccacaacgaggattgcttctttaaaggagacaagtgtaaaacaaccgagtatagtaagatgaaaaacatgctccttgaccttcaaaaccaaaagtatattatgcaggagaacgaaaatcctaacggtgatgacatcagccggaaaaagctgctggtggaccagatgttcaaatacttcgatgccgattccaatggtctcgtagatataaacgaactgacacaggtgattaagcaagaggagctcggaaaggacctcttcgactgtactctctatgtgctgcttaagtacgacgattttaacgctgataagcacctcgcccttgaagaattctaccgtgccttccaagtaatccaattgtccctccctgaagatcagaagctctcaatcaccgcagccacagtcggacagtctgccgtgctgtcgtgcgcaatccagggaacactcaggcctcctataatatggaaaagaaataatatcattcttaataaccttgacctggaagatataaacgattttggagatgatggctccctttatataacaaaggtgacaacaacacatgtcggcaactacacatgttatgcagatggttacgagcaggtgtatcagacccacatttttcaggtgaacgttcctccagtgatcagggtctaccctgaaagccaggcccgcgagccgggggttaccgctagcctccgctgtcatgcagaggggattcccaaacctcagctgggctggctgaaaaatggcatcgacatcacccctaaactcagcaagcagctgaccctgcaggccaacggatctgaagtgcacatctccaacgtgaggtatgaagacaccggtgcctatacctgcattgcaaagaatgaagctggcgttgatgaagacataagtagcctgttcgtggaggactccgccaggaagacaaggcttgggatcggcaatatgttttatgttttttacgaagacgggattaaggtcatccagccgatcgaatgtgagttccagcgccatattaaacccagcgaaaaattgttagggttccaggatgaggtgtgtcctaaagcggagggtgacgaggtccagcgctgcgtttgggcaagtgcagtgaacgtaaaagataaatttatatacgtcgcgcagcctacccttgatagggtcctgatagttgacgtacagagccagaaagtagtacaggcagttagtacggatccagtccccgtgaaactccactatgacaagtcccatgaccaggtttgggtgctatcttggggtactctcgaaaaaacttcaccaactctgcaggtaataaccctggcctcgggtaatgtacctcatcataccatccatactcaacccgtgggtaagcagttcgatcgggtcgacgacttctttatccccactacaactctgatcattacccatatgcgctttgggtttattttacacaaagacgaggctgccctgcagaagatcgatttggaaactatgtcctatatcaagaccatcaatctcaaagattacaagtgcgtgcctcagagcctggcctatacccacctgggcggctactacttcattggctgcaagcctgattcaaccggggctgtctcacctcaggtgatggtggacggcgtaaccgattccgtgatcggctttaacagtgatgtgaccgggacaccttacgtgagccctgatgggcactacctagttagtatcaacgacgtaaaaggcttagtgagggtgcagtacattactatacgcggggagatccaagaggcattcgacatctacacaaatctacacatttccgatcttgcattccagccgtcatttacagaggcccaccagtacaacatatacggttcgtcatctacccagacagatgtcttattcgtcgagctcagtagcggcaaggtcaagatgataaagagccttaaagagcctctgaaagccgaagagtggccctggaacaggaaaaacagacagatacaggactctggtttatttgggcagtatcttatgacaccctccaaggattccctcttcattctggacggccgactgaacaaactgaactgtgagattacagaggtcgaaaaggggaacacagttatttgggtcggtgatgcctag

SEQ ID NO: 46309 - DNA, 2514 bp, Artificial Sequence
  derived and/or modified sequence
atgtttaagtgttggtcagtggtcctcgtgctgggctttattttcctcgagagtgagggtcgcccaaccaaggaagggggatatggactgaagagttaccagcccttgatgcggcttaggcacaaggaaaaaaatcaagaaagtagccgagtgaagggctttatgatccaggatggcccatttggttcatgtgagaataaatattgtggcttgggtaggcattgcgttacatccagagaaacaggacaggctgaatgcgcttgcatggacctctgtaaacgacattacaagcccgtatgcggaagcgatggcgaattctacgaaaatcactgtgaggtacacagggcagcatgtctaaaaaaacagaaaattacaatcgtacacaacgaagactgcttctttaagggagacaaatgcaagaccacagagtacagtaagatgaaaaacatgttattagatcttcaaaatcaaaagtatatcatgcaggagaacgagaaccctaatggcgacgacatttcccggaaaaaactgttggtcgaccagatgttcaagtacttcgacgcagactccaatgggcttgtggacataaatgagctgacccaggtcatcaaacaagaggaactgggaaaagatctgtttgactgtacactttacgtattgttaaaatatgacgactttaatgcggacaaacatctcgcactggaagaattttacagggcctttcaggttatccagttgagtctacctgaagatcagaaattatcaatcacggccgccacagttggccagtctgccgtgctgtcatgcgctatccaaggaactctgagaccccctatcatctggaaaagaaacaatattatcctaaataatctggaccttgaggacattaatgatttcggagatgatggatctctctacattaccaaagtcacaaccactcacgtcggcaattatacatgttacgctgacggctacgagcaagtctatcaaactcatatctttcaagtcaacgtgcctcccgtcatccgcgtgtatcccgaaagtcaggccagagagcccggagttaccgctagtctacgttgccacgctgagggcatcccaaaaccacagctgggttggctgaaaaatggcatagacattactcccaaattgtcaaaacagctgacactgcaggctaacggatccgaagtacacattagcaatgtgaggtacgaagacaccggggcttatacctgtattgctaaaaacgaggcgggcgttgacgaagacatctccagtctgtttgtagaggatagcgcacgtaagacacggcttggtattgggaatatgttctatgtcttttatgaagatggtatcaaagtgatccagccaatcgaatgtgagtttcaaagacacattaagcctagtgaaaaactgctcggattccaggacgaagtatgtccaaaggcagagggcgacgaagtacagcgctgcgtgtgggcgagcgccgtaaacgtcaaagacaaatttatttacgtcgctcagcccacgctcgacagagtgcttatcgtggacgtgcaatctcagaaagtggtccaagcagtttctactgaccctgttccagttaaattacattacgataaatcgcatgatcaggtttgggtgctgagttggggcacactggagaaaaccagccccacgctccaggtcatcaccctagcctcaggcaacgttcctcaccacactatacatacccagccagtcggcaaacaattcgaccgagttgacgatttttttataccgactactacccttatcataactcacatgagatttggattcatcctgcacaaagacgaggccgcactgcagaaaattgaccttgaaactatgtcctacattaaaacgatcaacctgaaagactacaaatgcgtccctcagagtctcgcgtacactcatttaggcggctactactttatcggatgcaaacctgacagtactggcgccgtgtccccccaggtgatggtggacggcgtgactgacagtgtgatcggctttaacagtgacgtgaccggtacaccctatgtctcccccgacggacactatcttgtaagtattaacgatgtcaaaggactggttcgcgtacagtatataaccattcgaggggagatccaagaggcattcgatatttacactaaccttcacatttccgacctcgcatttcagccctcttttaccgaagcacatcagtacaacatttacgggtcgtcaagtactcagaccgatgttttgtttgttgagctgtcaagcggcaaggttaagatgattaaaagcctgaaggaacccctcaaagcagaagaatggccttggaacagaaagaaccgacaaatccaggactcaggactgttcgggcaatatcttatgacaccaagcaaagactctctgtttatacttgacggccgtttaaataaattgaattgtgaaatcactgaagtggaaaagggaaacactgtgatctgggtgggcgacgcgtag

SEQ ID NO: 46310 - DNA, 2514 bp, Artificial Sequence
  derived and/or modified sequence
atgttcaagtgctggagcgtggtgctggtgctgggcttcatcttcctggagagcgagggcagacccaccaaggagggcggctacggcctgaagagctaccagcccctgatgagactgagacacaaggagaagaaccaggagagcagcagagtgaagggcttcatgatccaggacggccccttcggcagctgcgagaacaagtactgcggcctgggcagacactgcgtgaccagcagagagaccggccaggccgagtgcgcctgcatggacctgtgcaagagacactacaagcccgtgtgcggcagcgacggcgagttctacgagaaccactgcgaggtgcacagagccgcctgcctgaagaagcagaagatcaccatcgtgcacaacgaggactgcttcttcaagggcgacaagtgcaagaccaccgagtacagcaagatgaagaacatgctgctggacctgcagaaccagaagtacatcatgcaggagaacgagaaccccaacggcgacgacatcagcagaaagaagctgctggtggaccagatgttcaagtacttcgacgccgacagcaacggcctggtggacatcaacgagctgacccaggtgatcaagcaggaggagctgggcaaggacctgttcgactgcaccctgtacgtgctgctgaagtacgacgacttcaacgccgacaagcacctggccctggaggagttctacagagccttccaggtgatccagctgagcctgcccgaggaccagaagctgagcatcaccgccgccaccgtgggccagagcgccgtgctgagctgcgccatccagggcaccctgagaccccccatcatctggaagagaaacaacatcatcctgaacaacctggacctggaggacatcaacgacttcggcgacgacggcagcctgtacatcaccaaggtgaccaccacccacgtgggcaactacacctgctacgccgacggctacgagcaggtgtaccagacccacatcttccaggtgaacgtgccccccgtgatcagagtgtaccccgagagccaggccagagagcccggcgtgaccgccagcctgagatgccacgccgagggcatccccaagccccagctgggctggctgaagaacggcatcgacatcacccccaagctgagcaagcagctgaccctgcaggccaacggcagcgaggtgcacatcagcaacgtgagatacgaggacaccggcgcctacacctgcatcgccaagaacgaggccggcgtggacgaggacatcagcagcctgttcgtggaggacagcgccagaaagaccagactgggcatcggcaacatgttctacgtgttctacgaggacggcatcaaggtgatccagcccatcgagtgcgagttccagagacacatcaagcccagcgagaagctgctgggcttccaggacgaggtgtgccccaaggccgagggcgacgaggtgcagagatgcgtgtgggccagcgccgtgaacgtgaaggacaagttcatctacgtggcccagcccaccctggacagagtgctgatcgtggacgtgcagagccagaaggtggtgcaggccgtgagcaccgaccccgtgcccgtgaagctgcactacgacaagagccacgaccaggtgtgggtgctgagctggggcaccctggagaagaccagccccaccctgcaggtgatcaccctggccagcggcaacgtgccccaccacaccatccacacccagcccgtgggcaagcagttcgacagagtggacgacttcttcatccccaccaccaccctgatcatcacccacatgagattcggcttcatcctgcacaaggacgaggccgccctgcagaagatcgacctggagaccatgagctacatcaagaccatcaacctgaaggactacaagtgcgtgccccagagcctggcctacacccacctgggcggctactacttcatcggctgcaagcccgacagcaccggcgccgtgagcccccaggtgatggtggacggcgtgaccgacagcgtgatcggcttcaacagcgacgtgaccggcaccccctacgtgagccccgacggccactacctggtgagcatcaacgacgtgaagggcctggtgagagtgcagtacatcaccatcagaggcgagatccaggaggccttcgacatctacaccaacctgcacatcagcgacctggccttccagcccagcttcaccgaggcccaccagtacaacatctacggcagcagcagcacccagaccgacgtgctgttcgtggagctgagcagcggcaaggtgaagatgatcaagagcctgaaggagcccctgaaggccgaggagtggccctggaacagaaagaacagacagatccaggacagcggcctgttcggccagtacctgatgacccccagcaaggacagcctgttcatcctggacggcagactgaacaagctgaactgcgagatcaccgaggtggagaagggcaacaccgtgatctgggtgggcgacgcctag

SEQ ID NO: 46311 - DNA, 2514 bp, Artificial Sequence
  derived and/or modified sequence
atgtttaagtgctggtctgtagtcctagtgctgggcttcattttcttggagtcagaaggaagaccaacgaaggaaggcggctacggattgaagtcttatcagccacttatgagactgaggcacaaggagaagaaccaggaaagctcaagagtcaaaggctttatgattcaggacggccccttcggcagctgcgagaacaaatattgcggtttaggaagacattgtgtcacttctagagagaccggccaggccgagtgcgcctgtatggacctctgtaagaggcactataaaccggtctgtggaagtgacggagaattctacgaaaatcattgtgaagtacacagggccgcttgcctgaagaaacagaagattaccatagttcacaatgaagattgcttttttaagggtgacaaatgtaaaacgaccgagtactcgaagatgaagaatatgctgttagaccttcagaaccaaaagtacatcatgcaggaaaatgaaaacccaaatggagacgatatttcccggaaaaaactactggttgatcagatgtttaagtacttcgacgctgactcaaacggactcgtagacattaacgaattaacacaggtgatcaagcaagaagagctcggcaaggatctgtttgactgtacactctacgtattattgaagtacgacgattttaatgcagacaagcacctggcgcttgaagagttttatagagcattccaggtgatccaactgtccttaccagaagatcagaagctttcaattactgccgcgaccgtggggcagtccgctgtattgtcctgcgcaattcagggaacactgcggcccccgatcatttggaaacggaataatatcattttaaacaacctggacctcgaggacattaacgactttggggacgatgggtccctctacattacgaaagtgactactactcacgtgggcaattacacatgttacgcagacgggtacgaacaagtgtaccaaacacacatcttccaggttaatgtccccccggttattagggtgtatcctgaatcacaagctagggagcctggtgtaactgcatctctgcgctgtcatgccgagggtatccccaagccacagctaggatggctgaaaaacggaatagacatcacccccaaactcagcaagcagctgacgctacaggcaaacgggtccgaagtccatatatccaacgtccgctacgaagacactggtgcatatacatgcatcgccaagaatgaagccggagtggacgaggatatctcatccctcttcgtggaagacagtgcaagaaaaacgaggctgggtatcggaaacatgttttacgtcttttacgaggacggaatcaaagtgattcagcctatcgaatgtgaatttcagagacacatcaaaccaagcgaaaaactgctgggctttcaagacgaggtgtgccccaaggctgagggagacgaagtccagcgctgtgtatgggcgtctgcagtgaacgtaaaggacaaattcatctacgtagctcaacccacgttggaccgcgttctgattgtcgacgtgcagtcgcagaaagtagttcaagccgtctccacagacccagtgccagtcaaactccattacgacaaatcacatgatcaggtatgggtgttatcttggggcactctcgaaaaaactagtcctacgcttcaggtgatcactctcgctagcggtaacgtaccccatcataccatccatacacagcctgtgggcaagcagttcgatagagtagacgacttcttcataccaacaacaaccttgattatcacccacatgcgattcggcttcatcttgcacaaagacgaggccgccctgcagaaaatcgacctggagacgatgagctatattaagactataaaccttaaggattacaagtgcgtgcctcagtccctcgcttacactcatctaggcggatactattttatcggctgcaaacctgacagcactggcgccgtgtcaccacaggtaatggtcgacggcgtgacagactcggtgatcggttttaactccgacgtgacgggtactccgtacgtgtcaccagatggccattatttagtgtcaataaatgatgtcaaagggttagtacgcgtgcagtacattaccatacggggcgaaatacaagaagccttcgacatatacacaaatcttcacatctccgatctcgcttttcagcccagctttactgaagcccaccagtacaacatctatggctcctcttccacccaaactgatgttctcttcgttgagctgtctagtggcaaagtaaaaatgattaagagccttaaagagccactgaaggctgaagaatggccttggaatcgaaaaaaccggcagatccaggattcggggctgttcggtcaatacttgatgacacctagtaaggattctctgttcattctcgatggcaggttgaacaaactgaattgtgagattactgaggtcgagaaggggaataccgtcatttgggtgggcgacgcgtag

SEQ ID NO: 46312 - DNA, 2514 bp, Artificial Sequence
  derived and/or modified sequence
atgttcaagtgctggagcgtggtgctggtgctgggcttcatcttcctggagagcgagggccggcccaccaaggagggcggctacggcctgaagagctaccagcccctgatgaggctgcggcacaaggagaagaaccaggagagcagccgggtgaagggcttcatgatccaggacggccccttcggcagctgtgagaacaagtactgcggcctgggccgccactgtgtgaccagccgggagaccggccaggctgaatgtgcctgcatggacctgtgcaagaggcactacaagcctgtgtgtggcagtgatggagagttctatgagaaccactgtgaggtgcaccgggccgcctgcctgaagaagcagaagatcaccatcgtgcacaatgaagactgcttcttcaagggggacaagtgcaagaccacagagtacagcaagatgaagaacatgctgctggacctgcagaaccagaagtacatcatgcaggagaatgaaaaccccaatggagatgacatcagcaggaagaagctgctggtggaccagatgttcaagtactttgatgctgacagcaatggcctggtggacatcaatgagctgacccaggtgatcaagcaggaggagctgggcaaggacctgtttgactgcaccctgtatgtgctgctgaagtatgatgacttcaatgctgacaagcacctggccctggaggagttctaccgggccttccaggtgatccagctgagcctgcctgaggaccagaagctgagcatcacagctgccaccgtgggccagagcgctgtgctgagctgtgccatccagggcaccctgcggccccccatcatctggaagaggaacaacatcatcctgaacaacctggacctggaggacatcaatgactttggagatgatggcagcctgtacatcaccaaggtgaccaccacccacgtgggcaactacacctgctacgcagatggctatgagcaggtgtaccagacccacatcttccaggtgaatgtgccccctgtgatccgggtgtacccagagagccaggcccgggagcccggggtgacagccagcctgcgctgccacgccgagggcatccccaagccccagctgggctggctgaagaatggcatcgacatcacccccaagctgagcaagcagctgaccctgcaggccaatggaagtgaggtgcacatcagcaatgtgcgctatgaagatactggagcctacacctgcatcgccaagaatgaggccggcgtggatgaggacatcagcagcctgtttgtggaggacagcgccaggaagacccggctgggcatcggcaacatgttttatgtgttctatgaagatggcatcaaggtgatccagcccattgaatgtgagttccagaggcacatcaagcccagcgagaagctgctgggcttccaggatgaggtgtgccccaaggccgagggagatgaggtgcagagatgtgtgtgggccagcgctgtgaatgtgaaggacaagttcatctacgtggcccagcccaccctggacagagtgctgattgtggatgtgcagagccagaaggtggtgcaggccgtgtccacagatcctgtgcctgtgaagctgcactatgacaagagccatgaccaggtgtgggtgctgtcctggggcaccctggagaagaccagccccaccctgcaggtgatcaccctggccagcggaaatgtgccccaccacaccatccacacccagcctgtgggcaagcagtttgacagagtggatgacttcttcatccccaccaccaccctcatcatcacccacatgagatttggcttcatcctgcacaaggatgaggccgccctgcagaagattgacctggagaccatgagctacatcaagaccatcaacctgaaggactacaagtgtgtgccccagagcctggcctacacccacctgggcggctactacttcatcggctgcaagccagacagcactggagctgtgagcccccaggtgatggtggatggagtgacagattctgtgattggcttcaacagtgatgtgacaggcaccccctacgtgtccccagatggccactacctggtgtccatcaatgatgtgaagggcctggtgcgggtgcagtacatcaccatccggggggagatccaggaggcctttgacatctacaccaacctgcacatcagtgacctggccttccagcccagcttcacagaggcccaccagtacaacatctacggcagcagcagcacccagacagatgtgctgtttgtggagctgagcagcggcaaggtgaagatgatcaagagcctgaaggagcccctgaaggccgaggagtggccctggaacaggaagaaccggcagatccaggacagcggcctgtttggccagtacctgatgacccccagcaaggacagcctcttcatcctggatggccgcctgaacaagctgaactgtgagatcacagaggtggagaagggcaacacagtcatctgggtgggagatgcctag

SEQ ID NO: 46313 - DNA, 2514 bp, Artificial Sequence
  derived and/or modified sequence
atgttcaagtgctggagcgtggtgctggtgctgggcttcatcttcctggaaagcgagggaagacccacaaaggagggcggatatgggcttaaaagttatcagcctctcatgcgactgcggcataaagagaaaaaccaggagagctcacgcgtaaagggttttatgatccaagacggaccatttggtagctgcgaaaataagtattgtgggctgggccggcattgcgtgacctctcgcgagactggccaagccgaatgtgcctgtatggatctatgtaagaggcactataagccagtgtgtgggtcggatggcgagttctacgaaaaccactgcgaggtccaccgggccgcctgtctgaagaagcagaagatcactatcgttcataacgaggactgtttcttcaaaggggataagtgcaagactacagaatattcaaagatgaaaaatatgcttctggacctacagaaccaaaagtatatcatgcaggagaatgaaaatccgaacggagacgacattagcaggaaaaagctcttagtagatcagatgttcaaatatttcgatgccgacagcaatggcctggtagatatcaatgaattgacgcaggttatcaaacaggaagagctgggaaaggacctttttgactgcaccctatatgttttactcaaatacgacgacttcaatgccgacaaacatctggcgctggaggagttttaccgcgctttccaggtcatccaactgtccctcccagaagaccagaagttatctattactgctgccacagtaggacaatctgccgtgctcagttgtgcgatccaggggactctcaggccacccattatatggaagagaaacaatattattctcaacaatctggatttggaagacattaacgactttggggacgatggctctctgtacattactaaggtcaccaccacccacgtaggcaactatacctgctatgccgacggatacgaacaagtctaccagactcatatatttcaagtcaatgtgcctccggtaatacgcgtctacccagaaagccaggcacgcgaacccggtgtcactgcctcactccggtgtcatgcagaaggtataccaaaaccgcagcttggatggttaaagaatggaattgacatcaccccgaaactgtcgaagcagctaacactacaggcaaatggtagcgaggttcacatttcaaacgtcagatatgaagacacaggggcgtatacatgtatcgccaagaatgaggccggcgtggatgaggatatctcctcactctttgttgaagatagcgcgcgaaagacaagactgggaatcggcaatatgttttatgtattttatgaagatggaattaaagtaatccagccgattgagtgcgagtttcagagacacatcaagccctcagaaaaattactcgggtttcaagatgaggtgtgcccaaaggccgaaggagacgaggtgcaacggtgcgtctgggcctctgctgtgaacgttaaggacaaatttatttacgtggctcagcccaccctcgatcgcgtgctgatcgttgacgttcaatctcagaaggtggtgcaagccgtaagcaccgatccagtgccagttaagttgcattatgataaatctcatgatcaggtttgggtgttgtcttggggaactctcgagaagacttcccctacactgcaagttattacccttgccagcgggaatgtgcctcaccacacaattcatacgcagccggtgggcaaacagttcgaccgcgttgacgactttttcattcccacgacgacattaatcatcactcatatgcggttcggctttattttacacaaagacgaagccgccctccaaaagatagatctcgaaaccatgagctacatcaaaactatcaaccttaaagactataagtgtgtaccccagagccttgcatacacccatctcgggggatattattttataggatgcaagccggacagcaccggagccgtgagtccgcaggtcatggttgatggggtcacagattctgtcatcgggttcaattcagacgtgaccgggaccccctatgtgtcccccgacggacactacctggtttccataaacgatgtgaagggccttgtccgcgtgcagtacattaccatccggggcgagattcaggaggcctttgatatctacacaaatcttcacatctcagatcttgcctttcagcctagcttcactgaggcccaccagtacaatatctacggctctagcagtacccagacagacgtcttgtttgtggaactctcaagcggtaaagttaagatgattaaaagcctgaaagaacctttgaaggccgaagagtggccatggaatcggaaaaaccggcagatccaggattcaggactattcggtcagtatctcatgacgccatccaaggactcactttttattctggatggacgtctgaataaactgaattgcgaaatcacggaagtcgaaaaaggaaatacagtcatttgggtgggggacgcgtag

SEQ ID NO: 46314 - RNA, 2514 nt, Artificial Sequence
  derived and/or modified sequence
auguuuaagugcuggucugugguguuagugcuuggauuuauuuuuuuagagagcgagggcaggccuacuaaggaaggcggauacggcuugaaaagcuaucagccacucaugcgauugagacacaaggagaaaaaucaggaaucuucaagaguaaagggguucaugauccaagacggaccguuuggcuccugugaaaauaaguacugcggucugggccgccacugcguuaccucucgcgaaaccgggcaggcugaaugugcuugcauggaccuaugcaagagacacuacaaacccguguguggauccgauggggaguucuaugagaaccacugugaagugcacagggcggccugucugaagaagcagaagaucaccaucguccacaacgaggauugcuucuuuaaaggagacaaguguaaaacaaccgaguauaguaagaugaaaaacaugcuccuugaccuucaaaaccaaaaguauauuaugcaggagaacgaaaauccuaacggugaugacaucagccggaaaaagcugcugguggaccagauguucaaauacuucgaugccgauuccaauggucucguagauauaaacgaacugacacaggugauuaagcaagaggagcucggaaaggaccucuucgacuguacucucuaugugcugcuuaaguacgacgauuuuaacgcugauaagcaccucgcccuugaagaauucuaccgugccuuccaaguaauccaauugucccucccugaagaucagaagcucucaaucaccgcagccacagucggacagucugccgugcugucgugcgcaauccagggaacacucaggccuccuauaauauggaaaagaaauaauaucauucuuaauaaccuugaccuggaagauauaaacgauuuuggagaugauggcucccuuuauauaacaaaggugacaacaacacaugucggcaacuacacauguuaugcagaugguuacgagcagguguaucagacccacauuuuucaggugaacguuccuccagugaucagggucuacccugaaagccaggcccgcgagccggggguuaccgcuagccuccgcugucaugcagaggggauucccaaaccucagcugggcuggcugaaaaauggcaucgacaucaccccuaaacucagcaagcagcugacccugcaggccaacggaucugaagugcacaucuccaacgugagguaugaagacaccggugccuauaccugcauugcaaagaaugaagcuggcguugaugaagacauaaguagccuguucguggaggacuccgccaggaagacaaggcuugggaucggcaauauguuuuauguuuuuuacgaagacgggauuaaggucauccagccgaucgaaugugaguuccagcgccauauuaaacccagcgaaaaauuguuaggguuccaggaugagguguguccuaaagcggagggugacgagguccagcgcugcguuugggcaagugcagugaacguaaaagauaaauuuauauacgucgcgcagccuacccuugauaggguccugauaguugacguacagagccagaaaguaguacaggcaguuaguacggauccaguccccgugaaacuccacuaugacaagucccaugaccagguuugggugcuaucuugggguacucucgaaaaaacuucaccaacucugcagguaauaacccuggccucggguaauguaccucaucauaccauccauacucaacccguggguaagcaguucgaucgggucgacgacuucuuuauccccacuacaacucugaucauuacccauaugcgcuuuggguuuauuuuacacaaagacgaggcugcccugcagaagaucgauuuggaaacuauguccuauaucaagaccaucaaucucaaagauuacaagugcgugccucagagccuggccuauacccaccugggcggcuacuacuucauuggcugcaagccugauucaaccggggcugucucaccucaggugaugguggacggcguaaccgauuccgugaucggcuuuaacagugaugugaccgggacaccuuacgugagcccugaugggcacuaccuaguuaguaucaacgacguaaaaggcuuagugagggugcaguacauuacuauacgcggggagauccaagaggcauucgacaucuacacaaaucuacacauuuccgaucuugcauuccagccgucauuuacagaggcccaccaguacaacauauacgguucgucaucuacccagacagaugucuuauucgucgagcucaguagcggcaaggucaagaugauaaagagccuuaaagagccucugaaagccgaagaguggcccuggaacaggaaaaacagacagauacaggacucugguuuauuugggcaguaucuuaugacacccuccaaggauucccucuucauucuggacggccgacugaacaaacugaacugugagauuacagaggucgaaaaggggaacacaguuauuugggucggugaugccuag

SEQ ID NO: 46315 - RNA, 2514 nt, Artificial Sequence
  derived and/or modified sequence
auguuuaaguguuggucagugguccucgugcugggcuuuauuuuccucgagagugagggucgcccaaccaaggaagggggauauggacugaagaguuaccagcccuugaugcggcuuaggcacaaggaaaaaaaucaagaaaguagccgagugaagggcuuuaugauccaggauggcccauuugguucaugugagaauaaauauuguggcuuggguaggcauugcguuacauccagagaaacaggacaggcugaaugcgcuugcauggaccucuguaaacgacauuacaagcccguaugcggaagcgauggcgaauucuacgaaaaucacugugagguacacagggcagcaugucuaaaaaaacagaaaauuacaaucguacacaacgaagacugcuucuuuaagggagacaaaugcaagaccacagaguacaguaagaugaaaaacauguuauuagaucuucaaaaucaaaaguauaucaugcaggagaacgagaacccuaauggcgacgacauuucccggaaaaaacuguuggucgaccagauguucaaguacuucgacgcagacuccaaugggcuuguggacauaaaugagcugacccaggucaucaaacaagaggaacugggaaaagaucuguuugacuguacacuuuacguauuguuaaaauaugacgacuuuaaugcggacaaacaucucgcacuggaagaauuuuacagggccuuucagguuauccaguugagucuaccugaagaucagaaauuaucaaucacggccgccacaguuggccagucugccgugcugucaugcgcuauccaaggaacucugagacccccuaucaucuggaaaagaaacaauauuauccuaaauaaucuggaccuugaggacauuaaugauuucggagaugauggaucucucuacauuaccaaagucacaaccacucacgucggcaauuauacauguuacgcugacggcuacgagcaagucuaucaaacucauaucuuucaagucaacgugccucccgucauccgcguguaucccgaaagucaggccagagagcccggaguuaccgcuagucuacguugccacgcugagggcaucccaaaaccacagcuggguuggcugaaaaauggcauagacauuacucccaaauugucaaaacagcugacacugcaggcuaacggauccgaaguacacauuagcaaugugagguacgaagacaccggggcuuauaccuguauugcuaaaaacgaggcgggcguugacgaagacaucuccagucuguuuguagaggauagcgcacguaagacacggcuugguauugggaauauguucuaugucuuuuaugaagaugguaucaaagugauccagccaaucgaaugugaguuucaaagacacauuaagccuagugaaaaacugcucggauuccaggacgaaguauguccaaaggcagagggcgacgaaguacagcgcugcgugugggcgagcgccguaaacgucaaagacaaauuuauuuacgucgcucagcccacgcucgacagagugcuuaucguggacgugcaaucucagaaagugguccaagcaguuucuacugacccuguuccaguuaaauuacauuacgauaaaucgcaugaucagguuugggugcugaguuggggcacacuggagaaaaccagccccacgcuccaggucaucacccuagccucaggcaacguuccucaccacacuauacauacccagccagucggcaaacaauucgaccgaguugacgauuuuuuuauaccgacuacuacccuuaucauaacucacaugagauuuggauucauccugcacaaagacgaggccgcacugcagaaaauugaccuugaaacuauguccuacauuaaaacgaucaaccugaaagacuacaaaugcgucccucagagucucgcguacacucauuuaggcggcuacuacuuuaucggaugcaaaccugacaguacuggcgccguguccccccaggugaugguggacggcgugacugacagugugaucggcuuuaacagugacgugaccgguacacccuaugucucccccgacggacacuaucuuguaaguauuaacgaugucaaaggacugguucgcguacaguauauaaccauucgaggggagauccaagaggcauucgauauuuacacuaaccuucacauuuccgaccucgcauuucagcccucuuuuaccgaagcacaucaguacaacauuuacgggucgucaaguacucagaccgauguuuuguuuguugagcugucaagcggcaagguuaagaugauuaaaagccugaaggaaccccucaaagcagaagaauggccuuggaacagaaagaaccgacaaauccaggacucaggacuguucgggcaauaucuuaugacaccaagcaaagacucucuguuuauacuugacggccguuuaaauaaauugaauugugaaaucacugaaguggaaaagggaaacacugugaucugggugggcgacgcguag

SEQ ID NO: 46316 - protein, 1028 aa, Artificial Sequence
  derived and/or modified sequence
MNLFNLDRFRFEKRNKIEEAPEATPQPSQPGPSSPISLSAEEENAEGEVSRANTPDSDITEKTEDSSVPETPDNERKASISYFKNQRGIQYIDLSSDSEDVVSPNCSNTVQEKTFNKDTVIIVSEPSEDEESQGLPTMARRNDDISELEDLSELEDLKDAKLQTLKELFPQRSDNDLLKLIESTSTMDGAIAAALLMFGDAGGGPRKRKLSSSSEPYEEDEFNDDQSIKKTRLDHGEESNESAESSSNWEKQESIVLKLQKEFPNFDKQELREVLKEHEWMYTEALESLKVFAEDQDMQYVSQSEVPNGKEVSSRSQNYPKNATKTKLKQKFSMKAQNGFNKKRKKNVFNPKRVVEDSEYDSGSDVGSSLDEDYSSGEEVMEDGYKGKILHFLQDASIGELTLIPQCSQKKAQKITELRPFNSWEALFTKMSKTNGLSEDLIWHCKTLIQERDVVIRLMNKCEDISNKLTKQVTMLTGNGGGWNIEQPSILNQSLSLKPYQKVGLNWLALVHKHGLNGILADEMGLGKTIQAIAFLAYLYQEGNNGPHLIVVPASTIDNWLREVNLWCPTLKVLCYYGSQEERKQIRFNIHSRYEDYNVIVTTYNCAISSSDDRSLFRRLKLNYAIFDEGHMLKNMGSIRYQHLMTINANNRLLLTGTPVQNNLLELMSLLNFVMPHMFSSSTSEIRRMFSSKTKSADEQSIYEKERIAHAKQIIKPFILRRVKEEVLKQLPPKKDRIELCAMSEKQEQLYLGLFNRLKKSINNLVTEKNTEMCNVMMQLRKMANHPLLHRQYYTAEKLKEMSQLMLKEPTHCEANPDLIFEDMEVMTDFELHVLCKQYRHINNFQLDMDLILDSGKFRVLGCILSELKQKGDRVVLFSQFTMMLDILEVLLKHHQHRYLRLDGKTQISERIHLIDEFNTDMDIFVFLLSTKAGGLGINLTSANVVILHDIDCNPYNDKQAEDRCHRVGQTKEVLVIKLISQGTIEESMLKINQQKLKLEQDMTTVDEGDEGSMPADIATLLKTSMGL

SEQ ID NO: 46317 - protein, 318 aa, Artificial Sequence
  derived and/or modified sequence
MNLFNLDRFRFEKRNKIEEAPEATPQPSQPGPSSPISLSAEEENAEGEVSRANTPDSDITEKTEDSSVPETPDNERKASISYFKNQRGIQYIDLSSDSEDVVSPNCSNTVQEKTFNKDTVIIVSEPSEDEESQGLPTMARRNDDISELEDLSELEDLKDAKLQTLKELFPQRSDNDLLKLIESTSTMDGAIAAALLMFGDAGGGPRKRKLSSSSEPYEEDEFNDDQSIKKTRLDHGEESNESAESSSNWEKQESIVLKLQKEFPNFDKQELREVLKEHEWMYTEALESLKVFAEDQDMQYVSQSEVPNGKKKAQKKKK

SEQ ID NO: 46318 - DNA, 3087 bp, Artificial Sequence
  derived and/or modified sequence
atgaacctgttcaacctggacagattcagattcgagaagagaaacaagatcgaggaggcccccgaggccaccccccagcccagccagcccggccccagcagccccatcagcctgagcgccgaggaggagaacgccgagggcgaggtgagcagagccaacacccccgacagcgacatcaccgagaagaccgaggacagcagcgtgcccgagacccccgacaacgagagaaaggccagcatcagctacttcaagaaccagagaggcatccagtacatcgacctgagcagcgacagcgaggacgtggtgagccccaactgcagcaacaccgtgcaggagaagaccttcaacaaggacaccgtgatcatcgtgagcgagcccagcgaggacgaggagagccagggcctgcccaccatggccagaagaaacgacgacatcagcgagctggaggacctgagcgagctggaggacctgaaggacgccaagctgcagaccctgaaggagctgttcccccagagaagcgacaacgacctgctgaagctgatcgagagcaccagcaccatggacggcgccatcgccgccgccctgctgatgttcggcgacgccggcggcggccccagaaagagaaagctgagcagcagcagcgagccctacgaggaggacgagttcaacgacgaccagagcatcaagaagaccagactggaccacggcgaggagagcaacgagagcgccgagagcagcagcaactgggagaagcaggagagcatcgtgctgaagctgcagaaggagttccccaacttcgacaagcaggagctgagagaggtgctgaaggagcacgagtggatgtacaccgaggccctggagagcctgaaggtgttcgccgaggaccaggacatgcagtacgtgagccagagcgaggtgcccaacggcaaggaggtgagcagcagaagccagaactaccccaagaacgccaccaagaccaagctgaagcagaagttcagcatgaaggcccagaacggcttcaacaagaagagaaagaagaacgtgttcaaccccaagagagtggtggaggacagcgagtacgacagcggcagcgacgtgggcagcagcctggacgaggactacagcagcggcgaggaggtgatggaggacggctacaagggcaagatcctgcacttcctgcaggacgccagcatcggcgagctgaccctgatcccccagtgcagccagaagaaggcccagaagatcaccgagctgagacccttcaacagctgggaggccctgttcaccaagatgagcaagaccaacggcctgagcgaggacctgatctggcactgcaagaccctgatccaggagagagacgtggtgatcagactgatgaacaagtgcgaggacatcagcaacaagctgaccaagcaggtgaccatgctgaccggcaacggcggcggctggaacatcgagcagcccagcatcctgaaccagagcctgagcctgaagccctaccagaaggtgggcctgaactggctggccctggtgcacaagcacggcctgaacggcatcctggccgacgagatgggcctgggcaagaccatccaggccatcgccttcctggcctacctgtaccaggagggcaacaacggcccccacctgatcgtggtgcccgccagcaccatcgacaactggctgagagaggtgaacctgtggtgccccaccctgaaggtgctgtgctactacggcagccaggaggagagaaagcagatcagattcaacatccacagcagatacgaggactacaacgtgatcgtgaccacctacaactgcgccatcagcagcagcgacgacagaagcctgttcagaagactgaagctgaactacgccatcttcgacgagggccacatgctgaagaacatgggcagcatcagataccagcacctgatgaccatcaacgccaacaacagactgctgctgaccggcacccccgtgcagaacaacctgctggagctgatgagcctgctgaacttcgtgatgccccacatgttcagcagcagcaccagcgagatcagaagaatgttcagcagcaagaccaagagcgccgacgagcagagcatctacgagaaggagagaatcgcccacgccaagcagatcatcaagcccttcatcctgagaagagtgaaggaggaggtgctgaagcagctgccccccaagaaggacagaatcgagctgtgcgccatgagcgagaagcaggagcagctgtacctgggcctgttcaacagactgaagaagagcatcaacaacctggtgaccgagaagaacaccgagatgtgcaacgtgatgatgcagctgagaaagatggccaaccaccccctgctgcacagacagtactacaccgccgagaagctgaaggagatgagccagctgatgctgaaggagcccacccactgcgaggccaaccccgacctgatcttcgaggacatggaggtgatgaccgacttcgagctgcacgtgctgtgcaagcagtacagacacatcaacaacttccagctggacatggacctgatcctggacagcggcaagttcagagtgctgggctgcatcctgagcgagctgaagcagaagggcgacagagtggtgctgttcagccagttcaccatgatgctggacatcctggaggtgctgctgaagcaccaccagcacagatacctgagactggacggcaagacccagatcagcgagagaatccacctgatcgacgagttcaacaccgacatggacatcttcgtgttcctgctgagcaccaaggccggcggcctgggcatcaacctgaccagcgccaacgtggtgatcctgcacgacatcgactgcaacccctacaacgacaagcaggccgaggacagatgccacagagtgggccagaccaaggaggtgctggtgatcaagctgatcagccagggcaccatcgaggagagcatgctgaagatcaaccagcagaagctgaagctggagcaggacatgaccaccgtggacgagggcgacgagggcagcatgcccgccgacatcgccaccctgctgaagaccagcatgggcctgtag

SEQ ID NO: 46319 - DNA, 3087 bp, Artificial Sequence
  derived and/or modified sequence
atgaacctgtttaacttagataggttcagatttgaaaagagaaacaagatcgaggaggcaccagaggccacaccacagccctctcagcccggcccttcctctcccatcagtttgtcagccgaggaagagaacgcagaaggggaggtgagcagggctaatacacccgactctgatatcactgagaagaccgaggattcaagtgtaccagagacccccgacaacgaacggaaagcgtcaatctcatacttcaagaaccagcgggggattcagtatattgacttaagcagcgatagcgaggatgttgtgagtcccaactgctccaacactgtgcaggagaagacgttcaacaaagacacagtgatcatcgtatctgaaccgtcagaggatgaggaatctcagggtttgcccacaatggctcgccgtaacgacgacatctccgagttagaggatttatctgaactcgaagacttaaaggatgcaaaactccaaaccctcaaggaactgttcccccagaggtctgacaacgacctcttaaagctgattgagtcgacctctacgatggacggggctattgctgccgccttactaatgttcggagatgctggcggaggacctagaaaacggaagctgtccagcagttcagaaccgtatgaggaggacgagttcaacgatgaccagtctattaagaagacccggctggatcacggagaggagtcaaacgaatccgctgagagcagcagcaattgggagaagcaggaatcaatcgtacttaaactccaaaaggaattcccaaatttcgataaacaggagctaagagaggttcttaaagaacatgaatggatgtacacagaggccctggaaagtctcaaggtctttgccgaggaccaagatatgcagtacgtgtcccaaagcgaggtccccaacgggaaggaggtaagttcccggtcccagaactaccccaaaaacgcaacaaaaaccaagctgaaacaaaaatttagcatgaaagcccagaacggttttaacaaaaagcgcaagaaaaacgtttttaaccctaaaagagtcgttgaggattccgagtacgattctgggtcagacgtgggctcaagtctggatgaggactactctagcggtgaagaagtcatggaagacggttacaagggcaagattctgcacttcctgcaggatgcctccattggagagttgactttgatcccccaatgttcccagaagaaggctcagaagatcaccgagcttcgacctttcaattcctgggaggctctgtttacgaagatgagtaaaaccaacggcttaagtgaggatttgatctggcattgtaaaacactgatacaggagagggatgttgttatcagactcatgaataagtgcgaagatatctctaataaactgacaaagcaggttaccatgcttaccggtaacggcggcgggtggaatatagaacaaccaagcatcttgaaccagtccttgtccctgaagccctaccagaaagtcgggcttaactggttggccctcgtacacaagcacggcttgaatgggatccttgctgatgagatgggactgggtaaaactattcaggccatcgcctttctggcctacttgtaccaggagggcaacaatggcccacatctgattgtcgtccctgctagtacgattgacaactggctcagggaagtcaatctgtggtgccctaccctgaaggttctgtgttattacggcagccaggaagagcgcaagcaaatcaggttcaatatccactctcgttatgaggattataatgttatcgtaactacatacaactgtgccatctcgtcttccgacgatcgaagcctctttaggcgtctgaagctaaactacgccattttcgatgagggtcatatgctgaagaacatgggctcaatcagatatcagcatctgatgacaatcaatgctaataatcggctgctgctaacaggaactcccgtgcaaaacaacctgttagagctgatgtctttactgaacttcgtcatgcctcacatgtttagttcttccaccagcgagattaggagaatgttctcttcgaaaacaaagtctgccgacgagcaatcgatctatgagaaagaaaggattgctcacgcgaaacagattattaagccattcatccttcgtcgtgttaaagaggaagtgctcaagcagctacccccaaaaaaggatcgtattgaactgtgcgcgatgtccgaaaaacaggaacaactgtacctgggactcttcaaccgactgaagaagtccattaataatcttgttactgaaaagaataccgagatgtgtaacgttatgatgcagctacggaaaatggcaaatcaccccctgctccaccggcagtactacacagctgaaaagctgaaagagatgtcccaactgatgcttaaggagcccacccattgcgaggccaaccccgacctgatcttcgaggacatggaagttatgaccgactttgaactgcacgtgctttgtaagcagtatagacacattaacaatttccagctcgatatggatcttatactcgactcgggcaaattccgggtactcggttgtatccttagtgagctgaaacaaaaaggagaccgcgtggtgttgttcagtcagttcacaatgatgttggatatcctggaggtgctacttaaacatcaccagcatcgatatctcaggctggatggtaagactcagatttccgagcgcattcacctgatcgacgagttcaacaccgacatggacatatttgtgtttcttctctctaccaaagcaggaggcctcggtatcaatctcacaagcgccaacgtggtgatcctccacgatatcgactgtaacccgtataacgataaacaggctgaagatagatgccacagggtcggtcaaacaaaggaagtcctggtcataaaactaattagccagggcaccatagaggaatctatgctgaaaatcaatcaacagaagctcaagctggagcaggatatgaccaccgtcgatgaaggggacgaaggaagcatgccagctgacatcgctaccctacttaaaacctccatgggcttgtag

SEQ ID NO: 46320 - DNA, 3087 bp, Artificial Sequence
  derived and/or modified sequence
atgaatctcttcaacctggatcggtttaggttcgagaaaaggaacaaaattgaggaagctcctgaggccacaccgcagccctcacaaccagggccatccagtcccatttctctgtctgccgaggaagaaaatgcggagggcgaagtcagccgcgccaacacgcccgatagtgatattactgagaagactgaagattccagcgtgccagagaccccggacaatgagcgtaaggcaagcatttcgtacttcaagaatcagcgcggcattcagtacattgatctgagtagtgatagcgaagacgtggtatcccccaattgctccaataccgtgcaagagaagaccttcaataaggacaccgtaattatcgtctccgaaccctctgaagacgaagagtctcaggggctgcctaccatggcacgccgaaatgatgatattagcgaactggaggacttatccgaactggaggatctcaaagatgccaagctgcagacactcaaagagctgtttccgcaaagaagtgacaacgacttgcttaagcttatcgaaagtaccagtactatggatggtgccatcgctgccgcactactgatgtttggggacgcaggcggcggccctagaaagcggaagctctcctcaagctccgaaccatacgaagaggatgagttcaacgatgaccagtccatcaagaagactcggctggatcatggggaggaaagcaacgaatccgcagagtcctcatccaactgggagaagcaggaatccattgtgttgaaactgcaaaaagaatttcccaatttcgataagcaggaacttcgcgaagtccttaaggagcatgagtggatgtatacagaagccctcgaaagtctgaaggtgtttgctgaagaccaggatatgcagtacgtcagtcaatcagaagtccccaatggcaaggaagtctcttcccgcagccagaattatcctaaaaacgccaccaaaacaaagttgaagcagaaattttccatgaaagcccagaacggatttaataagaagaggaagaagaatgtcttcaaccctaagcgtgttgtcgaagactctgagtatgatagcggtagcgatgtcggatctagtttagacgaggactactcctccggcgaagaagtgatggaggacgggtataagggaaagatcctgcatttcctacaggacgccagtattggagaacttaccctgattcctcagtgcagccaaaaaaaggctcaaaagataaccgagctgcgacccttcaactcctgggaagccctcttcacgaagatgagcaagaccaacggcctgtccgaggatctgatttggcattgcaaaactctcatccaggaaagggatgtggttatcagactcatgaacaaatgcgaggacatctccaataaactcaccaaacaggtcactatgctgacaggaaacggcggcggctggaacatcgaacagccctctatcctgaaccaatccctgagtctgaaaccatatcagaaagtgggcctcaactggctggcactggtccacaagcacggacttaacggcattctcgccgacgagatgggtctcggtaaaaccatccaggccatcgcattcttggcttacctttaccaggagggcaacaatggcccacatctaatagttgtgcccgcaagtaccattgacaactggctccgggaagtcaatttatggtgccctactctgaaggtgctgtgttactatgggtcccaagaagagaggaagcagattaggttcaatattcactctagatatgaagattacaacgtgattgttactacatacaactgcgctatctcatcaagcgatgacagaagtctgtttcggcgtctgaagctgaattatgcaatcttcgatgaaggacatatgctcaaaaatatgggaagcattagataccagcaccttatgaccattaacgccaataataggttactgctgacgggcaccccggtccagaataatctgctggagctcatgagcctcttgaattttgtcatgccacacatgttttccagcagcactagtgagatccgccgaatgttttccagtaagacaaaaagtgcagacgaacagtctatatatgaaaaagagcgtatcgcgcatgcgaagcagatcattaagcccttcattttgcgtagggtgaaggaggaggtactcaagcagctccctcctaagaaagacaggatcgagctatgcgctatgtctgagaaacaggagcagctgtatctgggactcttcaacagattgaaaaagtctatcaacaacctggtgacggagaagaataccgagatgtgtaacgtgatgatgcagctgaggaaaatggcaaatcatcctttgctgcatcggcagtactacacagcagagaaactgaaggagatgagccagctgatgttgaaagagcctacccattgcgaggccaaccccgatctgatatttgaagacatggaagtcatgactgatttcgagcttcatgtactgtgtaagcagtaccggcatattaacaatttccagctggatatggatctgatcttggactctggaaagttcagggtgctagggtgcatcctttccgaactcaagcagaagggggacagagtagtactattctctcagtttaccatgatgctggacatcctggaggtgctactcaagcatcaccagcaccgttatttacgtttagacggtaaaacccagatctcggaaaggatacaccttatagatgagtttaacaccgacatggacattttcgtctttttgctgtccacaaaagcggggggtctgggcatcaatctgacttccgccaatgtggtaattctgcacgatatagattgtaatccctacaacgacaagcaggccgaagatcgatgtcatcgggtagggcagaccaaagaggtgctcgtcattaaactgattagtcagggaactatagaggaaagtatgctgaagattaaccagcaaaaattgaagttggaacaagatatgaccactgtggatgagggcgacgaagggtccatgccagctgatatcgccacactgcttaaaacatccatggggctgtag

SEQ ID NO: 46321 - DNA, 3087 bp, Artificial Sequence
  derived and/or modified sequence
atgaacctcttcaacctggaccgcttccgctttgagaagaggaacaagattgaggaggcccctgaggccaccccccagcccagccagcccggccccagcagccccatcagcctgtctgctgaggaggagaatgctgagggggaggtgtcccgggccaacaccccagacagcgacatcacagagaagacagaggacagctctgtgcctgagaccccagacaatgaaaggaaggccagcatctcctacttcaagaaccagaggggcatccagtacatcgacctgagcagtgacagtgaagatgtggtgagccccaactgcagcaacacagtgcaggagaagaccttcaacaaggacaccgtcatcatcgtgtctgagcccagtgaagatgaggagagccagggcctgcccaccatggccaggagaaatgatgacatcagcgagctggaggacctgtctgagctggaggacctgaaggatgccaagctgcagaccctgaaggagctgttcccccagaggagtgacaatgacctgctgaagctgattgagagcaccagcaccatggatggagccatcgctgctgccctgctgatgtttggagatgctgggggcggccccaggaagaggaagctgagcagcagcagcgagccctatgaagaagatgagttcaatgatgaccagagcatcaagaagacccggctggaccatggagaggagagcaatgaatctgctgagagcagcagcaactgggagaagcaggagagcatcgtgctgaagctgcagaaggagttccccaactttgacaagcaggagctgcgggaggtgctgaaggagcacgagtggatgtacacagaggccctggagagcctgaaggtgtttgctgaggaccaggacatgcagtatgtgtcccagagcgaggtgcccaacgggaaggaggtgagcagccgcagccagaactaccccaagaatgccaccaagaccaagctgaagcagaagttctccatgaaggcccagaatggcttcaacaagaagaggaagaagaatgtgttcaaccccaagagggtggtggaggacagtgaatatgacagcggcagtgatgtgggcagcagcctggatgaggactacagcagcggggaggaggtgatggaggatggctacaagggcaagatcctgcacttcctgcaggatgccagcatcggggagctgaccctcatcccccagtgcagccagaagaaggcccagaagatcacagagctgcggcccttcaacagctgggaggccctcttcaccaagatgagcaagaccaacggcctgtctgaagatctcatctggcactgcaagaccctcatccaggagagagatgtggtgatccggctgatgaacaagtgtgaggacatcagcaacaagctgaccaagcaggtgaccatgctgactggaaatggaggcggctggaacatcgagcagcccagcatcctgaaccagagcctgagcctgaagccctaccagaaggtgggcctgaactggctggccctggtgcacaagcacggcctgaatggcatcctggctgatgagatgggcctgggcaagaccatccaggccatcgccttcctggcctacctgtaccaggagggcaacaacggcccccacctgattgtggtgcctgccagcaccatcgacaactggctgcgggaggtgaacctgtggtgccccaccctgaaggtgctgtgctactacggcagccaggaggagaggaagcagatccgcttcaacatccacagccgctatgaggactacaacgtcatcgtgaccacctacaactgtgccatcagcagcagtgatgacaggagcctcttccggcggctgaagctgaactatgccatctttgatgagggccacatgctgaagaacatgggcagcatccgctaccagcacctgatgaccatcaatgccaacaaccggctgctgctgaccggcacccctgtgcagaacaacctgctggagctgatgagcctgctgaactttgtgatgccccacatgttcagcagcagcaccagcgagatccggaggatgttcagcagcaagaccaagtctgcagatgagcagagcatctatgagaaggagcgcatcgcccacgccaagcagatcatcaagcccttcatcctgcggcgggtgaaggaggaggtgctgaagcagctgccccccaagaaggaccgcatcgagctgtgtgccatgtctgagaagcaggagcagctgtacctgggcctcttcaaccggctgaagaagagcatcaacaacctggtgacagagaagaacacagagatgtgcaatgtgatgatgcagctgaggaagatggccaaccaccccctgctgcaccggcagtactacacagctgagaagctgaaggagatgagccagctgatgctgaaggagcccacccactgtgaggccaacccagacctgatctttgaggacatggaggtgatgacagactttgagctgcacgtgctgtgcaagcagtaccgccacatcaacaacttccagctggacatggacctgatcctggacagcggcaagttccgggtgctgggctgcatcctgtctgagctgaagcagaagggggacagagtggtgctcttcagccagttcaccatgatgctggacatcctggaggtgctgctgaagcaccaccagcaccgctacctgcggctggatggcaagacccagatcagcgagcgcatccacctgattgatgagttcaacacagacatggacatctttgtgttcctgctgagcaccaaggccggcggcctgggcatcaacctgaccagcgccaacgtggtgatcctgcatgacatcgactgcaacccctacaatgacaagcaggccgaggaccgctgccaccgggtgggccagaccaaggaggtgctggtgatcaagctgatcagccagggcaccatcgaggagagcatgctgaagatcaaccagcagaagctgaagctggagcaggacatgaccaccgtggatgaaggagatgagggctccatgcctgctgacatcgccaccctgctgaagacctccatgggcctgtag

SEQ ID NO: 46322 - DNA, 3087 bp, Artificial Sequence
  derived and/or modified sequence
atgaacctgttcaacctggaccggttccggttcgagaagcggaacaaaattgaggaagctccggaagcaacaccacagccgagccagcctggcccctcgagtcccatctccctgtctgctgaagaagaaaacgcagaaggcgaggtgagccgggccaacaccccagactccgatatcaccgagaagacagaggattcatcagttcccgagacgcctgacaatgagcgcaaggcctccatcagttactttaaaaatcaacgcgggattcagtacattgacttgtctagcgattccgaagacgtggtgtcaccaaactgctccaatacagtgcaggagaaaacctttaataaggataccgtgatcatagtcagcgagccttccgaggatgaagaatcccagggcttgcctactatggccagaaggaatgatgatataagcgaactcgaagatcttagcgagctcgaagatctcaaagacgccaaactccagacactgaaggaactgtttccccagcgatcagataacgatctgttaaagctaattgagagcacaagtacaatggacggagctatagctgcagctttgttgatgtttggagatgctggggggggtccgaggaagaggaagctcagctccagttccgagccttatgaggaagatgaattcaatgatgatcagtccatcaaaaaaaccaggctggaccacggagaagagtctaacgagagtgctgagagcagctcaaactgggaaaagcaggagtcgattgtgttaaagcttcagaaagagttccccaactttgacaagcaggagctgagggaggtgctgaaggagcatgagtggatgtataccgaagcgcttgaatccttgaaggtttttgcagaggaccaagatatgcagtacgtgagccagagtgaggtgcccaatggaaaagaagtgagcagccgctcacagaactatcccaaaaacgcgacaaaaactaaactcaagcagaagttcagcatgaaggcccagaatggattcaacaagaagcgaaaaaagaatgtcttcaatccgaaacgggtggtggaggactcagagtatgactcaggctccgatgtgggtagttcgttggatgaagattacagctcaggcgaggaagtcatggaagacggctacaagggcaaaatcctgcactttctgcaggacgcttcaattggggagctcacactgatcccacagtgcagccagaaaaaagcacagaagattactgagctcaggcctttcaacagctgggaggccctgtttaccaagatgtctaagacaaatgggctgagcgaggaccttatatggcactgcaaaaccctgattcaggagcgtgatgtggtgatcaggctgatgaataagtgtgaggacataagtaacaaactaaccaagcaagtcacgatgctgactgggaacggcgggggatggaacatcgaacaaccttctatcttgaaccagagtctcagcctaaagccctaccagaaagtggggctgaattggctagccctggtacataagcatggactgaacggcattctcgcagatgaaatgggactcgggaaaacaatccaggctatcgcgtttttggcttacctgtaccaggagggaaataatgggccccacctgatcgtcgtacctgcctccacaattgataactggctgcgcgaggttaacctgtggtgtccgacgctgaaggttctgtgctactacggctcccaggaagaaaggaagcagatccggttcaacatccacagcagatatgaggattacaatgtcatagtgactacatacaactgtgcgatctctagctcagatgaccgtagcttgttccggcgcttgaagttgaattacgcaatcttcgatgagggccacatgctcaagaatatgggatcaattcggtatcagcatcttatgaccataaacgcgaataaccgcctactcctgactggtactccagtgcagaacaatcttctggagttaatgtcactacttaactttgtgatgccacacatgttttcatcctcaacaagcgagatccgccgaatgttttcttctaagactaagagcgctgacgagcagagcatctacgaaaaagagcgaatcgctcacgccaaacaaatcatcaagccctttatcctgcgtagggtgaaggaggaggtcctgaaacagcttccccccaagaaggatagaattgaactgtgtgcgatgtccgagaagcaggaacaactgtatctggggctcttcaacaggctgaagaagagcatcaacaaccttgtgacggagaagaatactgagatgtgcaacgttatgatgcaactccgaaaaatggcgaatcaccctctgttacacaggcagtactacacagccgaaaaactgaaggaaatgtcacagctcatgctgaaggagcctacacactgtgaggccaatcctgatctcatttttgaggatatggaagttatgaccgactttgagcttcacgtcttatgcaaacaatatagacatattaataactttcagctcgacatggacctgatcctcgattccgggaaattcagggtgctcgggtgtatcctgagcgagctcaaacagaagggagatcgcgtagtactcttttctcagttcactatgatgttggacatattagaggttcttcttaagcaccaccagcatagatacctcaggttagacggcaagacacagatttcagagagaattcacctcatcgatgagttcaatacggacatggacattttcgtgtttctgttgtctaccaaagccggtgggctgggcatcaacctgacgtctgccaatgtggtgattcttcatgatattgactgtaatccctacaatgacaaacaggcagaggacaggtgccaccgggtgggccagacgaaagaggtgctagttataaagttgattagtcaaggaaccattgaagaatctatgctcaaaattaaccaacagaagctcaagctggagcaggacatgacaactgtggatgaaggggacgaaggtagtatgcctgcagatatagctactttgcttaaaacatccatggggctgtag

SEQ ID NO: 46323 - DNA, 3087 bp, Artificial Sequence
  derived and/or modified sequence
atgaacctgttcaacctggaccggttccggttcgagaagcggaacaaaattgaggaggccccagaagctacaccacagccaagccagcctggaccttcttcacccatttccctgagtgctgaagaggaaaacgcagaaggcgaggttagccgagcaaacacgcctgattctgacatcaccgaaaagacggaggacagctccgtcccagagacgcccgacaatgaacgtaaggcaagtatttcctacttcaaaaatcaacggggcattcaatacattgatctgtcaagtgattctgaggatgtagtgagtccaaattgcagcaatacagtgcaagagaaaactttcaacaaggacaccgtgattatcgtttcagaaccctccgaagacgaggagagccaggggttaccaactatggcacggaggaatgatgacatcagcgagctcgaagatttgtccgaactggaggatctgaaggacgctaagttgcagacactgaaggagctcttccctcaaaggtctgacaacgacttgttaaaactcattgagagtacaagcactatggatggagcgattgctgctgctctgctcatgttcggagatgccggtggaggtcctagaaagcgtaagctcagcagttcctcagagccatatgaagaggatgagttcaacgacgaccaaagtatcaaaaaaacacggttagaccatggggaagaatcaaacgaatccgctgaaagcagctcaaattgggagaaacaggagagcatcgtgttaaaactgcagaaggaatttccaaatttcgataaacaggagctgagggaggtgctcaaagagcacgaatggatgtacacggaagccctcgaaagtcttaaagtatttgccgaagaccaggacatgcagtatgtgagccagtctgaggtgccgaatgggaaagaggtttcatcaagatcccagaactaccctaagaatgccaccaagacaaagctgaagcagaagttcagcatgaaggctcaaaacgggttcaataaaaagagaaagaaaaacgtgttcaatcccaaacgggtagtcgaggattctgagtacgactcagggtctgacgtgggttctagcctcgacgaggactattccagtggtgaggaggtgatggaggatggatataaaggcaagattctgcatttcctgcaggacgctagcatcggagaactcactttgattcctcaatgctctcagaagaaggctcagaaaattacagaactgagaccatttaatagctgggaggcgttattcacaaaaatgagcaaaactaacgggctgtctgaagacctgatctggcactgcaagactctcattcaggagcgcgatgtagtaatcaggctcatgaacaaatgtgaagacattagcaacaagttaacaaagcaggtgaccatgctgactggaaatggtggagggtggaacattgagcagccctccattcttaaccagtccctgagcctgaaaccatatcagaaagtgggtctgaactggttggccctggtgcataagcatggcctgaacgggattctggcagacgagatggggctagggaaaacaattcaagcaatcgcctttttagcgtatttataccaagagggcaacaatggaccgcatttaatcgtagtgccagcctcaaccatcgataattggctgagagaggtgaacctttggtgccctactctcaaggtgctgtgttattacggatcccaggaagaacggaagcagatcagatttaacatccactcccggtatgaagattacaacgtcatcgtgacaacctacaactgtgctatctcctcatccgatgaccggagcctatttaggagactgaaacttaattacgcgatcttcgacgaaggccatatgctgaaaaacatggggtcaattcgataccagcacctcatgaccattaacgccaataataggctgctactaacagggacaccagtacagaacaacctccttgagctcatgtctcttctgaattttgtcatgccacacatgttcagcagctcaacatccgagattcggcgcatgtttagtagtaaaaccaagtccgctgacgaacagagcatctacgagaaagaacggatagcccatgccaaacaaattattaagcctttcatcctccggagggtgaaggaggaggtcctgaagcaactgccacctaagaaggaccgtatcgaactctgtgccatgtcagagaaacaggagcaactttacttgggcctgttcaatagactgaaaaaatctatcaacaacctcgtcacagaaaagaataccgagatgtgtaacgttatgatgcagctccgtaaaatggcaaaccatcccctccttcaccgtcaatactataccgcagagaagctaaaggaaatgtctcaattaatgctgaaagagccaacacactgtgaggctaaccctgatctaattttcgaggacatggaagtgatgactgatttcgaattacacgtgctctgcaagcagtaccgccacataaacaatttccagcttgatatggatctaattctggactccgggaagttccgtgtgctcggctgcatattgtctgaactgaaacagaagggcgaccgtgtggttctcttttcccaattcaccatgatgctagacatcctcgaggtgctcctaaagcaccaccagcacagatacctgaggcttgacggtaagacccaaatctccgaaagaatccatttgattgacgagtttaatactgacatggacattttcgtgtttttgctgtcgaccaaggcgggtggtctgggcattaacctcacctccgctaatgtggtaattttacatgatattgactgtaacccgtacaacgacaaacaggccgaggaccggtgtcatagggtgggccaaacgaaagaggtcctggtcatcaagctgatatcccagggaactattgaagaatcaatgcttaaaatcaaccagcagaagcttaagctggaacaggacatgacaaccgtggacgagggagatgaaggctctatgcccgcagatattgccactctgctgaagacctctatggggctctag

SEQ ID NO: 46324 - DNA, 3087 bp, Artificial Sequence
  derived and/or modified sequence
atgaacctcttcaaccttgacaggttcagattcgagaaaagaaacaagatcgaagaagccccagaagcaactccccaaccgtcccaaccaggccctagcagtcctatctccctcagcgccgaggaggaaaacgccgagggcgaagtatcacgagcgaatactcccgactcagacataacggagaaaacagaggactccagcgttccggagacaccggataacgagcgtaaggcctctatttcatatttcaagaatcagcgcggtatccagtacattgacttatctagtgacagcgaggatgtggtatctcccaactgttcaaataccgttcaggaaaaaactttcaacaaagacacggtgattatcgtctcagaaccatcagaggatgaggaatcacaggggttacccaccatggccaggcggaacgacgacatatcagagcttgaggacctctccgaacttgaggacctgaaagacgccaaactgcaaacgctcaaggagttattcccacagagatcagacaatgatttgctgaagctgatagaatctacatccaccatggatggggcaatcgcggcagccctgcttatgttcggcgatgcgggagggggtcctcgaaagcggaagttgtctagttcatcagagccctatgaggaggatgagtttaacgatgaccagagtattaagaaaacaaggctggatcatggtgaggaatcaaatgagtctgctgagtcctcatccaattgggagaaacaggaatccattgtactgaagctgcagaaagagttccccaactttgataaacaggagctgcgcgaagtgctcaaagaacacgaatggatgtacacagaggcgcttgaaagtctcaaggtattcgccgaggaccaggatatgcagtatgtctctcagagcgaggtaccaaacgggaaagaggtttctagccggtctcagaattacccaaagaatgctaccaagacaaagctaaagcagaagttctctatgaaggcccaaaacgggtttaataaaaaacggaaaaaaaacgttttcaatccgaagagagtggtcgaggacagcgagtacgactctggtagcgatgtaggctctagcctcgacgaggactacagcagcggcgaagaagtgatggaggacgggtataaaggtaaaatccttcacttcctgcaggatgctagcattggggagctcacattaatcccccaatgcagtcagaaaaaagctcagaaaattaccgaactgagaccgttcaattcatgggaggctctttttactaagatgtcaaagaccaatggcctgtcagaagatctcatttggcactgcaagaccctgattcaggagcgagacgtggtcatccgtctcatgaacaaatgcgaggacatatcaaacaaacttaccaagcaagtaaccatgctcacaggtaacggagggggatggaatatcgagcaaccatccatcctgaaccagtcgctttccttaaaaccttatcagaaggtgggcttaaactggctcgcgctggtgcacaagcatgggctgaatggcattctcgctgacgagatgggcctcggcaagaccattcaggccatcgcctttttagcctatctgtaccaggaagggaacaacgggccacatttaattgttgtgcccgcatcgacaatcgataattggctgcgggaggtgaatctatggtgcccaacattgaaggtcttgtgctactacggatctcaggaggaacggaaacagatacggttcaatatccattcacgctacgaggattacaacgtgattgtgaccacctacaactgcgccatctcctcatccgacgacagatctctattccgtagactgaaattgaattacgcaatcttcgacgagggccacatgctgaagaatatgggttcaatccggtatcagcacctgatgactatcaacgctaataatcgtcttttgctcactggcaccccagtgcagaataacctgttggaattgatgtccttgctgaacttcgtgatgccgcacatgttctcaagcagtacatccgaaattaggcgcatgttttcgtcaaagacgaaaagtgcagacgagcagagtatttacgagaaagagaggatcgctcacgcaaaacagattataaagccgtttatcctgcgccgtgtcaaggaggaggtgctcaagcagctgcccccaaaaaaagatcggatcgaattgtgtgccatgagcgagaagcaggaacaactctaccttgggttgtttaatcgcctgaagaaaagtatcaataacctcgtcactgagaagaacaccgagatgtgtaacgtgatgatgcaactgcgcaagatggcaaaccaccccttactgcacagacaatactacacggcggaaaaactgaaggagatgtcccaattgatgttaaaggagcccacacattgcgaggccaaccctgatctgatatttgaagatatggaggtgatgactgactttgaactccatgttctttgcaagcaataccggcacattaataactttcagctggacatggatctgatcctcgattcaggcaaatttagggtcctgggttgtatcctgagtgaactgaaacaaaaaggggatcgagtggtgttgttctcccagtttactatgatgttggacatcttggaggtgctactaaagcaccatcagcacagatacctccgcttggacggcaaaacccaaataagcgagaggatacacctgatcgatgaattcaataccgatatggacatctttgtattccttctgtctactaaggcaggcggacttggaatcaatcttacgagcgccaacgtggtcatcttacacgatatcgactgtaacccttacaacgataagcaggccgaggaccgatgccaccgggtgggtcaaactaaggaggtgctggtaatcaaattgatcagccagggaacgatcgaagaatccatgctgaaaatcaatcagcaaaaattgaaactcgagcaggacatgacaaccgtggatgagggtgatgagggctcaatgcctgcggacattgctactttgctgaaaacatcaatgggtctgtag

SEQ ID NO: 46325 - DNA, 3087 bp, Artificial Sequence
  derived and/or modified sequence
atgaatttgtttaatttggacagatttcggttcgaaaaacgaaacaagattgaagaggcaccagaagcgacaccacagcccagccaacctggaccctcctcaccgatcagcctaagcgctgaggaagagaacgctgagggggaggtgagtagagcaaataccccagacagcgatataacagagaagaccgaggattcctctgttcctgagaccccagataatgagagaaaggccagcattagttattttaagaaccagcggggaatacagtacattgatctgtccagtgacagcgaggacgtggtgtcaccaaattgttcaaatacagttcaggagaagacttttaacaaagatacagtcatcatcgtcagcgagccgagcgaggatgaagaaagccaggggctgccaacaatggcaagaaggaatgatgacatcagtgagctcgaggatttgtcagagttggaagacctgaaggacgccaagcttcagacacttaaagaacttttcccacaaagaagcgataacgacctcctcaagttgatcgagtctacatcaacaatggacggggctatcgccgcagccttactaatgttcggggatgctggcggaggccctcgaaagcgcaaactgagctctagctcagaaccgtatgaagaagatgagtttaatgacgatcaatcaatcaaaaagacccgtcttgaccacggagaagagtccaacgagtccgctgaaagctcaagcaactgggaaaagcaagaatccatagtgctgaagctccagaaagagtttcccaacttcgataagcaagagctacgagaggtactgaaagagcacgagtggatgtacaccgaagcccttgaaagccttaaagtcttcgcagaagaccaagacatgcagtacgtatcccagtcagaggtgcccaatggaaaagaggtgtcgtctaggtcccagaactatcccaagaacgctactaagaccaagctgaaacaaaaatttagtatgaaggcccagaatggttttaataaaaaacggaaaaaaaatgtcttcaaccccaagcgtgtggtcgaagattcggaatatgacagtgggagtgatgtaggaagcagtctggacgaggattacagcagcggggaagaggtgatggaagatggctacaaagggaagatcctgcatttccttcaggacgcgtctattggagagttgacccttatccctcagtgttctcagaagaaggctcagaagattaccgagttgcgtccatttaattcatgggaagcactgtttacaaaaatgtctaaaactaatgggttatcagaggacttgatatggcactgcaagaccttgatccaagaaagagacgttgtgattagactgatgaacaagtgtgaagacatttccaataaattgacgaagcaggtgaccatgttaactgggaatggcggagggtggaatatcgagcagccatcgatcctcaatcagagcctgagcctgaagccgtaccagaaggttgggctaaactggcttgctttggttcataagcacggacttaatggaattctcgctgacgagatggggctcgggaagaccatccaggcgatagccttcctcgcctatctatatcaggagggaaacaacggcccacacttgatcgtagtccccgctagtacgattgacaactggctccgtgaagtgaatttgtggtgtcctacattgaaggttctctgttattacggtagtcaggaggagaggaaacaaataagattcaacatccactctcggtacgaagattacaacgtgatcgtgaccacttataactgtgcgatctccagtagcgacgaccggagcctgtttagaagactcaaactcaattatgcaattttcgacgaaggtcacatgctgaaaaacatgggatccattcgctaccagcacctgatgaccataaacgctaacaatcggctcctgctgactggaacacccgtgcagaataacctcttggagcttatgagcctcctgaacttcgtgatgcctcatatgttcagcagttcaacatccgagatacgccgaatgttcagctctaaaaccaaatccgccgatgagcagtccatctatgaaaaagagagaattgctcacgccaaacagatcattaaaccatttattttgcggcgtgtgaaggaggaagttctgaagcagctgccgccaaagaaggataggatcgaactgtgtgccatgtctgaaaagcaggaacaattatacctgggcctctttaaccgcctgaagaaatccatcaataatctggtgactgagaaaaacacagaaatgtgtaacgtcatgatgcagctgagaaaaatggctaatcaccctctgcttcacaggcaatattataccgccgagaaattaaaggagatgtcgcagctcatgctgaaggaaccgactcactgtgaggcaaaccccgacttaatttttgaggatatggaagtgatgactgatttcgagctccatgtgctgtgcaagcagtataggcacataaacaacttccagctggacatggacctcattctggactccggcaagtttagagtgctgggttgtattctctccgagttaaagcagaagggtgacagagtggtgctttttagccagttcaccatgatgctcgatatcctcgaggttctacttaaacaccaccaacacagatatctgcggctcgatggcaaaacgcagatttccgagagaatccatctgattgatgaattcaatacggatatggacatattcgtgttcctgttgagtaccaaggcagggggattgggtattaacttgaccagtgccaacgtggtcatcctgcacgatatcgactgcaacccatacaacgacaagcaggccgaagatcgctgtcacagggtgggccagaccaaggaagtgttggtaatcaagctcatcagtcagggaaccatcgaggaatccatgctgaaaataaaccagcaaaagttgaagctcgaacaggatatgacaacggtggacgagggagatgaggggtcaatgcctgccgacattgccactttactcaagacctccatgggcttatag

SEQ ID NO: 46326 - DNA, 5017 bp, Artificial Sequence
  derived and/or modified sequence
attacgcgctcttaaggtttctccgtggtgttttggaaggtcccggcacggctaccgtcgccccacgctaggaaattttttttttattttcaacctttgttacatagcactgaggctacaagatcatagttcatttaaagcccccatccctgcaaggtggtgctttctaccaatatgaatcttttcaacctggaccgttttcgctttgagaaaaggaataagattgaggaagcgcccgaagcaacccctcaaccttcccagcctggcccttcttcaccaatttctcttagtgctgaagaggagaatgctgaaggggaagttagcagggcaaacactcctgattcagatataactgaaaaaacagaagattctagtgttccagaaactccagataatgaaagaaaagcaagtatatcatatttcaaaaatcaaagaggaatacagtatattgatttgtcttctgatagtgaagatgtcgtttccccaaattgctccaatacagttcaagagaaaacattcaacaaagatacagtgattatagtttctgagccatctgaagatgaagagtcccaaggccttcctaccatggcacgtagaaatgatgatatttcagaactggaagacctttcggaattggaagaccttaaagatgctaaacttcagactttgaaggaactttttccacaaagaagtgacaatgatttacttaagttgattgaatcaacaagcactatggatggagcaattgctgctgccttgctgatgtttggtgatgcaggtggtgggcccaggaaaagaaaattatcttcttcttcagagccatatgaggaagatgaatttaatgatgatcaatctataaaaaagacaagactggatcatggagaggaatcaaatgagtctgcagaatctagcagtaattgggaaaagcaggaaagtattgtactgaaattgcaaaaggaatttcccaattttgataaacaggaacttagagaagtactcaaggaacatgaatggatgtacacagaagctttagaatctctaaaagtgtttgcagaagaccaagatatgcaatatgtatcacaaagtgaggttccaaatggaaaagaagtttcttcaagaagtcaaaattaccctaaaaatgcaactaaaacaaaactaaaacagaaattttcaatgaaagcacaaaatggctttaacaagaaacgtaaaaaaaatgtttttaatccaaagagagttgttgaagactctgaatatgattcaggttctgatgtcggtagttcactagatgaggactatagtagtggtgaagaagtgatggaggatggctataaaggtaaaattcttcacttccttcaagatgcttcaattggtgaacttactttgattcctcagtgttctcagaaaaaggctcagaagataacagaactccggccctttaatagttgggaggctctgttcacaaagatgtccaaaactaatggcttatcagaagatttgatatggcactgtaaaacactgatccaagaaagagatgtagttataaggcttatgaacaaatgtgaagacatttcaaataaattgaccaaacaagttaccatgcttactggaaatggaggtggatggaacatagaacaaccttccattctaaaccaaagtttgtcactcaagccctatcagaaggttggtttgaattggctggcattggtacataaacatggacttaatggcattttggcagatgaaatgggcctaggaaaaactattcaagccattgcatttctggcatacctctatcaggagggtaataatggtcctcatttgatcgttgttccagcttcaactatagataactggttaagggaagttaatttatggtgccctactttgaaggtcctctgttactatggttctcaagaagaacgtaaacaaattagatttaacattcatagtagatatgaagattacaatgtaattgtgaccacatataactgtgcgatcagcagttctgatgaccgtagtctgtttcgacggctgaaacttaattacgcaatttttgatgagggccatatgctgaagaatatgggctccattcgctaccagcaccttatgacaattaatgcaaataaccgtttgctgctcacaggcacacctgtacagaacaatctgttagaactcatgtcgctgttgaattttgttatgccacacatgtttagtagtagcaccagtgaaatacgaagaatgttttcctctaagacaaaatcagcagatgagcaaagcatatatgaaaaggagagaatagcacatgcaaaacaaattataaagccatttattctcagaagagtaaaagaagaggttctcaagcagttaccccccaagaaagatcgaattgagttgtgtgcaatgtcggagaagcaggagcaactctatttgggtcttttcaacagattgaaaaaatctatcaataacttggtcacagaaaaaaacacagaaatgtgcaatgtcatgatgcagttgaggaaaatggccaatcatcctttattacatcgccaatattacacagctgaaaaactcaaggaaatgtctcagcttatgctaaaggaacctacacattgtgaggctaaccctgacctgatctttgaagatatggaagttatgacagacttcgaactacatgtactttgtaaacagtaccgacacattaataactttcagttagacatggacttgattttagattctggaaaatttcgagttttaggatgcatcttgtctgaattgaaacagaagggtgatagagttgtgttatttagccaatttaccatgatgctggatatcttagaggttctattaaaacatcatcagcataggtacctcagattagatggaaagactcagatttctgaaaggattcatctaattgatgagtttaataccgatatggatatctttgtgtttctgctatcaacaaaagctggtggattaggaataaatctgacttcagcaaatgttgttatacttcacgatattgactgtaatccttataatgacaaacaagcagaagatagatgccatagagtaggccagactaaagaagtactagttataaaactaataagccaagggacgattgaagaatccatgctaaaaattaaccaacagaaattgaaactagaacaggatatgactacagtagatgaaggtgatgaagggagtatgccagcagatatagccacattactaaaaacatcaatgggcctgtgaaataagaactgtgaactctcaattgatgaggaaatatcaacttggtgcactcaaggacatttacattatgatgaccatggggtttatgaacatttataactttttataatttccatattacatttctcatagtatggacaactttttgccactaactgaattctccaaatactcacacgtgaaatttcaaaaaagaagccacaaatatgtagttctgaagatgttgaataatcattttacaaagcagttttctgaatggggattagttggtgattgtttgtaacaaatatgctaatgctttagaaatgtcagtatttttgtaattatttctacctccaaatatatatatattgtctttcactggataatgtgtgtagatttttacatgtgccttatttgacaatgcttatgtcttgtttttgcttgtctcatttgaagttcttttttattatgttaaagaatgcagctgtatagattatatagctttcattttattgctatttgaagcagatgttcaccaatgtcagcaagaactcaacctgaatttaaaggtggcattccatatactaacatcccccaggtcctctcaagtacttctgctgaaacaaatttatttggctaggcactaagttgttttccagtgaatagtaactaaagaagcccctaccttgctccatggattaattccttctgttcattttccaactgcactaattgtgcatattactctgcctaatcttgtgcatgttttcattgatttccctctcccggcttttgcttctcttgaaactgttgcccagtcacttctgctccaattctcttcctctctaaatagtagtttattactgccacatctccatgcatcagcaaaatgttggtgacatttttctagcctggcagaacagattacttaaagctatttcatttcaaagcagactgaatgtgacttcatctaaaggcagcattaggtactgcatggaaataggtcattaacttgaaactcttatcaaaatatattttaccagtttccagaatttccagtacaggaccgcctgaagagagagccattgttcaattccaattcagtgtgagtgacaaagtgaaatttagaagtgaagttgtctatttgatatttaactctttattaaatctttctttaaatttctgcctgtcagtctatattgctgtttttattatacatcagtttctttgtataacttgtgagttccatgtgttttgtttttattatgtaaatatcattataaataaacttatttataaatcaaagatttgttaatttttggaaatcatgcttttcaaagcatcctaacttgctaagatgctaggtagtacgaccctctggatttggaaggcaaataaaactcttacagtgattatttagatattaaagactgagaactcacggcttaaccccagtcttgatggtatattgaacagactgaatatattttaccattacagggctaaaaggagtcttcatgtgttaatactacctccttgtacatcactatacccaaatcagttattcaaattgttaggaattttaccttttaaaatctcataatggatatctcatgttttctgtattaatgtattttcaatgataggctgtttctttttttgttgttattgttgttgttgttatatccatacttttatctctaatgaaatgtagttgggttcttcctgtaatgcgctattatgtcttgggcttaataaaaatatttgtgatcat

SEQ ID NO: 46327 - DNA, 4649 bp, Artificial Sequence
  derived and/or modified sequence
ctctcagctgggatcgcgccgcgtcaacttccgggcggatgcccgccagcacggcctccgccgctccccttctttggcccctttgtgtccccgcagtgtcgaggcgcgggccctggcaggtcctttctcgaggcagggggcacggtagcacagggagcttctctttgtgggcgggcgcgaggcccgctagggggttatactggggaacgtgcctgcgcgtgcttggatagttcatttaaagcccccatccctgcaaggtggtgctttctaccaatatgaatcttttcaacctggaccgttttcgctttgagaaaaggaataagattgaggaagcgcccgaagcaacccctcaaccttcccagcctggcccttcttcaccaatttctcttagtgctgaagaggagaatgctgaaggggaagttagcagggcaaacactcctgattcagatataactgaaaaaacagaagattctagtgttccagaaactccagataatgaaagaaaagcaagtatatcatatttcaaaaatcaaagaggaatacagtatattgatttgtcttctgatagtgaagatgtcgtttccccaaattgctccaatacagttcaagagaaaacattcaacaaagatacagtgattatagtttctgagccatctgaagatgaagagtcccaaggccttcctaccatggcacgtagaaatgatgatatttcagaactggaagacctttcggaattggaagaccttaaagatgctaaacttcagactttgaaggaactttttccacaaagaagtgacaatgatttacttaagttgattgaatcaacaagcactatggatggagcaattgctgctgccttgctgatgtttggtgatgcaggtggtgggcccaggaaaagaaaattatcttcttcttcagagccatatgaggaagatgaatttaatgatgatcaatctataaaaaagacaagactggatcatggagaggaatcaaatgagtctgcagaatctagcagtaattgggaaaagcaggaaagtattgtactgaaattgcaaaaggaatttcccaattttgataaacaggaacttagagaagtactcaaggaacatgaatggatgtacacagaagctttagaatctctaaaagtgtttgcagaagaccaagatatgcaatatgtatcacaaagtgaggttccaaatggaaaagaagtttcttcaagaagtcaaaattaccctaaaaatgcaactaaaacaaaactaaaacagaaattttcaatgaaagcacaaaatggctttaacaagaaacgtaaaaaaaatgtttttaatccaaagagagttgttgaagactctgaatatgattcaggttctgatgtcggtagttcactagatgaggactatagtagtggtgaagaagtgatggaggatggctataaaggtaaaattcttcacttccttcaagatgcttcaattggtgaacttactttgattcctcagtgttctcagaaaaaggctcagaagataacagaactccggccctttaatagttgggaggctctgttcacaaagatgtccaaaactaatggcttatcagaagatttgatatggcactgtaaaacactgatccaagaaagagatgtagttataaggcttatgaacaaatgtgaagacatttcaaataaattgaccaaacaagttaccatgcttactggaaatggaggtggatggaacatagaacaaccttccattctaaaccaaagtttgtcactcaagccctatcagaaggttggtttgaattggctggcattggtacataaacatggacttaatggcattttggcagatgaaatgggcctaggaaaaactattcaagccattgcatttctggcatacctctatcaggagggtaataatggtcctcatttgatcgttgttccagcttcaactatagataactggttaagggaagttaatttatggtgccctactttgaaggtcctctgttactatggttctcaagaagaacgtaaacaaattagatttaacattcatagtagatatgaagattacaatgtaattgtgaccacatataactgtgcgatcagcagttctgatgaccgtagtctgtttcgacggctgaaacttaattacgcaatttttgatgagggccatatgctgaagaatatgggctccattcgctaccagcaccttatgacaattaatgcaaataaccgtttgctgctcacaggcacacctgtacagaacaatctgttagaactcatgtcgctgttgaattttgttatgccacacatgtttagtagtagcaccagtgaaatacgaagaatgttttcctctaagacaaaatcagcagatgagcaaagcatatatgaaaaggagagaatagcacatgcaaaacaaattataaagccatttattctcagaagagtaaaagaagaggttctcaagcagttaccccccaagaaagatcgaattgagttgtgtgcaatgtcggagaagcaggagcaactctatttgggtcttttcaacagattgaaaaaatctatcaataacttggtcacagaaaaaaacacagaaatgtgcaatgtcatgatgcagttgaggaaaatggccaatcatcctttattacatcgccaatattacacagctgaaaaactcaaggaaatgtctcagcttatgctaaaggaacctacacattgtgaggctaaccctgacctgatctttgaagatatggaagttatgacagacttcgaactacatgtactttgtaaacagtaccgacacattaataactttcagttagacatggacttgattttagattctggaaaatttcgagttttaggatgcatcttgtctgaattgaaacagaagggtgatagagttgtgttatttagccaatttaccatgatgctggatatcttagaggttctattaaaacatcatcagcataggtacctcagattagatggaaagactcagatttctgaaaggattcatctaattgatgagtttaataccgatatggatatctttgtgtttctgctatcaacaaaagctggtggattaggaataaatctgacttcagcaaatgttgttatacttcacgatattgactgtaatccttataatgacaaacaagcagaagatagatgccatagagtaggccagactaaagaagtactagttataaaactaataagccaagggacgattgaagaatccatgctaaaaattaaccaacagaaattgaaactagaacaggatatgactacagtagatgaaggtgatgaagggagtatgccagcagatatagccacattactaaaaacatcaatgggcctgtgaaataagaactgtgaactctcaattgatgaggaaatatcaacttggtgcactcaaggacatttacattatgatgaccatggggtttatgaacatttataactttttataatttccatattacatttctcatagtatggacaactttttgccactaactgaattctccaaatactcacacgtgaaatttcaaaaaagaagccacaaatatgtagttctgaagatgttgaataatcattttacaaagcagttttctgaatggggattagttggtgattgtttgtaacaaatatgctaatgctttagaaatgtcagtatttttgtaattatttctacctccaaatatatatatattgtctttcactggataatgtgtgtagatttttacatgtgccttatttgacaatgcttatgtcttgtttttgcttgtctcatttgaagttcttttttattatgttaaagaatgcagctgtatagattatatagctttcattttattgctatttgaagcagatgttcaccaatgtcagcaagaactcaacctgaatttaaaggtggcattccatatactaacatcccccaggtcctctcaagtacttctgctgaaacaaatttatttggctaggcactaagttgttttccagtgaatagtaactaaagaagcccctaccttgctccatggattaattccttctgttcattttccaactgcactaattgtgcatattactctgcctaatcttgtgcatgttttcattgatttccctctcccggcttttgcttctcttgaaactgttgcccagtcacttctgctccaattctcttcctctctaaatagtagtttattactgccacatctccatgcatcagcaaaatgttggtgacatttttctagcctggcagaacagattacttaaagctatttcatttcaaagcagactgaatgtgacttcatctaaaggcagcattaggtactgcatggaaataggtcattaacttgaaactcttatcaaaatatattttaccagtttccagaatttccagtacaggaccgcctgaagagagagccattgttcaattccaattcagtgtgagtgacaaagtgaaatttagaagtgaagttgtctatttgatatttaactctttattaaatctttctttaaatttctgcctgtcagtctatattgctgtttttattatacatcagtttctttgtataacttgtgagttccatgtgttttgtttttattatgtaaatatcattataaataaacttatttataaatcaaa

SEQ ID NO: 46328 - DNA, 1479 bp, Artificial Sequence
  derived and/or modified sequence
atgaagctgctgctgctgcaccccgccttccagagctgcctgctgctgaccctgctgggcctgtggagaaccacccccgaggcccacgccagcagcctgggcgcccccgccatcagcgccgccagcttcctgcaggacctgatccacagatacggcgagggcgacagcctgaccctgcagcagctgaaggccctgctgaaccacctggacgtgggcgtgggcagaggcaacgtgacccagcacgtgcagggccacagaaacctgagcacctgcttcagcagcggcgacctgttcaccgcccacaacttcagcgagcagagcagaatcggcagcagcgagctgcaggagttctgccccaccatcctgcagcagctggacagcagagcctgcaccagcgagaaccaggagaacgaggagaacgagcagaccgaggagggcagacccagcgccgtggaggtgtggggctacggcctgctgtgcgtgaccgtgatcagcctgtgcagcctgctgggcgccagcgtggtgcccttcatgaagaagaccttctacaagagactgctgctgtacttcatcgccctggccatcggcaccctgtacagcaacgccctgttccagctgatccccgaggccttcggcttcaaccccctggaggactactacgtgagcaagagcgccgtggtgttcggcggcttctacctgttcttcttcaccgagaagatcctgaagatcctgctgaagcagaagaacgagcaccaccacggccacagccactacgccagcgagagcctgcccagcaagaaggaccaggaggagggcgtgatggagaagctgcagaacggcgacctggaccacatgatcccccagcactgcagcagcgagctggacggcaaggcccccatggtggacgagaaggtgatcgtgggcagcctgagcgtgcaggacctgcaggccagccagagcgcctgctactggctgaagggcgtgagatacagcgacatcggcaccctggcctggatgatcaccctgagcgacggcctgcacaacttcatcgacggcctggccatcggcgccagcttcaccgtgagcgtgttccagggcatcagcaccagcgtggccatcctgtgcgaggagttcccccacgagctgggcgacttcgtgatcctgctgaacgccggcatgagcatccagcaggccctgttcttcaacttcctgagcgcctgctgctgctacctgggcctggccttcggcatcctggccggcagccacttcagcgccaactggatcttcgccctggccggcggcatgttcctgtacatcagcctggccgacatgttccccgagatgaacgaggtgtgccaggaggacgagagaaagggcagcatcctgatccccttcatcatccagaacctgggcctgctgaccggcttcaccatcatggtggtgctgaccatgtacagcggccagatccagatcggctag

SEQ ID NO: 46329 - DNA, 1479 bp, Artificial Sequence
  derived and/or modified sequence
atgaagcttctgctcctgcatcctgcatttcagagttgtttactgctgacactacttgggttgtggaggacgacacctgaagcacacgcctcaagcctgggcgctcccgccatttctgccgcatcatttctacaggacctgatacacaggtatggcgaaggggattcacttactttgcaacaattgaaagctctgctgaatcacctggacgtcggggtcggaagaggtaacgtgactcaacacgtgcagggccacaggaatctgtctacgtgtttctcatctggagacctttttaccgcccacaacttcagcgagcagtcacgcattgggtctagcgagttacaagagttttgtcccactatactacagcagttagattccagggcctgcacttctgaaaaccaagagaatgaggagaacgaacagacagaggaggggcggcccagcgctgtcgaagtatgggggtacggcctgctctgcgtgaccgtaatcagtttatgttccctgctgggcgcctcagtcgtgccctttatgaagaagaccttttacaagagactattgctgtactttatcgctctcgccatagggacattgtactctaacgcattgtttcagttgatacccgaggcctttgggtttaaccctctggaagactattacgttagtaaatctgccgtggtctttgggggcttttacctcttcttcttcaccgaaaaaatcctgaagatcctgctaaaacagaaaaatgaacatcatcacgggcatagccactatgcatccgagtcactgccatctaagaaagaccaagaggagggagtgatggagaaacttcagaacggagaccttgaccacatgatcccgcagcattgcagcagtgaattggatggcaaagctcccatggtcgacgaaaaggtgattgtcggctccctaagcgtccaggatcttcaggccagccaatcagcttgctattggttgaaaggagttcggtattcagatatcgggaccttggcctggatgatcacactctcagatggactgcataatttcatcgatggcctcgctataggggcatcctttaccgtgagtgtttttcaggggatcagtacatccgtggcaattctgtgtgaggagtttcctcatgaactcggcgatttcgtgatactgcttaacgcgggaatgagtatccagcaggcactgttcttcaacttcctttctgcctgttgttgctatctgggtctcgcttttggaatcctggcgggatcccacttcagcgcaaattggatctttgcccttgctggaggcatgtttctctatatatctctggcagatatgtttccggaaatgaacgaggtgtgtcaagaagacgagaggaaagggtctatcctgatcccctttattattcaaaatctggggctactgacagggtttactattatggttgtgctgacgatgtacagtgggcagatacaaatcggttag

SEQ ID NO: 46330 - DNA, 1479 bp, Artificial Sequence
  derived and/or modified sequence
atgaaactgttattacttcaccctgcctttcagagctgcttgttgctgacgctcctaggcttatggagaaccacccctgaagcacatgctagtagtctaggcgcccccgcaatctccgccgctagcttcctgcaggatttgatacaccgctacggtgaaggagacagtctgactctgcagcagctcaaagctctcctgaatcatctggacgtgggtgtcggacggggtaatgtgacccagcatgtgcagggacatcggaacctgagtacttgctttagcagtggcgacttgtttacagcccacaatttttctgagcagtcccgcatcgggtcctcagaactgcaggagttctgtcctaccatcctacagcagctggattccagagcgtgcacatcagagaatcaggagaacgaagaaaacgagcagacggaagaggggcgtccgtcggccgtagaggtttggggctacggactgctgtgcgtgaccgtgatctctctgtgttccttgctaggtgcatcagtggttccctttatgaaaaaaactttttacaagagattgcttctgtattttattgccctggccatcgggaccctgtatagtaacgcgctgtttcagctgatccccgaagctttcggtttcaaccctctggaggactactatgtttctaagtcggccgttgtgttcggaggattctacctgttcttctttaccgaaaagattctgaagatacttctaaaacaaaaaaatgaacatcaccacgggcactcgcattatgcatcagagagtctgccctcaaagaaagatcaagaagagggtgtgatggagaaactgcagaatggagatctggatcacatgatcccccaacactgtagctccgaactcgacggcaaagccccaatggtcgatgagaaggtcatcgttgggtccctaagcgtgcaggacctccaagcttcccaatccgcatgttactggttgaaaggcgtgaggtatagcgacatcgggacacttgcctggatgataactctgagtgatggactccataatttcatcgatgggcttgcaattggagcgagctttacagtatccgtcttccagggaatctcaacatcggtggcgatcttgtgtgaagagttcccacacgaactcggggattttgtgatccttctcaacgccggaatgtctatccagcaagccttattttttaacttcttgagcgcatgttgctgttatctgggattggctttcggaatcctggccggctcccatttttcagccaactggattttcgccctcgcgggcggtatgttcctgtatataagcctagccgatatgtttccagaaatgaatgaggtatgccaggaagatgaacgcaagggttcaatcttgataccattcattatccaaaaccttggactcttaaccgggtttacaattatggttgttttaactatgtactcaggccagatccagatcggatag

SEQ ID NO: 46331 - DNA, 1479 bp, Artificial Sequence
  derived and/or modified sequence
atgaagctgctgctgctgcacccagccttccagagctgcctgctgctgaccctgctgggcctgtggaggaccaccccagaggcccacgccagcagcctgggcgccccagccatctctgctgccagcttcctgcaggacctgatccacagatatggagagggggacagcctgaccctgcagcagctgaaggccctgctgaaccacctggatgtgggcgtgggcagaggaaatgtgacccagcacgtgcagggccacaggaacctgagcacctgcttcagcagcggggacctcttcaccgcccacaacttcagcgagcagagcagaattggcagcagcgagctgcaggagttctgccccaccatcctgcagcagctggacagccgggcctgcaccagcgagaaccaggagaatgaagaaaatgagcagacagaggagggccggcccagcgctgtggaggtgtggggctacggcctgctgtgtgtgaccgtcatcagcctgtgcagcctgctgggcgcctctgtggtgcccttcatgaagaagaccttctacaagaggctgctgctgtacttcatcgccctggccatcggcaccctgtacagcaatgccctcttccagctgatccctgaggccttcggcttcaaccccctggaggactactacgtgtccaagtctgctgtggtgtttggaggcttctacctgttcttcttcacagagaagatcctgaagatcctgctgaagcagaagaatgagcaccaccacggccacagccactacgccagcgagagcctgcccagcaagaaggaccaggaggagggcgtgatggagaagctgcagaatggagacctggaccacatgatcccccagcactgcagcagcgagctggatggcaaggcccccatggtggatgagaaggtgattgtgggcagcctgtctgtgcaggacctgcaggccagccagagcgcctgctactggctgaagggcgtgcgctacagcgacatcggcaccctggcctggatgatcaccctgagtgatggcctgcacaacttcattgatggcctggccatcggggccagcttcaccgtgtctgtgttccagggcatcagcacctctgtggccatcctgtgtgaggagttcccccatgagctgggggactttgtgatcctgctgaatgccggcatgagcatccagcaggccctcttcttcaacttcctgagcgcctgctgctgctacctgggcctggccttcggcatcctggccggcagccacttcagcgccaactggatctttgccctggccggcggcatgttcctgtacatcagcctggccgacatgtttcctgagatgaatgaggtgtgccaggaggatgagaggaagggcagcatcctgatccccttcatcatccagaacctgggcctgctgaccggcttcaccatcatggtggtgctgaccatgtacagcggccagatccagattggatag

SEQ ID NO: 46332 - DNA, 1479 bp, Artificial Sequence
  derived and/or modified sequence
atgaagctgctgctgctgcaccccgccttccagagctgcctgctgttgacgctcctgggcttatggagaactacccctgaggcccacgcttcttcgctgggggcccctgccattagcgccgcatcattcctgcaggacctgatacacaggtacggagagggagattctttgactcttcaacagctgaaagcactactcaaccatttggacgtgggagtcggtcggggcaatgtgacgcagcacgtgcaaggtcatcgaaacctctctacatgtttctcgagcggcgatctgtttacggctcacaatttctccgaacagagccgcattgggagctccgaactgcaggagttctgtcctactatcctccaacaactcgattcacgagcctgcacgagtgaaaatcaggaaaatgaggagaacgagcagaccgaggaggggaggccgtccgctgtggaggtctggggatacgggctcctctgtgttactgtgatttctctgtgctcactcttgggggcctccgttgtgccgttcatgaagaaaaccttctataagcgtctgcttctgtattttattgccctggccattggaacactgtattccaacgcactgtttcagttaatcccagaagctttcggctttaatcccctcgaagattactacgtgagcaaatcagcggtggtgttcgggggattctatcttttcttctttactgaaaagatcttgaaaattctgttgaaacagaagaatgagcatcatcatggccactctcactacgcatctgaatcccttccaagcaaaaaggatcaggaggaaggggtgatggagaagctgcagaatggcgaccttgaccatatgataccacagcactgtagtagcgagcttgacggaaaagctcctatggtcgacgaaaaggtgattgtgggcagcctgagcgtgcaagacctgcaagcgtcacagtcggcatgctactggctaaaaggcgttcgatactccgacattggcacccttgcctggatgatcaccctgtccgatggacttcataactttatcgacggactagcaattggagcgtctttcacagtgagcgtgtttcaggggatctcaactagcgttgctatcctgtgcgaagagttccctcatgaactcggtgattttgtcatcttactgaatgctggaatgagtattcaacaggcactgtttttcaattttctgagtgcttgctgttgttatctaggcctggccttcggcatcctggccggctcccacttctccgcgaattggatctttgctctagctggtggtatgttcctctacatcagcttggccgacatgtttccggaaatgaacgaggtgtgtcaggaagatgaaaggaaagggagtatcctaatcccattcattatccagaatctgggcctgctgacaggctttaccattatggtcgtgttaaccatgtatagcggccaaatccagattggctag

SEQ ID NO: 46333 - DNA, 1479 bp, Artificial Sequence
  derived and/or modified sequence
atgaagctgctgctgctgcaccccgccttccagagctgcctgctgcttactctgctagggctgtggcgcacaaccccagaagctcatgccagttcgctgggggctcccgccattagcgctgcgtcttttctgcaggacctgatccaccgctacggcgagggagattcgttgacacttcaacaactgaaggccctgttgaaccacctcgacgtaggcgtaggacgtgggaatgtgacacagcacgtgcagggtcaccgaaatctgagcacgtgcttttcctctggagatctgtttaccgcacacaatttcagcgagcagtctcgcatcggctcatccgagcttcaggagttctgtcccacgattttacagcagctggactccagagcttgtacctccgaaaaccaggagaacgaagagaacgagcaaaccgaggaagggcggccgtctgcagtggaagtgtggggttacgggctgctatgcgtgactgtaatctctctgtgctccctgctcggtgcgtccgtggttccatttatgaagaaaaccttttacaagcggctcctgttatactttattgccctggccattggaactctatactctaatgccctgttccagttaatccctgaagcatttggctttaacccactggaagactactacgtgtcaaagagcgcggtagtgttcgggggcttctacctgttctttttcactgagaaaatcctcaagatccttttgaagcagaagaacgaacatcaccacggccactctcactacgcttcagaaagtctgccttctaagaaagaccaggaggagggcgtcatggagaaactgcagaatggcgatttggatcacatgattccacaacactgctcctccgaactcgacggcaaggcccccatggtcgacgagaaggtgattgtgggctctctgtccgtccaagatcttcaggccagccaaagtgcgtgttactggctgaagggggttaggtacagcgacatcgggacacttgcctggatgatcaccttgtccgatggactacataacttcattgatggcctggctattggagcttcattcactgtcagcgtgttccaaggcatatctacgtctgtggcgatcctttgtgaggaatttccgcatgagctgggcgactttgtgatcttattgaacgcgggaatgtcaatccagcaggccctatttttcaattttctttcagcgtgctgttgctacttgggactggcgtttggaattctagctggcagtcacttcagtgccaattggatcttcgcccttgcgggcggcatgtttctctacatatcactcgctgatatgttccctgagatgaacgaagtgtgccaggaggacgaacggaagggaagtatactcatcccgttcataattcagaacctgggcctgttaaccggtttcactatcatggtcgttctgaccatgtactccggccagattcaaatagggtag

SEQ ID NO: 46334 - DNA, 1479 bp, Artificial Sequence
  derived and/or modified sequence
atgaagttgctcctgctccatccggcttttcagtcatgtctgctccttactctcctggggctgtggcgcacaacccccgaagcgcatgcctccagtctcggcgctcccgcaatcagcgccgctagttttctgcaggacttgattcatcgttacggcgaaggcgattcccttaccctccagcagttgaaagctctactgaaccacctggatgtgggcgtagggcgtggaaacgttactcagcatgtgcagggccacaggaatttaagtacttgcttcagcagcggagatctgttcactgcccacaacttctccgagcagtccagaatcggttccagtgaactgcaggaattctgtccaactattctgcagcagctggattccagggcctgcactagcgagaatcaggagaacgaagagaacgaacagaccgaggagggacgcccaagcgcggtggaggtctggggttatggcttgttgtgtgttactgtgatctcactgtgctcactcttgggtgcctctgtcgtgcctttcatgaaaaagaccttctataaaagattgcttctgtattttattgctctggcaattgggaccctgtatagtaatgcgctgtttcaactcattccagaagctttcggttttaatcccttggaagactattacgtgagtaagagtgctgtcgtgttcggaggcttctatctttttttcttcaccgaaaaaatactgaagatcctcctgaaacaaaaaaacgagcaccaccacggtcactctcactacgcttcggagtctctacccagtaaaaaggaccaggaggagggggtgatggaaaagttacagaatggcgacctggatcacatgatcccccaacactgcagctccgaactcgatgggaaggcccctatggtagatgagaaagtcatcgttggcagtctgagcgttcaggacctacaagcttctcaatcggcttgttattggctgaaaggagtgaggtactcagacatagggaccctggcttggatgatcacactgtctgacgggctgcataattttatagacggcctcgctatcggcgcttcctttacagttagcgttttccagggtatttcaacttcggtcgccatcctatgcgaggaatttccacatgagctaggcgacttcgtgatccttttgaatgccggtatgagcatacagcaggctttattcttcaacttcctgtcagcttgctgctgttacttgggtcttgcctttggaatattggcaggctctcactttagcgctaattggatttttgcgctggcagggggaatgttcctctacatatcactggctgatatgttccccgaaatgaacgaagtatgtcaggaggatgaacgaaagggtagtatactgattccatttatcattcagaacttagggttgctgaccggtttcaccattatggtcgtgctgaccatgtacagcggccagatccaaatagggtag

SEQ ID NO: 46335 - DNA, 1479 bp, Artificial Sequence
  derived and/or modified sequence
atgaagcttctcctcttgcatcctgcctttcagtcttgcttgctccttactctgcttggcctctggagaaccacacccgaggctcacgcgagtagcctgggggcacccgcaatatcagccgcttcctttctccaagaccttatccatcggtacggggagggtgactctctgaccctgcagcagttgaaagcactgctgaatcacttggacgtgggagtgggtagaggcaatgtcactcaacatgtacagggacaccgaaacctttctacatgtttcagctcaggcgacctattcacggcgcataactttagcgaacagtccaggattggcagttctgagctgcaggaattctgcccaacgatactccagcagctcgacagccgggcttgcacctcagaaaatcaagaaaacgaggaaaacgagcaaactgaggaaggaaggccaagcgcagtggaggtgtggggatatggcttgctctgtgtcacagttatatctctgtgtagcttgctgggggcttccgtcgtgccgttcatgaaaaagacattttacaaacgactgcttttatacttcattgcgctggcaattggtaccctttattctaatgctctctttcagctcattccagaggcattcggcttcaacccactggaagactactatgtgtcgaagagtgcagtggtcttcggcggattttacttgtttttctttacggagaagatccttaagatcctgctgaaacaaaaaaacgagcaccaccacggccacagccactatgcttcagagtcactgccaagcaagaaagatcaggaggagggggttatggagaagctgcagaacggggatctggaccatatgattccccagcactgctcatccgagctcgacggaaaagcaccgatggtagatgaaaaagtgattgtggggagcctctcagtgcaggacctgcaggccagccagtccgcttgttactggctgaaaggtgtacggtattctgatatcgggacactggcatggatgatcaccctgagtgatggcttgcataactttatcgacggtttggccatcggcgcatctttcacggtgtctgttttccagggcatcagcacttcagtggcaatcctttgtgaggaatttcctcatgaattgggcgattttgtgatacttctcaatgccggtatgtctatacagcaggccctattcttcaactttctgtctgcctgctgctgttacctggggctggcctttggcatcctggcaggctcacatttctccgctaactggatcttcgccttagcgggtggtatgtttctgtatatctccctggcagatatgtttcccgaaatgaacgaagtttgccaggaggacgagcggaaaggaagcatccttattcccttcatcatccagaacctggggctgcttaccggctttactattatggtagtcctgaccatgtacagcggccagatccagattgggtag

SEQ ID NO: 46336 - protein, 284 aa, Artificial Sequence
  derived and/or modified sequence
MALLLSQDRSLIASGLYGYNATLVGVLMAVFSDKGDYFWWLLLPVCAMSMTCPIFSSALNSMLSKWDLPVFTLPFNMALSMYLSATGHYNPFFPAKLVIPITTAPNISWSDLSALELLKSIPVGVGQIYGCDNPWTGGIFLGAILLSSPLMCLHAAIGSLLGIAAGLSLSAPFEDIYFGLWGFNSSLACIAMGGMFMALTWQTHLLALGCALFTAYLGVGMANFMAEVGLPACTWPFCLATLLFLIMTTKNSNIYKMPLSKVTYPEENRIFYLQAKKRMVESPL

SEQ ID NO: 46337 - protein, 445 aa, Artificial Sequence
  derived and/or modified sequence
MNGRSLIGGAGDARHGPVWKDPFGTKAGDAARRGIARLSLALADGSQEQEPEEEIAMEDSPTMVRVDSPTMVRGENQVSPCQGRRCFPKALGYVTGDMKELANQLKDKPVVLQFIDWILRGISQVVFVNNPVSGILILVGLLVQNPWWALTGWLGTVVSTLMALLLSQDRSLIASGLYGYNATLVGVLMAVFSDKGDYFWWLLLPVCAMSMTCPIFSSALNSMLSKWDLPVFTLPFNMALSMYLSATGHYNPFFPAKLVIPITTAPNISWSDLSALELLKSIPVGVGQIYGCDNPWTGGIFLGAILLSSPLMCLHAAIGSLLGIAAGLSLSAPFEDIYFGLWGFNSSLACIAMGGMFMALTWQTHLLALGCALFTAYLGVGMANFMAEVGLPACTWPFCLATLLFLIMTTKNSNIYKMPLSKVTYPEENRIFYLQAKKRMVESPL

SEQ ID NO: 46338 - protein, 214 aa, Artificial Sequence
  derived and/or modified sequence
MNGRSLIGGAGDARHGPVWKDPFGTKAGDAARRGIARLSLALADGSQEQEPEEEIAMEDSPTMVRVDSPTMVRGENQVSPCQGRRCFPKALGYVTGDMKELANQLKDKPVVLQFIDWILRGISQVVFVNNPVSGILILVGLLVQNPWWALTGWLGTVVSTLMALLLSQDRSLIASGLYGYNATLVGVLMAVFSDKGDYFWWLLLPVCAMSMTCC

SEQ ID NO: 46339 - protein, 257 aa, Artificial Sequence
  derived and/or modified sequence
MAVFSDKGDYFWWLLLPVCAMSMTCPIFSSALNSMLSKWDLPVFTLPFNMALSMYLSATGHYNPFFPAKLVIPITTAPNISWSDLSALELLKSIPVGVGQIYGCDNPWTGGIFLGAILLSSPLMCLHAAIGSLLGIAAGLSLSAPFEDIYFGLWGFNSSLACIAMGGMFMALTWQTHLLALGCALFTAYLGVGMANFMAEVGLPACTWPFCLATLLFLIMTTKNSNIYKMPLSKVTYPEENRIFYLQAKKRMVESPL

SEQ ID NO: 46340 - DNA, 1338 bp, Artificial Sequence
  derived and/or modified sequence
atgaacggccggtccctgataggcggagctggcgatgctcggcacggtccagtatggaaggatccctttggcaccaaggctggagatgccgcccgccgcggcattgccaggctgagtttggcactggcagatggatctcaggagcaggaacccgaggaagagatcgccatggaagatagccctactatggtgagagtcgacagtccaaccatggtgcgcggggaaaaccaagtgtcaccatgccaaggtaggcgatgctttccaaaggcactcgggtatgtgacgggagacatgaaggagctggcgaaccagctcaaggacaaacccgtcgtgttgcagtttatcgactggatcctgagggggatcagccaggtggtgtttgtgaataacccggtttcaggtatccttatccttgtgggtcttttggtgcagaatccgtggtgggccctgacgggatggctggggacggtcgtgtctacactgatggcactcctgctgtctcaggatcgcagcctgattgccagtggcttgtacggatataatgcaaccttggttggcgttctcatggccgtctttagtgataaaggagattatttctggtggctcctcctgcctgtatgtgccatgagcatgacctgcccaattttctcctcagccctgaatagtatgctgtccaaatgggaccttcctgtatttactcttccctttaacatggctttaagcatgtacctctccgccacaggacactacaaccctttctttcctgctaagctggtcatccctattacaactgcaccgaacatctcttggtccgacctcagcgccctcgaactgctgaaaagcatccccgtcggtgtcggccaaatctacggatgcgataacccctggactgggggaattttcctgggtgccatactgctgtcctcaccgctgatgtgcttgcacgccgctattggctcactgttgggaattgcggccgggttgtctttatctgctcctttcgaagacatttatttcggcctatggggctttaacagttctctggcctgtatagcaatggggggcatgtttatggctttgacatggcagacacacctcttggcactggggtgcgcactcttcacagcctacctgggcgtcggcatggcaaatttcatggctgaggtaggcctgcctgcctgcacctggcccttctgcctcgcgaccctgctgtttcttatcatgactaccaaaaatagcaatatttataagatgccactgagcaaggtgacctatcccgaagagaaccgcatcttttaccttcaggccaaaaagcggatggtggagtcacccttatag

SEQ ID NO: 46341 - DNA, 1338 bp, Artificial Sequence
  derived and/or modified sequence
atgaatggccggagtcttatcggaggagccggggacgctaggcacggtcccgtgtggaaggatccattcggtacgaaggccggtgacgcagctcggcggggtattgcaaggctctctctggctctggctgatggaagccaggagcaagagcctgaagaagagatcgcgatggaagatagcccgaccatggtgagagttgactctccaaccatggtccgcggcgaaaaccaggtgtctccttgccaggggcgtcgttgtttccctaaagcactcggatacgtcactggtgacatgaaagaacttgctaaccagttgaaggataaacctgtggtgctccagtttattgactggatcctaagagggatttctcaagtcgtattcgtcaacaatcccgtgagcggtatcctgattcttgtcgggctcctggtccagaacccatggtgggctttgaccggctggctcggtaccgttgtgagcaccctcatggccctgctgctctcgcaggatcgctccctgattgccagtggactgtacggctacaatgcaacactggtcggcgtcctgatggccgtgtttagcgacaagggagactacttctggtggcttctgcttccggtttgcgcaatgtcaatgacttgccccattttttcctctgcccttaattcgatgctgtctaagtgggacctgccggtgttcacactgcctttcaatatggcactttcgatgtatctgtcagccaccggacactataaccctttcttccccgccaagcttgtcattcctatcacgacagcccctaacatttcatggagcgacctcagtgccctggagctgctgaaaagcatccctgtgggcgtggggcaaatttatggctgtgacaacccatggactggaggcatcttcctaggcgcaatcttgctgtccagtcccctgatgtgtctgcatgcagccatcggaagtctgctcggtatcgctgcagggctttcactgtctgccccgtttgaagacatctactttgggctatggggatttaattccagcctagcctgcatcgctatgggcggtatgttcatggccctgacatggcaaacccatcttttggctctcggttgcgcgctcttcacagcctatctgggagttggtatggccaatttcatggccgaggtaggacttccggcttgcacttggcccttttgtctggcgaccctgctctttctaatcatgacaacaaagaacagcaatatttacaagatgccacttagcaaagtgacttaccctgaggagaatcgaattttttatttgcaagccaagaaaagaatggtggaaagccctctctag

SEQ ID NO: 46342 - DNA, 1338 bp, Artificial Sequence
  derived and/or modified sequence
atgaatggccgcagcctgattggaggagctggagatgcccggcacggccctgtgtggaaggaccccttcggcaccaaggctggagatgctgcccggcggggcatcgcccggctgagcctggccctggctgatggcagccaggagcaggagcctgaggaggagatcgccatggaggacagccccaccatggtgcgggtggacagccccaccatggtgagaggagagaaccaggtgagcccctgccagggccgccgctgcttccccaaggccctgggctacgtgactggagacatgaaggagctggccaaccagctgaaggacaagcctgtggtgctgcagttcatcgactggatcctgcggggcatcagccaggtggtgtttgtgaacaaccctgtgtctggcatcctgatcctggtgggcctgctggtgcagaacccctggtgggccctgaccggctggctgggcaccgtggtgtccaccctgatggccctgctgctgagccaggacaggagcctgattgccagcggcctgtatggctacaatgccaccctggtgggcgtgctgatggctgtgttcagtgacaagggggactacttctggtggctgctgctgcctgtgtgtgccatgtccatgacctgccccatcttcagcagcgccctgaacagcatgctgagcaagtgggacctgcccgtcttcaccctgcccttcaacatggccctgtccatgtacctgagcgccaccggccactacaaccccttcttccctgccaagctggtgatccccatcaccacagcccccaacatctcctggagcgacctgagcgccctggagctgctgaagagcatccctgtgggcgtgggccagatctacggctgtgacaacccctggacaggaggcatcttcctgggcgccatcctgctgagcagccccctgatgtgcctgcacgccgccatcggcagcctgctgggcattgctgctggcctgagcctgagcgccccctttgaggacatctacttcggcctgtggggcttcaacagcagcctggcctgcatcgccatgggcggcatgttcatggccctgacctggcagacccacctgctggccctgggctgtgccctcttcaccgcctacctgggcgtgggcatggccaacttcatggccgaggtgggcctgcctgcctgcacctggcccttctgcctggccaccctgctcttcctgatcatgaccaccaagaacagcaacatctacaagatgcccctgagcaaggtgacctacccagaggagaaccgcatcttctacctgcaggccaagaagaggatggtggagagccccctgtag

SEQ ID NO: 46343 - DNA, 1338 bp, Artificial Sequence
  derived and/or modified sequence
atgaacggccggagcctgatcggcggcgccggcgacgcccggcacggccccgtgtggaaagaccctttcggcacaaaagcgggggatgccgccagacgaggaatcgctaggttatcactggctttggcggatggaagccaggagcaagagcctgaggaagagatagccatggaagatagccccacgatggtgagggtcgactcaccaaccatggtgcgtggcgagaatcaggtctccccctgtcaggggaggcgttgcttccctaaggctcttggctacgtcaccggcgatatgaaggagctggcaaatcaactgaaggataagcctgtggtcctgcagttcatcgattggatcctccggggtatctcccaggtggtgtttgtaaataaccctgtgagcggaatcctgattctggttggactgctggttcagaacccgtggtgggccctcaccggatggctgggaactgtcgtgagcactttgatggcactgcttctttctcaggatcgctccctcatagcctccggactgtatgggtacaatgccacccttgtcggggtcttaatggctgtcttctctgacaagggcgattacttctggtggttgctgttgcccgtgtgcgccatgtcaatgacgtgccccattttctcgtccgcactcaactccatgctgagcaaatgggacctgccagtcttcaccttgccatttaacatggctctgagtatgtatctgtccgccaccggtcattataatccattctttcctgccaaattggtgattcccatcacaacagctccaaacataagctggtccgacctctctgccctggaactgcttaagagtatccccgtcggtgtgggccagatctatggctgcgataacccatggactggcgggatcttcttgggtgcaattctgctctcgagcccccttatgtgtctgcacgccgccatcggttcacttcttgggattgccgcagggctgagtctgagcgctcctttcgaggacatctattttggactgtggggttttaactcttctttagcttgcatcgccatgggggggatgttcatggctttaacttggcagactcatctgttggccctagggtgtgccttgttcactgcttacctcggcgtcggcatggccaactttatggcagaggtgggtctcccagcctgcacatggccgttctgtctcgctacactactcttcctcatcatgacaaccaaaaattccaacatttacaaaatgccccttagtaaggtcacttaccctgaggaaaaccgtatcttctatctccaggccaagaagcggatggttgaatcccccctttag

SEQ ID NO: 46344 - DNA, 1338 bp, Artificial Sequence
  derived and/or modified sequence
atgaacggccggagcctgatcggcggcgccggcgacgcccggcacggaccagtctggaaagaccctttcggcacgaaggccggggacgccgcgaggagggggatcgcccgcttgtctctggccctggctgatggtagccaagaacaggagcctgaggaagagattgccatggaagattcacctacaatggtcagagtggattctccaactatggttaggggagaaaaccaggtcagcccctgtcagggtcggcgctgcttcccaaaagcattaggctatgtcactggtgatatgaaggagctggcaaatcagctgaaggacaagcccgtggtccttcagttcattgactggatcctgcgggggatcagtcaggttgtgttcgttaacaaccctgtgtccggcattttaatcctggtgggactactagttcagaacccgtggtgggcgcttacagggtggctcggtactgttgtgagcacactcatggctctgctgttgagccaggatcgcagcctcatcgcctcaggcctgtacggctacaacgcaacactagtgggggtgctcatggccgttttcagcgataaaggagattatttttggtggctgctcctccccgtgtgcgctatgtccatgacctgtcccattttcagctccgctctgaatagtatgctgtccaaatgggacctgccagtatttaccctgccttttaatatggctctgtctatgtatctgtccgcaacggggcactataatcctttctttccagctaaactcgttatacccattacaactgctcccaacatatcgtggagcgacctctctgccctggaacttctgaagtccatccctgtgggcgtggggcagatctatggttgcgataacccatggactggcggcattttcctcggggcaatcctgctatccagcccgcttatgtgcctgcatgctgctatcggaagtttgctaggaatcgccgctgggctgtctctgtctgccccgtttgaggacatttatttcggtttgtggggattcaattctagcctggcgtgtatcgcgatgggtggcatgttcatggccctcacttggcagactcatcttcttgctttggggtgtgcattgtttactgcctatttgggcgtgggcatggcgaattttatggccgaggtggggttgccggcctgcacctggccgttctgtctggccaccctcttgtttctgatcatgaccacaaaaaattcaaatatctataagatgccactcagtaaggttacctatcccgaggaaaatagaatattttacctccaagccaagaagagaatggtggaatctccactgtag

SEQ ID NO: 46345 - DNA, 1338 bp, Artificial Sequence
  derived and/or modified sequence
atgaatggcaggtcactcattggtggggcaggagacgctaggcatggacctgtttggaaggacccttttgggaccaaggccggtgacgcagctcgaaggggaatcgcgcgtcttagcctggcgctggctgacggaagccaggagcaagaaccagaagaagaaattgcaatggaggattcaccaaccatggtacgggtggattctcctacaatggtgcggggagagaaccaggtgtccccatgtcagggacgacgatgcttccctaaagcactgggctacgtgactggggacatgaaagagctcgctaaccaactgaaagacaagcccgtggttttacagttcatcgactggatattacggggtatctcccaggtcgtcttcgttaacaatcccgtgagcgggattctgattcttgtgggcctgctagtacagaacccttggtgggcattgaccgggtggctggggaccgtggtgtccaccttgatggccctcctactgtcacaggacaggtcactgattgccagcggtctgtatggctataatgccactctggtaggggtcctaatggccgtgttcagcgataagggagattacttttggtggctgctcctcccagtgtgcgctatgtctatgacctgcccaatcttttcctccgcactgaatagcatgctatcaaagtgggatttacctgttttcacgctgccattcaatatggccttgtccatgtacctttctgccacaggacattataaccccttcttccccgctaaactggtgatccctatcactaccgctccaaatatcagctggagtgatttaagtgccttagagctgttaaaatctattccagtcggggtaggtcagatctatgggtgtgataacccatggacaggaggcatatttctcggtgcaattctactgtcaagtcctctgatgtgtctgcacgccgcaattggttctttactgggtatagcagctggactgtccctaagcgccccttttgaagacatatattttggactgtggggctttaattcaagcctcgcgtgtatcgcaatgggaggcatgttcatggcactgacgtggcaaacccacttactagcactcggttgtgcactatttactgcttatctcggtgtagggatggcgaactttatggctgaggtaggcttgccggcatgcacttggcctttctgcctggccaccctcctgtttctgataatgaccaccaaaaattccaacatttacaagatgcccctgtcaaaggtaacttacccggaggagaacagaatcttctacttgcaggccaaaaagaggatggtagagtcccctctctag

SEQ ID NO: 46346 - DNA, 1338 bp, Artificial Sequence
  derived and/or modified sequence
atgaacggccgaagcctgatcggaggcgctggagatgcgcgtcacgggcctgtctggaaggatccattcgggactaaagctggggacgctgccaggagaggcattgccaggcttagtctggcattggccgacggcagccaagaacaggaacccgaggaggagatagcaatggaggattcccccaccatggtgagggtggacagccccacgatggtgcgtggggagaaccaggttagtccttgccaaggccgaagatgcttccctaaagcccttggctacgttactggggacatgaaagagctggcaaatcaactgaaggacaaaccagtggttctccagtttatcgattggatccttcgaggtatatcccaagtagtgttcgtgaacaaccctgtcagcgggatcctgatattagttggacttctggtgcagaatccttggtgggctctcacagggtggctgggcaccgttgtctcaactttaatggcattgctattgagccaggaccggtccctgatcgcttcgggactctacggctataatgctacactggtgggcgtgctcatggccgtgtttagcgataagggagactacttctggtggttactgttgcctgtgtgtgccatgtctatgacctgcccaattttctcctccgctttgaacagcatgctgagcaagtgggacctgcccgtcttcacattgccatttaacatggccctgagtatgtatctcagcgctacgggacactacaacccctttttccccgcaaagcttgtgattccaattaccacagcacccaacatcagctggtcggacctgtcagctttagagctgctcaagtccatccccgtgggggtgggccagatctacggatgtgataacccgtggacgggcggtatcttcctgggagctattctgcttagctcccctctgatgtgcctgcatgcagccataggctccctgctcggaattgccgcaggtctctctctgtcagcccctttcgaggatatatatttcggactgtgggggtttaactccagtctagcttgcatcgcaatgggaggaatgttcatggcgctcacgtggcaaacacatttactcgcactcggatgcgccttgtttacggcctacctaggagtgggcatggcaaattttatggctgaggtgggcctgcccgcatgcacttggcctttctgccttgcaacccttcttttcttgatcatgaccacaaaaaatagcaacatctataagatgccgctctcaaaggttacgtaccccgaggaaaataggattttctacctgcaggctaaaaagaggatggtagagtcccccctgtag

SEQ ID NO: 46347 - DNA, 4129 bp, Artificial Sequence
  derived and/or modified sequence
acacagagcagagtggggctctgagtatataactgttaggtgcctccctccagcaccatctcctgagaagcactctcccttgtcgtggaggtgggcaaatctttatcagccactgccttctgctgccaggaagccagctagagtggtctttaaagaaaactgggcatctcctgctacttaaaatcaaaaactacctaaaataaagattataaaaaagtaaggatgaatggacggtctttgattggcggcgctggtgacgcccgtcatggtcctgtttggaaggacccttttggaactaaagctggtgacgcagcgcgcagaggcatcgcccggctaagcttggccctggcagatgggtcgcaggaacaggagccagaggaagagatagccatggaggacagccccactatggttagagtggacagccccactatggttaggggtgaaaaccaggtttcgccatgtcaagggagaaggtgcttccccaaagctcttggctatgtcaccggtgacatgaaagaacttgccaaccagcttaaagacaaacccgtggtgctccagttcattgactggattctccggggcatatcccaagtggtgttcgtcaacaaccccgtcagtggaatcctgattctggtaggacttcttgttcagaacccctggtgggctctcactggctggctgggaacagtggtctccactctgatggccctcttgctcagccaggacaggtcattaatagcatctgggctctatggctacaatgccaccctggtgggagtactcatggctgtcttttcggacaagggagactatttctggtggctgttactccctgtatgtgctatgtccatgacttgcccaattttctcaagtgcattgaattccatgctcagcaaatgggacctccccgtcttcaccctccctttcaacatggcgttgtcaatgtacctttcagccacaggacattacaatccattctttccagccaaactggtcatacctataactacagctccaaatatctcctggtctgacctcagtgccctggagttgttgaaatctataccagtgggagttggtcagatctatggctgtgataatccatggacagggggcattttcctgggagccatcctactctcctccccactcatgtgcctgcatgctgccataggatcattgctgggcatagcagcgggactcagtctttcagccccatttgaggacatctactttggactctggggtttcaacagctctctggcctgcattgcaatgggaggaatgttcatggcgctcacctggcaaacccacctcctggctcttggctgtgccctgttcacggcctatcttggagtcggcatggcaaactttatggctgaggttggattgccagcttgtacctggcccttctgtttggccacgctattgttcctcatcatgaccacaaaaaattccaacatctacaagatgcccctcagtaaagttacttatcctgaagaaaaccgcatcttctacctgcaagccaagaaaagaatggtggaaagccctttgtgagaacaagccccatttgcagccatggtcacgagtcatttctgcctgactgctccagctaacttccagggtctcagcaaactgctgtttttcacgagtatcaactttcatactgacgcgtctgtaatctgttcttatgctcattttgtattttcctttcaactccaggaatatccttgagcatatgagagtcacatccaggtgatgtgctctggtatggaatttgaaaccccaatggggccttggcactaagactggaatgtatataaagtcaaagtgctccaacagaaggaggaagtgaaaacaaactattagtatttattgatattcttggtgtttagctggctcgatgatgttaacagtattaaaaattaaaccccataaaccaactaagccttatggaattcacagtcacaaaatcgaagttaatccagaattctgtgataagcagcttggctttttttttaaatcaatgcaagttacacattatagccagaatctgtatcacagaggtgcaagctgacagcagagctcagtccccacttcctgcaaacaatggcctgcaccctatcccttgtgtgtgtgacattctctcatgggacaatgttggggtttttcagactgacaggactgcaagagggagaaaggaattttgtcaatcaaaattattctgtattgcaacttttctcagagattgcaaaggattttttaggtagagattatttttccttatgaaaaatgatctgttttaaatgagataaaataggagaagttcctggcttaacctgttcttacatattaaagaaaagttacttactgtatttatgaaatactcagcttaggcatttttactttaacccctaaattgattttgtaaatgccacaaatgcatagaattgttaccaacctccaaagggctctttaaaatcatattttttattcatttgaggatgtcttataaagactgaaggcaaaggtcagattgcttacgggtgttatttttataagttgttgaattccttaatttaaaaaagctcattattttttgcacactcacaatattctctctcagaaatcaatggcatttgaaccaccaaaaagaaataaagggctgagtgcggtggctcacgcctgtaatcccagcactttggggagcccaggcgggcagattgcttgaacccaggagttcaagaccagcctgggcagcatggtgaaaccctgtatctacaaaaaatacaaaaattagccaggcatggtggtgggtgcctgtagttccagctacttgggaggctgaggtgggaaaatgacttgagcccaggaggaggaggctgcagtgagctaagattgcaccactgcactccaacctgggcgacaagagtgaaactgtgtctctcaaaaaaaaaaaaaaacaaacaaaaacaaaaacaaaacaaaacaaaacaaaacaaaacaggtaaggattcccctgttttcctctctttaattttaaagttatcagttccgtaaagtctctgtaaccaaacatactgaagacagcaacagaagtcacgttcagggactggctcacacctgtaatcccagcactttgggagatggaggtaaaaggatctcttgagcccaggagttcaagaccagcttgggcaacatagcaagactccatctcttaaaaaataaaaatagtaacattagccaggtgtagcagcacacatctgcagcagctactcaggaggctgaggtggaaagatcgcttgtgcacagaagttcgaggctgcagtgagctatatgatcatgtcactgcactccagcctgtgtgaccgagcaagaccctatctcaaaaaaattaattaattaattaattaattaatttaaaaaggaagtcatgttcatttactttccacttcagtgtgtatcgtgtagtattttggaggttggaaagtgaaacgtaggaatcctgaagattttttccacttctagtttgcagtgctcagtgcacaatatacattttgctgaatgaataaacagaaatagggaagtaaacctacaaatattttagggagaagctcacttcttccttttctcaggaaaccaagcaagcaaacatatcgttccaattttaaaacccagtgaccaaagcctttggaactatgaatttgcaactgtcataggtttatggatattgctgtggagaagctcaattttcagtgtttgaactgaaccctttcttgttagggaacgtgtgaaagaagaattgtggggaaaaaaaagcaagcataaccaaagatcatcagcagtgaagaatctaggctgtggctgagagaaccagaggcctctaaaatggacccgagtcgatcttcagaacagggatctaccatgcaggagcttcttgtgctcacacaaatctgtaaatgggaacattgtacattgtcgaatttaaatgatattaattttctcaagctatttttgttactattttcctaaaattgaatatttgcagggagcacttatactttttcctaatgtctgtataacaaatttctatgcaagtacatgaataaattatgctcacagctca

SEQ ID NO: 46348 - DNA, 4226 bp, Artificial Sequence
  derived and/or modified sequence
acgcagcagaacaaaatctgggcattggtccctgtgtaggatggcttcccgttattttttttttaagcaaagtaaatgaacatcaaatttccatagtcagctgctgtctttctgcccactgagagctctttggtgaaggcaaagtcctccttcttcattagcggtctcccatgtggggccacatcttccctcaccaggaacccagtgggcgcgctccagcccccctcagcttgccttttgcgtggtcattagagctagggcacacgtcatgctgattcacatatttttgccctttgtcatgtattgagaaaaagtaaggatgaatggacggtctttgattggcggcgctggtgacgcccgtcatggtcctgtttggaaggacccttttggaactaaagctggtgacgcagcgcgcagaggcatcgcccggctaagcttggccctggcagatgggtcgcaggaacaggagccagaggaagagatagccatggaggacagccccactatggttagagtggacagccccactatggttaggggtgaaaaccaggtttcgccatgtcaagggagaaggtgcttccccaaagctcttggctatgtcaccggtgacatgaaagaacttgccaaccagcttaaagacaaacccgtggtgctccagttcattgactggattctccggggcatatcccaagtggtgttcgtcaacaaccccgtcagtggaatcctgattctggtaggacttcttgttcagaacccctggtgggctctcactggctggctgggaacagtggtctccactctgatggccctcttgctcagccaggacaggtcattaatagcatctgggctctatggctacaatgccaccctggtgggagtactcatggctgtcttttcggacaagggagactatttctggtggctgttactccctgtatgtgctatgtccatgacttgcccaattttctcaagtgcattgaattccatgctcagcaaatgggacctccccgtcttcaccctccctttcaacatggcgttgtcaatgtacctttcagccacaggacattacaatccattctttccagccaaactggtcatacctataactacagctccaaatatctcctggtctgacctcagtgccctggagttgttgaaatctataccagtgggagttggtcagatctatggctgtgataatccatggacagggggcattttcctgggagccatcctactctcctccccactcatgtgcctgcatgctgccataggatcattgctgggcatagcagcgggactcagtctttcagccccatttgaggacatctactttggactctggggtttcaacagctctctggcctgcattgcaatgggaggaatgttcatggcgctcacctggcaaacccacctcctggctcttggctgtgccctgttcacggcctatcttggagtcggcatggcaaactttatggctgaggttggattgccagcttgtacctggcccttctgtttggccacgctattgttcctcatcatgaccacaaaaaattccaacatctacaagatgcccctcagtaaagttacttatcctgaagaaaaccgcatcttctacctgcaagccaagaaaagaatggtggaaagccctttgtgagaacaagccccatttgcagccatggtcacgagtcatttctgcctgactgctccagctaacttccagggtctcagcaaactgctgtttttcacgagtatcaactttcatactgacgcgtctgtaatctgttcttatgctcattttgtattttcctttcaactccaggaatatccttgagcatatgagagtcacatccaggtgatgtgctctggtatggaatttgaaaccccaatggggccttggcactaagactggaatgtatataaagtcaaagtgctccaacagaaggaggaagtgaaaacaaactattagtatttattgatattcttggtgtttagctggctcgatgatgttaacagtattaaaaattaaaccccataaaccaactaagccttatggaattcacagtcacaaaatcgaagttaatccagaattctgtgataagcagcttggctttttttttaaatcaatgcaagttacacattatagccagaatctgtatcacagaggtgcaagctgacagcagagctcagtccccacttcctgcaaacaatggcctgcaccctatcccttgtgtgtgtgacattctctcatgggacaatgttggggtttttcagactgacaggactgcaagagggagaaaggaattttgtcaatcaaaattattctgtattgcaacttttctcagagattgcaaaggattttttaggtagagattatttttccttatgaaaaatgatctgttttaaatgagataaaataggagaagttcctggcttaacctgttcttacatattaaagaaaagttacttactgtatttatgaaatactcagcttaggcatttttactttaacccctaaattgattttgtaaatgccacaaatgcatagaattgttaccaacctccaaagggctctttaaaatcatattttttattcatttgaggatgtcttataaagactgaaggcaaaggtcagattgcttacgggtgttatttttataagttgttgaattccttaatttaaaaaagctcattattttttgcacactcacaatattctctctcagaaatcaatggcatttgaaccaccaaaaagaaataaagggctgagtgcggtggctcacgcctgtaatcccagcactttggggagcccaggcgggcagattgcttgaacccaggagttcaagaccagcctgggcagcatggtgaaaccctgtatctacaaaaaatacaaaaattagccaggcatggtggtgggtgcctgtagttccagctacttgggaggctgaggtgggaaaatgacttgagcccaggaggaggaggctgcagtgagctaagattgcaccactgcactccaacctgggcgacaagagtgaaactgtgtctctcaaaaaaaaaaaaaaacaaacaaaaacaaaaacaaaacaaaacaaaacaaaacaaaacaggtaaggattcccctgttttcctctctttaattttaaagttatcagttccgtaaagtctctgtaaccaaacatactgaagacagcaacagaagtcacgttcagggactggctcacacctgtaatcccagcactttgggagatggaggtaaaaggatctcttgagcccaggagttcaagaccagcttgggcaacatagcaagactccatctcttaaaaaataaaaatagtaacattagccaggtgtagcagcacacatctgcagcagctactcaggaggctgaggtggaaagatcgcttgtgcacagaagttcgaggctgcagtgagctatatgatcatgtcactgcactccagcctgtgtgaccgagcaagaccctatctcaaaaaaattaattaattaattaattaattaatttaaaaaggaagtcatgttcatttactttccacttcagtgtgtatcgtgtagtattttggaggttggaaagtgaaacgtaggaatcctgaagattttttccacttctagtttgcagtgctcagtgcacaatatacattttgctgaatgaataaacagaaatagggaagtaaacctacaaatattttagggagaagctcacttcttccttttctcaggaaaccaagcaagcaaacatatcgttccaattttaaaacccagtgaccaaagcctttggaactatgaatttgcaactgtcataggtttatggatattgctgtggagaagctcaattttcagtgtttgaactgaaccctttcttgttagggaacgtgtgaaagaagaattgtggggaaaaaaaagcaagcataaccaaagatcatcagcagtgaagaatctaggctgtggctgagagaaccagaggcctctaaaatggacccgagtcgatcttcagaacagggatctaccatgcaggagcttcttgtgctcacacaaatctgtaaatgggaacattgtacattgtcgaatttaaatgatattaattttctcaagctatttttgttactattttcctaaaattgaatatttgcagggagcacttatactttttcctaatgtctgtataacaaatttctatgcaagtacatgaataaattatgctcacagctca

SEQ ID NO: 46349 - DNA, 1338 bp, Artificial Sequence
  derived and/or modified sequence
atgaacggcagaagcctgatcggcggcgccggcgacgccagacacggccccgtgtggaaggaccccttcggcaccaaggccggcgacgccgccagaagaggcatcgccagactgagcctggccctggccgacggcagccaggagcaggagcccgaggaggagatcgccatggaggacagccccaccatggtgagagtggacagccccaccatggtgagaggcgagaaccaggtgagcccctgccagggcagaagatgcttccccaaggccctgggctacgtgaccggcgacatgaaggagctggccaaccagctgaaggacaagcccgtggtgctgcagttcatcgactggatcctgagaggcatcagccaggtggtgttcgtgaacaaccccgtgagcggcatcctgatcctggtgggcctgctggtgcagaacccctggtgggccctgaccggctggctgggcaccgtggtgagcaccctgatggccctgctgctgagccaggacagaagcctgatcgccagcggcctgtacggctacaacgccaccctggtgggcgtgctgatggccgtgttcagcgacaagggcgactacttctggtggctgctgctgcccgtgtgcgccatgagcatgacctgccccatcttcagcagcgccctgaacagcatgctgagcaagtgggacctgcccgtgttcaccctgcccttcaacatggccctgagcatgtacctgagcgccaccggccactacaaccccttcttccccgccaagctggtgatccccatcaccaccgcccccaacatcagctggagcgacctgagcgccctggagctgctgaagagcatccccgtgggcgtgggccagatctacggctgcgacaacccctggaccggcggcatcttcctgggcgccatcctgctgagcagccccctgatgtgcctgcacgccgccatcggcagcctgctgggcatcgccgccggcctgagcctgagcgcccccttcgaggacatctacttcggcctgtggggcttcaacagcagcctggcctgcatcgccatgggcggcatgttcatggccctgacctggcagacccacctgctggccctgggctgcgccctgttcaccgcctacctgggcgtgggcatggccaacttcatggccgaggtgggcctgcccgcctgcacctggcccttctgcctggccaccctgctgttcctgatcatgaccaccaagaacagcaacatctacaagatgcccctgagcaaggtgacctaccccgaggagaacagaatcttctacctgcaggccaagaagagaatggtggagagccccctgtag

SEQ ID NO: 46350 - protein, 465 aa, Artificial Sequence
  derived and/or modified sequence
MLLLGLLLLLPLLAGARLLWNWWKLRSLHLPPLAPGFLHLLQPDLPIYLLGLTQKFGPIYRLHLGLQDKLVSRNYPDLSLGDYSLLWKAHKKLTRSALLLGIRDSMEPVVEQLTQEFCERMRAQPGTPVAIEEEFSLLTCSIICYLTFGDKIKDDNLMPAYYKCIQEVLKTWSHWSIQIVDVIPFLRFFPNPGLRRLKQAIEKRDHIVEMQLRQHKESLVAGQWRDMMDYMLQGVAQPSMEEGSGQLLEGHVHMAAVDLLIGGTETTANTLSWAVVFLLHHPEIQQRLQEELDHELGPGASSSRVPYKDRARLPLLNATIAEVLRLRPVVPLALPHRTTRPSSISGYDIPEGTVIIPNLQGAHLDETVWERPHEFWPDRFLEPGKNSRALAFGCGARVCLGEPLARLELFVVLTRLLQAFTLLPSGDALPSLQPLPHCSVILKMQPFQVRLQPRGMGAHSPGQSQ

SEQ ID NO: 46351 - protein, 464 aa, Artificial Sequence
  derived and/or modified sequence
MLLLGLLLLPLLAGARLLWNWWKLRSLHLPPLAPGFLHLLQPDLPIYLLGLTQKFGPIYRLHLGLQDKLVSKNYPDLSLGDYSLLWKAHKKLTRSALLLGIRDSMEPVVEQLTQEFCERMRAQPGTPVAIEEEFSLLTCSIICYLTFGDKIKDDNLMPAYYKCIQEVLKTWSHWSIQIVDVIPFLRFFPNPGLRRLKQAIEKRDHIVEMQLRQHKESLVAGQWRDMMDYMLQGVAQPSMEEGSGQLLEGHVHMAAVDLLIGGTETTANTLSWAVVFLLHHPEIQQRLQEELDHELGPGASSSRVPYKDRARLPLLNATIAEVLRLRPVVPLALPHRTTRPSSISGYDIPEGTVIIPNLQGAHLDETVWERPHEFWPDRFLEPGKNSRALAFGCGARVCLGEPLARLELFVVLTRLLQAFTLLPSGDALPSLQPLPHCSVILKMQPFQVRLQPRGMGAHSPGQNQ

SEQ ID NO: 46352 - protein, 465 aa, Artificial Sequence
  derived and/or modified sequence
MLLLGLLLLLPLLAGARLLWNWWKLRSLHLLPLAPGFLHLLQPDLPIYLLGLTQKFGPIYRLHLGLQDKLVSKNYPDLSLGDYSLLWKAHKKLTRSALLLGIRDSMEPVVEQLTQEFCERMRAQPGTPVAIEEEFSLLTCSIICYLTFGDKIKDDNLMPAYYKCIQEVLKTWSHWSIQIVDVIPFLRFFPNPGLRRLKQAIEKRDHIVEMQLRQHKESLVAGQWRDMMDYMLQGVAQPSMEEGSGQLLEGHVHMAAVDLLIGGTETTANTLSWAVVFLLHHPEIQQRLQEELDHELGPGASSSRVPYKDRARLPLLNATIAEVLRLRPVVPLALPHRTTRPSSISGYDIPEGTVIIPNLQGAHLDETVWERPHEFWPDRFLEPGKNSRALAFGCGARVCLGEPLARLELFVVLTRLLQAFTLLPSGDALPSLQPLPHCSVILKMQPFQVRLQPRGMGAHSPGQNQ

SEQ ID NO: 46353 - DNA, 1398 bp, Artificial Sequence
  derived and/or modified sequence
atgctattgctgggactgttactactcctgcctcttctcgcaggtgcacgcctgttatggaactggtggaaacttagaagcttgcacctgccacccctcgcccctggatttcttcacctgctccaaccagatctgcctatttatctcctgggactgacgcagaagtttggacccatttatcgcctccacctcggtctacaggacaagctggtttcaaggaattacccagatctttcactgggcgattacagtctcctgtggaaggcccataaaaaactgacaaggtcggcactcctgcttggcattcgagattccatggagccggtggttgaacagcttacccaggaattctgcgagagaatgagagcgcagccaggcactccggttgccattgaagaggagttttcgctgctcacctgcagcataatctgctacctcacctttggcgataaaataaaagatgacaatttaatgcctgcgtactacaagtgcatccaggaggtgctgaagacctggtctcactggtccatccaaatagtggacgtgatcccctttctacggttttttccaaacccggggctgaggcggcttaagcaggccattgagaagcgagatcacattgttgaaatgcagctcaggcagcataaagaaagccttgtggctggccaatggagagatatgatggactacatgttgcagggtgtggcacagccatcaatggaggagggctcgggtcaactgctcgaagggcacgtacacatggccgccgttgatctgctcatcggcgggaccgagaccaccgcaaataccctcagttgggcagtcgtattcttattgcaccacccggagatccagcaacgattgcaggaggagctcgaccacgaactgggcccaggcgccagctcctccagggttccctacaaagaccgtgccaggctgcccctacttaacgctactatcgctgaggtactgcgattgcgccccgtcgtgcccctcgcattgccccataggaccacacgaccctcatctatcagcgggtatgacatccccgagggaacagtgatcatccctaatctgcagggggctcacctggatgaaactgtatgggagagacctcatgaattttggcccgataggtttcttgagcccggcaaaaactccagggccttagcttttggatgtggggcgagggtatgcctgggggagccccttgcccgtctcgagttatttgtagtgcttacgagacttctgcaggctttcacgctgctgccaagtggcgatgcgctccctagcttacaacctctacctcattgctccgtcatactgaagatgcaaccattccaggtgagactgcagccgcgcggcatgggcgctcactcccctggccagtcacaatag

SEQ ID NO: 46354 - DNA, 1398 bp, Artificial Sequence
  derived and/or modified sequence
atgctcctcctaggcctcttgctcctcctgccactactggctggtgcgcgactgctttggaactggtggaaattgaggagccttcaccttccacctttggctcctggtttcctacacctccttcagcctgacctccctatatatctgctcggactaacccagaagtttggccccatttataggctgcacctgggactgcaggataagctcgtgtcacggaattaccccgatctgtctttaggagactacagcctgctttggaaggcccacaaaaagcttactcgcagcgccttactcctggggattcgagactccatggagcccgtagtcgaacaactcacacaggagttctgcgagagaatgcgtgcccagcccggaactcccgtggcaatcgaagaggaattttccctcttgacctgcagcatcatatgttacctgacatttggcgataaaattaaagatgacaacctgatgcctgcctactataagtgtattcaggaggtccttaaaacttggtcccactggagcatacaaatcgtggacgtgatcccattcttgagattcttccccaacccagggttgagaaggttgaaacaggcgatcgagaagagagatcatatagtggaaatgcagctgcgacagcacaaggaatcattagtagctggccaatggagagatatgatggattacatgctgcaaggagtggctcagccatcaatggaagaggggagtggtcagctcctggaaggacatgtccacatggctgctgttgatctactaataggcggcactgagaccacagccaacaccctcagctgggccgtggtgttcttactgcatcatcctgagattcagcagagactccaggaggagcttgatcatgaactgggtcccggggcgtcatcttccagggtgccttataaagatagagccaggctcccactgcttaatgccacaatcgctgaggttctccgcctgagacctgtcgttcctttagcgctcccacatcggaccactcgcccgagttctatttccgggtacgacatccctgagggcaccgtcattattcccaatctgcaaggagcgcacctcgacgagactgtgtgggagcgtccccacgaattctggccagaccggtttcttgaacctggcaaaaactctagggctctggcgttcgggtgtggggctagggtttgcctgggggaacctctggcaaggctggaactgtttgtggtgctgaccaggctgctgcaagcattcacactgctcccttccggggacgctcttccttcactgcagccccttccccactgttctgtcattcttaaaatgcagcctttccaggttcgcctacagcccagagggatgggagcgcatagccccggacagtcccagtag

SEQ ID NO: 46355 - DNA, 1398 bp, Artificial Sequence
  derived and/or modified sequence
atgctgctcctcgggcttctactgctgctgcctttgctcgcaggggctaggctcctgtggaactggtggaaactgcgtagtctgcatcttccccccctggccccagggtttctgcacctgctgcaaccagacttaccgatctacctgttgggcctgactcaaaagtttggcccaatttacagactgcacctgggtctgcaggataaactagtctccaggaactaccctgatctttccttgggggactactccttactatggaaagcccacaaaaagttaacacgctctgccctgttgttgggtattcgtgacagtatggagcccgtggtggagcagttgacccaggagttttgcgagcgcatgcgagctcagcctggaaccccagtggcaatagaagaggagttttcattgctgacctgctccatcatctgctacctcactttcggcgacaaaatcaaagacgataatctgatgccagcctactacaagtgtattcaggaggtgctcaaaacctggtcacactggtctatccagattgtcgacgttatcccattcttacgattctttccgaatcccggactccggaggcttaaacaagccatcgagaaacgggatcatatagttgagatgcagctgcggcagcacaaggaaagtcttgtagccggccagtggagagatatgatggactacatgctgcagggcgtggctcagccatcaatggaagaggggagcggccagctgctcgagggacacgtgcatatggccgccgtggacctgctgatcggcggaacggaaaccaccgccaatactctgagctgggcggtcgtttttctcctccaccaccccgagattcagcagagattacaggaagagctggaccacgaattgggcccaggagcctcatccagtagagtcccatataaagatagggcccgactccctctattgaacgcaactatagctgaagttcttagactccgtcccgtcgtccctttggcccttccacatcgtaccacccgtccctcgtccatcagcggctacgatatcccagagggcacagtgatcatacccaacctgcaaggcgctcaccttgacgagacagtctgggagagaccccatgagttttggccggaccgttttctggagccaggcaaaaacagtcgcgccctggcattcggttgcggtgcccgcgtttgtcttggcgaacccttggcccgcttggaattgttcgttgtgttaacacgcttgctccaggccttcacactcctcccaagcggcgatgccttacccagccttcagcccctgccccactgttccgttatacttaaaatgcagcccttccaggtccggttacagccccgaggtatgggggcacattcccctggccaatcccagtag

SEQ ID NO: 46356 - DNA, 1395 bp, Artificial Sequence
  derived and/or modified sequence
atgctcttactcggcctcttactcttgcccctcctagccggcgcgcgcctgctttggaattggtggaaactgcggtccttgcacctccctcctctggctcccggctttctgcacttgttgcagccagacctgcctatatatctgctcggactgacacagaaatttggtccaatctaccgcctgcacttggggctgcaggataagctggtgagcaagaattatcctgacttgtcattaggggattattccctgctgtggaaggcccataaaaagcttactcggtccgcgctcctgttgggaatcagggacagtatggaacctgtcgtcgagcaactcacccaggaattctgcgaacgcatgcgagcacagcccgggacccccgtggccattgaagaggaattctcattacttacatgcagcatcatttgctatctgacttttggcgataaaatcaaggatgacaacctcatgccagcatactacaagtgcatccaggaggtgctgaagacatggtctcattggtcaatacagatagtggacgtgatccctttcctccggttcttccccaatccggggctcagaaggctgaaacaggccatagagaagagggaccacatcgtggagatgcaattgaggcaacacaaggaaagtctagttgccggccagtggcgggatatgatggattatatgctacagggagttgcccagccgagtatggaagagggatccggccagctgcttgagggccacgtccatatggccgcggtggacctgctaattgggggaactgagacgactgctaacaccttatcctgggccgtggtgttcctgttacaccaccccgagatccagcaacgcctacaggaggagctggaccacgaactcgggcccggagcatcttcgtcgcgagttccctacaaagacagagcccgcctccccctgcttaacgctaccatagcagaagtgctgaggctgagaccagtggtccccttggctctacctcaccgaacaacccgaccctcaagcatctcgggctacgatatccccgaaggcaccgtaatcatccccaacctgcaaggagctcatttggacgagacagtatgggagcgcccacacgagttctggcccgaccgcttcctcgagccgggaaagaactctagagctctagcgtttggttgtggtgcccgtgtgtgcctcggcgagcccctcgcaaggctggaactatttgtggtgcttactcgactgttacaggcatttaccttactcccctccggcgatgcactgcctagcctccagcccctgccacattgctcggttatccttaaaatgcagccctttcaggttaggctccagccccgcgggatgggcgcacacagccccggacaaaaccagtag

SEQ ID NO: 46357 - DNA, 1398 bp, Artificial Sequence
  derived and/or modified sequence
atgctgctgttggggctgctcctattgctgcctttactcgccggagcaaggctgctctggaactggtggaaactgcgcagcctgcatctgccgcccttagccccgggttttctccacctattacaacccgatctgcccatttacctgcttggactgacgcagaaatttgggcccatctatcgcctgcacctcgggcttcaggacaagctggtttcacgaaattaccccgatctttccctgggggattacagtctactttggaaggcgcacaagaaattaacaaggtccgccctcctcctcgggattcgggacagtatggagccagtagtggaacaactgacgcaggagttttgcgaaagaatgagggctcagcctggtacaccagtggctattgaggaagagttttctttgctcacgtgttcaattatatgctacttgacctttggtgacaagattaaagatgataacctaatgccagcctactacaagtgtatccaagaggtcctaaagacatggtcgcactggagtatccagatcgtggatgtcatcccttttctgcgctttttccctaaccccggcctgcgccgtcttaaacaagcaatcgaaaaacgcgatcatatcgtggaaatgcaactgagacagcataaagaatctcttgtcgcgggacagtggagggatatgatggattacatgctccagggtgttgcccagcccagcatggaggagggctccggacagcttctagaaggtcacgttcacatggctgcagtggatctgttgatcggagggaccgagacaacagcaaacactttatcgtgggccgtagtctttctcctccatcaccctgaaatccaacagcgcctgcaggaggagctggaccacgagcttgggccgggagcttcatccagcagggtaccttataaggaccgcgctcgtcttccgctactgaacgcaaccatagccgaggtgttgcgactgcggcccgtggtgccccttgccttacctcatcggacgacacggcccagcagtattagcgggtacgacatccccgaggggaccgtgattataccaaatctgcaaggggcacacctggatgaaacggtgtgggagcggcctcatgagttttggccagatcgattcttagagcctgggaagaattcccgggctctggctttcggctgtggtgccagggtgtgcttgggtgagccgctggcccgtctggagttgtttgtagttcttacaagactccttcaggcctttaccctcctccccagcggagacgctctccccagtctgcagccccttccacattgtagtgtgattctcaaaatgcaaccattccaggtgcgacttcagcctagaggcatgggcgcccactcacctggacaaagtcagtag

SEQ ID NO: 46358 - DNA, 1395 bp, Artificial Sequence
  derived and/or modified sequence
atgttactgctcggacttctgctgctccctctgctagccggagcgcggctgctttggaattggtggaagctgcggtccctgcatcttccaccattggccccaggctttctgcatctactccagcccgacctgcctatctatttgttaggtcttacccagaagttcgggccaatatatcgcctgcacctggggctgcaggacaaactagtatctaaaaattaccctgatttatctctcggtgactactctttgctgtggaaggcccataagaaattgaccagatctgccctgctgttgggtatacgggactccatggaacctgtagtcgaacaacttacacaggagttttgcgagcgcatgcgcgcgcagccaggaacccccgtagccatcgaagaggaattttccctgctgacatgtagcataatatgttacctgacattcggtgataaaattaaagacgataatcttatgcccgcgtactacaaatgcatccaggaggtgctgaaaacttggtcccattggtcaatccagatcgtggacgttatcccctttctgcgattctttcctaaccctggcctgaggcggctgaaacaggcgatagagaagcgggaccacatcgtcgagatgcagctcaggcagcacaaggagtctttggtcgcaggacagtggcgcgacatgatggattatatgcttcaaggcgttgctcagccctccatggaagaaggatccgggcagctgttggaagggcatgtgcatatggccgcagtcgaccttctaattggggggactgagaccaccgcaaacacgctgtcgtgggcggtggtatttcttctccaccaccctgagattcaacaacggctgcaggaggaactcgatcatgaattgggccctggtgcttcttcttcccgtgtcccttataaagacagagctcgactaccactgctcaatgctaccatcgccgaggtattgcggctgcgccccgtcgtccccctcgccctgcctcatcggacaacacgtcctagctctataagcggttatgatattccagaagggaccgtcataattcccaacctccaaggggctcatctcgacgaaaccgtttgggaaagaccccacgaattttggccagaccgcttcctggagccaggaaaaaatagccgggccctcgcctttggatgcggtgcacgcgtatgtctcggagagcctctcgcccgcttggagctgtttgtggtcctcactcgtttattacaggcctttaccctcctaccttcaggagatgcgcttccctcccttcagcctctccctcattgctccgtcatcctcaagatgcaacccttccaggtgcgcctccaaccgcgcggcatgggagctcacagtccgggccagaaccagtag

SEQ ID NO: 46359 - DNA, 1398 bp, Artificial Sequence
  derived and/or modified sequence
atgctgctgcttggcctactattgctgttgccgctgctggctggcgcccgcctactttggaactggtggaaattgaggagcttacacctcttacctcttgcccctggatttttgcacctcctccagcctgacctccctatctatctcctaggactgacacaaaagttcgggcctatatatcggctgcatttgggtctacaagacaagcttgtaagcaagaattatcccgacttgagcctcggggattactctctgctgtggaaggcccacaaaaagctcacccggagtgccttactgctgggcatccgggactctatggaacctgtggttgaacagctgactcaggagttttgcgaacgaatgagggcacagccaggaacaccggtggcgatcgaggaagagttttccctgctgacctgcagtattatctgctacctgacatttggagataaaataaaagacgataatctgatgcctgcttactataagtgcattcaagaggtgctcaagacgtggtcccattggagcattcaaatcgttgacgtaatcccctttctgcgcttctttcctaatccaggtctccggcggctgaagcaagcaattgagaagagggatcacatagtggagatgcagctgcgacagcataaggaatctctggtagcgggtcagtggcgagatatgatggactatatgcttcaaggcgtggcgcagcctagcatggaggaaggctccggacagctcctggagggacacgtacatatggccgctgtagacttgttgatcggcgggacagagaccacagccaatacccttagctgggcagtggtgtttctgttacaccacccagagatccagcagagattacaagaggagctcgatcatgagctgggtccaggcgcatcctctagccgggtcccgtacaaggatcgcgcccgcctcccgcttcttaacgccaccatagctgaggtgctccgcctgcgcccggtggtccctctggccctgcctcacagaaccactaggccgtcgtcaattagcggatacgacattcctgagggtacggttattattcccaatctccagggtgctcacctcgacgagacagtttgggagcgaccacatgaattctggcccgataggtttttggagcctggcaaaaactcgagggctctcgcttttggctgcggagcgcgcgtatgtctgggagaacccctggccagactcgagctcttcgttgtccttaccagactgctgcaggctttcacactgctgccctcgggcgatgccctgccttccctgcagcccctaccccattgctccgttatcctcaaaatgcaaccttttcaggtaagactgcagcccaggggcatgggagctcactcacccgggcagaaccagtag

SEQ ID NO: 46360 - DNA, 1398 bp, Artificial Sequence
  derived and/or modified sequence
atgctgctgctgggcctgctgctgctgctgcccctgctggccggggcccggctgctgtggaactggtggaagctgcggagcctgcacctgccccccctggcccctggcttcctgcacctgctgcagcctgacctgcccatctacctgctgggcctgacccagaagtttggccccatctaccgcctgcacctgggcctgcaggacaagctggtgtccaggaactacccagacctgagcctgggggactacagcctgctgtggaaggcccacaagaagctgaccaggtctgccctgctgctgggcatccgggacagcatggagcctgtggtggagcagctgacccaggagttctgtgagaggatgagggcccagcccggcacccctgtggccatcgaggaggagttcagcctgctgacctgcagcatcatctgctacctgaccttcggggacaagatcaaggatgacaacctgatgcctgcctactacaagtgcatccaggaggtgctgaagacctggagccactggagcatccagatcgtggatgtgatccccttcctgcgcttcttccccaaccctggcctgcggcggctgaagcaggccatcgagaagagggaccacatcgtggagatgcagctgcggcagcacaaggagagcctggtggccggccagtggagggacatgatggactacatgctgcagggcgtggcccagcccagcatggaggagggcagcggccagctgctggagggccacgtgcacatggctgctgtggacctgctgattggaggaacagagaccacagccaacaccctgtcctgggccgtggtgttcctgctgcaccaccctgagatccagcagaggctgcaggaggagctggaccacgagctgggccctggggccagcagcagccgggtgccctacaaggaccgggcccggctgcccctgctgaatgccaccatcgccgaggtgctgcggctgcggcctgtggtgcccctggccctgccccacaggaccacccggcccagcagcatcagcggctatgacatccctgagggcaccgtcatcatccccaacctgcagggcgcccacctggatgaaacagtgtgggagcggccccatgagttctggccagaccgcttcctggagcccgggaagaacagccgggccctggccttcggctgtggggcccgggtgtgcctgggggagcccctggcccggctggagctgtttgtggtgctgacccggctgctgcaggccttcaccctgctgcccagcggagatgccctgcccagcctgcagcccctgccccactgcagcgtcatcctgaagatgcagcccttccaggtgcggctgcagccccggggcatgggcgcccacagccctggccagagccagtag

SEQ ID NO: 46361 - DNA, 1395 bp, Artificial Sequence
  derived and/or modified sequence
atgctgctgctgggcctgctgctgctgcccctgctggccggggcccggctgctgtggaactggtggaagctgcggagcctgcacctgccccccctggcccctggcttcctgcacctgctgcagcctgacctgcccatctacctgctgggcctgacccagaagtttggccccatctaccgcctgcacctgggcctgcaggacaagctggtgtccaagaactacccagacctgagcctgggggactacagcctgctgtggaaggcccacaagaagctgaccaggtctgccctgctgctgggcatccgggacagcatggagcctgtggtggagcagctgacccaggagttctgtgagaggatgagggcccagcccggcacccctgtggccatcgaggaggagttcagcctgctgacctgcagcatcatctgctacctgacctttggagacaagatcaaggatgacaacctgatgcctgcctactacaagtgcatccaggaggtgctgaagacctggagccactggagcatccagatcgtggatgtgatccccttcctgcgcttcttccccaaccctggcctgcggcggctgaagcaggccatcgagaagagggaccacatcgtggagatgcagctgcggcagcacaaggagagcctggtggccggccagtggagggacatgatggactacatgctgcagggcgtggcccagcccagcatggaggagggcagcggccagctgctggagggccacgtgcacatggctgctgtggacctgctgattggaggaacagagaccacagccaacaccctgtcctgggccgtggtgttcctgctgcaccaccctgagatccagcagaggctgcaggaggagctggaccacgagctgggccctggggccagcagcagccgggtgccctacaaggaccgggcccggctgcccctgctgaatgccaccatcgccgaggtgctgcggctgcggcctgtggtgcccctggccctgccccacaggaccacccggcccagcagcatcagcggctatgacatccctgagggcaccgtcatcatccccaacctgcagggcgcccacctggatgagaccgtgtgggagcggccccatgagttctggccagaccgcttcctggagcccgggaagaacagccgggccctggccttcggctgtggggcccgggtgtgcctgggggagcccctggcccggctggagctgtttgtggtgctgacccggctgctgcaggccttcaccctgctgcccagcggagatgccctgcccagcctgcagcccctgccccactgcagcgtcatcctgaagatgcagcccttccaggtgcggctgcagccccggggcatgggcgcccacagccctggccagaaccagtag

SEQ ID NO: 46362 - DNA, 1398 bp, Artificial Sequence
  derived and/or modified sequence
atgctgctgctgggcctgctgctgctgctgcccctgctggccggggcccggctgctgtggaactggtggaagctgcggagcctgcacctgctgcccctggcccctggcttcctgcacctgctgcagcctgacctgcccatctacctgctgggcctgacccagaagtttggccccatctaccgcctgcacctgggcctgcaggacaagctggtgtccaagaactacccagacctgagcctgggggactacagcctgctgtggaaggcccacaagaagctgaccaggtctgccctgctgctgggcatccgggacagcatggagcctgtggtggagcagctgacccaggagttctgtgagaggatgagggcccagcccggcacccctgtggccatcgaggaggagttcagcctgctgacctgcagcatcatctgctacctgaccttcggggacaagatcaaggatgacaacctgatgcctgcctactacaagtgcatccaggaggtgctgaagacctggagccactggagcatccagatcgtggatgtgatccccttcctgcgcttcttccccaaccctggcctgcggcggctgaagcaggccatcgagaagagggaccacatcgtggagatgcagctgcggcagcacaaggagagcctggtggccggccagtggagggacatgatggactacatgctgcagggcgtggcccagcccagcatggaggagggcagcggccagctgctggagggccacgtgcacatggctgctgtggacctgctgattggaggaacagagaccacagccaacaccctgtcctgggccgtggtgttcctgctgcaccaccctgagatccagcagaggctgcaggaggagctggaccacgagctgggccctggggccagcagcagccgggtgccctacaaggaccgggcccggctgcccctgctgaatgccaccatcgccgaggtgctgcggctgcggcctgtggtgcccctggccctgccccacaggaccacccggcccagcagcatcagcggctatgacatccctgagggcaccgtcatcatccccaacctgcagggcgcccacctggatgaaacagtgtgggagcggccccatgagttctggccagaccgcttcctggagcccgggaagaacagccgggccctggccttcggctgtggggcccgggtgtgcctgggggagcccctggcccggctggagctgtttgtggtgctgacccggctgctgcaggccttcaccctgctgcccagcggagatgccctgcccagcctgcagcccctgccccactgcagcgtcatcctgaagatgcagcccttccaggtgcggctgcagccccggggcatgggcgcccacagccctggccagaaccagtag

SEQ ID NO: 46363 - DNA, 1398 bp, Artificial Sequence
  derived and/or modified sequence
atgctgctgctgggcctgctgctgctgctgcccctgctggccggcgccagacttctgtggaattggtggaagttacggtccctgcatctgccgccgttagcccctggctttttacatctcctgcagcctgacttaccaatttatcttttaggtctcacccagaaattcggtcctatttatcgcctgcacctgggtctgcaagataaactcgtcagtagaaattatcccgacctgtctctgggcgactactccctcctgtggaaggctcacaagaagctgacccggtctgccttattgttgggaataagagactccatggagcccgtcgttgaacagctgacccaggaattttgtgagagaatgagagctcaaccagggaccccagtcgcgattgaggaggaattttccctcctcacttgctctattatttgttaccttaccttcggcgacaagatcaaggacgataacctgatgcccgcctactacaagtgcatccaggaggtcctgaagacatggagccattggagcattcagatagttgatgtaatcccctttctgaggttctttcctaatccagggctgcggaggctgaaacaggccatcgaaaagagggatcacattgtagaaatgcaactgcgccagcacaaggaatctcttgttgccggccagtggcgcgacatgatggactacatgttgcaaggagtcgcacagccctcaatggaggaaggtagcggccagctgctcgaagggcacgtacatatggcagccgtcgatttgctgataggtgggacagagaccacagccaacaccctctcgtgggctgtcgtcttcttgttgcatcaccccgaaatacagcaacgactccaggaagagctcgatcacgaactcggtccaggcgccagctcatctcgagtgccatataaagaccgcgcccgactccccctgctcaatgccaccattgcagaggtgctgcgactccgtccggtggtgccgctggccctccctcatagaacaacgaggccgtcatctatttctggttatgatattcctgaagggacggtgattattcccaacctgcaaggcgcccacctggatgagaccgtttgggagagacctcatgagttttggcccgacaggtttcttgagccaggtaaaaacagtcgagctctcgctttcggctgtggggctagagtgtgtctaggggaaccactagcccgactggagctcttcgtggttctgaccaggcttctccaagcgttcaccctactgccaagcggagacgcattgccctctctccagcctctccctcactgtagtgttatcctcaaaatgcaaccttttcaggtgcggcttcagcctcggggaatgggtgcccattctcccgggcagtcccagtag

SEQ ID NO: 46364 - DNA, 1398 bp, Artificial Sequence
  derived and/or modified sequence
atgctgctgctgggcctgctgctgctgctgcccctgctggccggcgccagacttttgtggaattggtggaagttacgatccttgcatctcccccccttggctcctggatttcttcatcttctgcagccagacctgccgatatacctcctaggcctgacgcaaaagttcggtcctatttataggttgcacctgggcttacaggacaaactggtgtctaggaattaccccgacctgagtctgggagattactcattgctttggaaggcccacaaaaagctgaccaggagcgccctgctgctgggaattcgagatagcatggagcctgttgtggagcaactaacccaagaattctgcgaaaggatgagagctcagcccggcactccagttgcaatcgaggaggaatttagcctgctcacctgctccattatttgctacttgacctttggcgataagattaaggacgacaatctgatgcccgcctattacaaatgcatccaggaagtcttaaagacatggtctcattggagcatccaaatcgtcgacgtgattcctttcctccggtttttccccaaccccggcctgaggcgtctgaagcaggccatagaaaaacgggatcacattgtagagatgcagctgcgccagcacaaagagagcctcgtcgccggtcagtggagagatatgatggattatatgctccagggggtcgctcagcccagcatggaagagggatctggacagctgcttgaaggccacgtgcatatggccgctgtcgatctgctgattggggggactgagactacggcaaacaccttgtcatgggcagtggtgtttctccttcatcaccccgaaatccagcagcgactgcaggaagaattggatcatgaattgggacccggcgcctcctcctccagagtgccttacaaagatcgggcccgattaccactactgaatgcaaccatagctgaggttttgaggctgcgacctgtggtgccactggccctgcctcacagaacaacacgaccaagctctatatctgggtacgacatccccgagggaaccgtcatcattccaaatctgcagggagcccatttagacgaaactgtgtgggagcggccacatgagttttggccggatcggtttctggaaccgggcaagaatagcagggctttagctttcggttgcggggcaagagtttgcctgggtgaaccgctggctcggctcgagttgttcgttgtgctcacccgcctgctgcaagctttcacccttctgccttccggtgacgcactgccgtctctacaacctctgccccattgtagcgttatcctgaaaatgcagccatttcaggtccggttgcaacctcgcggcatgggcgcgcatagtccggggcaatcccagtag

SEQ ID NO: 46365 - DNA, 1398 bp, Artificial Sequence
  derived and/or modified sequence
atgctgctgctgggcctgctgctgctgctgcccctgctggccggcgctcgactcttgtggaattggtggaaactgcggtccttgcatctgccgccgctggcccccggtttcctccacctgctgcagccagatctgcccatatatcttcttggcctgacacagaagttcggcccgatttaccgtctgcacctcgggttgcaggacaaattggtctcccgcaattacccggatctttctcttggggactactcactcctttggaaagcccataaaaaactaactcgttccgcccttctgctgggtattagagattcaatggagcccgttgttgagcaactgactcaggagttttgtgaacgcatgcgggcgcagcctgggacccctgtggccatagaagaggaattctcactgttgacctgctctatcatttgctatctcaccttcggtgataaaatcaaggacgataaccttatgccagcctattacaaatgtattcaagaagtgttgaaaacttggagtcactggtccatccaaattgtggacgttattccatttctgaggttctttcccaacccggggctgcgtagacttaagcaggctatcgaaaagcgcgaccatatcgttgaaatgcagctgcgccagcataaagagtccctggtggctgggcaatggcgcgatatgatggattatatgctccagggcgtcgcccaaccaagcatggaggaaggatcaggccagctgctggaaggccatgtccatatggccgccgtcgatttactcatcggtggtacggaaacgactgccaatactctgtcctgggctgtggtatttctgctgcatcaccctgaaatacagcagaggctccaagaagagctggaccatgagctgggaccaggcgcctccagttcacgcgttccatataaagatcgagctcgactcccattactgaatgcaacaatcgccgaagttctaagactcagaccagttgtgccattggctttgccgcaccgcaccactaggccaagcagtatctccggatacgatatacccgaaggtacagttattatccctaatctccaaggagcacacctggatgagacggtttgggagcggccccacgaattttggccagaccggtttttagaacctggcaaaaatagcagagccctcgctttcgggtgcggagccagggtgtgtctgggtgaaccgctggctcgactggaactgtttgttgttctgacaaggctattacaggccttcacccttctgccgagcggggatgctctgcctagtctgcaacccctgccccattgctccgtaatattaaagatgcagccgtttcaagtccgcttacagcctcgcgggatgggcgcacatagtcccggacagtcccagtag

SEQ ID NO: 46366 - DNA, 1395 bp, Artificial Sequence
  derived and/or modified sequence
atgctgctgctgggcctgctgctgctgcccctgctggccggcgcccgtctgctctggaactggtggaagctgcggtccttgcatctgccccctctcgcccccggtttcttgcatctcttgcagcctgacttacctatttatttgctaggcttaacgcagaaattcggtcccatttacagactccacctgggcctgcaagataaattggtcagtaagaactaccccgacctctctttgggcgactactctctgctgtggaaagcccacaagaaattgactcgatcagccctgcttctggggatcagggactccatggagcctgtcgtcgaacaactcactcaagagttctgcgagcggatgagggctcaacctggcaccccggttgcaattgaagaggaatttagcctccttacgtgcagcattatatgttacctcactttcggggacaagattaaggacgacaatctcatgccagcatactacaagtgtattcaggaagtcctgaagacctggtctcactggtctattcaaatcgttgatgtcatcccctttctgagattcttccccaaccccgggcttaggagactcaagcaagcaattgagaagagagaccacattgtggaaatgcagctccggcagcataaagaatcactggtggcgggccagtggagagacatgatggactacatgttgcagggagttgcgcagccatctatggaagaaggaagcggccagctcttggagggacacgtacacatggcggccgtggacttgctcattggaggaaccgaaaccacggctaacacactgtcgtgggccgtggtttttttgctgcaccaccctgaaatacagcagcgcctccaagaagaacttgatcacgagctcggccctggagcctctagcagccgcgttccctacaaggacagagctagactgcccctgctgaatgctacaatcgccgaagtactgcgcctgcggccagtggttcctctcgcactcccccacagaacaacgcgaccgagttctatctccggttatgacattccagaggggacggtcatcatacccaacctgcagggcgcacatctagacgaaacagtgtgggaacgcccgcatgaattttggccggatcggtttcttgagcctggcaaaaatagccgtgcactagcgtttgggtgtggagcacgcgtgtgccttggcgagccccttgcaaggctggaactgtttgttgtgctaacaaggctgctgcaggctttcactctgctcccctccggggacgctctgcctagtctgcagccgctgccgcattgtagtgtcatcctcaaaatgcagcccttccaggtccggcttcagcctcgcggcatgggggctcatagtcccggtcaaaaccaatag

SEQ ID NO: 46367 - DNA, 1398 bp, Artificial Sequence
  derived and/or modified sequence
atgctgctgctgggcctgctgctgctgctgcccctgctggccggcgcccgtctgctgtggaactggtggaaacttcgctctctgcatttacccccgttggctccaggctttctgcatctgttacagcccgatcttcccatttatctcctggggctcacccagaaattcggaccaatctataggctccacctcggcctgcaggataaactggtgagtcgcaattatcccgatcttagcctgggggattacagcctcctgtggaaggcccataagaagttgacccggtcagcacttttgttaggaatacgcgattctatggagccagtggtggagcagcttacccaggagttctgcgaaaggatgagagcacagcctggcactcccgtcgcaattgaagaggagtttagtctcctcacttgctctatcatttgttatcttacctttggcgataagatcaaggacgacaatttgatgccagcatactataagtgcattcaggaggtactgaaaacatggtcccattggtctattcagatcgtggatgtcatccctttcctgcggttcttccctaatccagggctgagacggttgaagcaggccattgagaagagagaccatatagtcgaaatgcagctcagacaacacaaagagtcactggtagctgggcagtggcgggacatgatggattatatgttacagggcgttgcccagccgagtatggaagagggaagtgggcagcttctggaggggcatgtgcatatggctgctgtggacctgctgatcgggggcaccgaaacaacagcgaacacgctttcgtgggccgttgtcttccttcttcaccacccagagattcagcagaggcttcaggaggagttggaccatgagctgggtcccggagcatccagctccagagtcccttataaagaccgggccagactccctttgttaaacgcaaccatcgccgaggtgctcagattaagacctgtcgtgcctctcgcactgccgcacaggaccacccgcccctcatctatttcgggttatgatattccagaagggacagtcatcattcctaacttgcaaggcgcacacttagatgaaacagtatgggagcgaccccatgaattctggcccgacagattcctggaaccagggaagaatagtcgggcacttgcctttggttgcggcgccagagtgtgcctgggagagcctctcgcgcgccttgaactgtttgtggtactgactaggcttctgcaggcctttactctgcttccaagcggtgatgcgctgccatccttacagcccctacctcattgctccgttatcctgaagatgcagccgtttcaggtgaggcttcagcctaggggcatgggggctcacagccctggccaatctcagtag

SEQ ID NO: 46368 - DNA, 1395 bp, Artificial Sequence
  derived and/or modified sequence
atgctgctgctgggcctgctgctgctgcccctgctggccggcgccaggttactctggaattggtggaagctgcgctccctgcaccttcctcctctagcccccggttttctgcacctcctacagcctgacctgcctatttacctgctcggcctcacgcagaaatttggtcccatatatagattacaccttgggctgcaggacaagcttgttagtaaaaactatcctgacctgagcctaggggactatagtctgctgtggaaagcacacaaaaagctcacaagatcagctttactgctgggtattcgggacagcatggagcccgtggttgagcagctaacgcaagaattttgcgaaaggatgagggctcagccagggacccctgtcgccatagaggaagagttttcgttactcacttgttctatcatttgttacctgactttcggagacaagattaaggatgacaacctaatgcccgcctactataagtgtattcaggaggttcttaagacctggagccattggtcgattcaaatagtggatgtgatcccttttttgaggttttttccaaatccagggctccgtcgactgaagcaggctatcgaaaagcgagatcatattgtggagatgcagttacgccaacacaaggagtccctggtggccggtcagtggcgcgacatgatggattacatgctccagggtgtagcccagcccagcatggaagaggggagtggccaactgctggagggccatgtgcatatggccgcagtggacctattaatagggggaacagagaccaccgcgaacactttgtcctgggccgtggtgttcctgctgcatcatccagaaatccagcagaggctccaggaggaacttgaccatgaacttggaccaggagcatcttcaagtcgtgtgccgtacaaggacagagcaagattaccccttctgaatgccaccatcgctgaggttctgaggctgagacccgtggtgcccctcgctcttccacaccggactacaaggccttctagcataagtggatatgacatccccgagggcaccgttattatcccaaacctccagggggcacacctggacgagacagtctgggaacgccctcatgagttttggcctgatcggttcctggaacctggaaaaaacagccgggcactcgcctttggatgtggcgcacgggtctgtttgggcgagcccttagccaggctggagctctttgtggtgctgaccaggcttctacaggctttcacactactcccctcaggagatgcactcccttctctgcagccacttccacactgcagcgtgatactcaaaatgcagcctttccaggtgcgtcttcagccacgaggaatgggagcacatagtcctggtcagaatcagtag

SEQ ID NO: 46369 - DNA, 1398 bp, Artificial Sequence
  derived and/or modified sequence
atgctgctgctgggcctgctgctgctgctgcccctgctggccggcgcacggctgttatggaactggtggaagttgcgctctctgcaccttctgccgctggcgccagggtttctacacctcctgcagccagacctcccaatatacctactcgggctgactcagaaattcggacccatttaccggctccatctcggacttcaagacaaactggtttcaaaaaactaccctgacttatcactgggagactattctttgctgtggaaagcccataagaaattgacccgctcggcactgctcctgggcatcagggattctatggaaccggttgtcgagcagttgacccaagagttctgtgagagaatgagggcgcagcctgggactcccgtcgccatagaagaagagttcagccttctgacttgctccattatctgttacctcacctttggcgataagatcaaggacgataacctgatgcctgcgtattataagtgtatccaggaggtactgaaaacgtggtctcactggagcattcagatcgtggatgtgattcctttcttaaggttctttccgaatccaggcctccgaaggttgaaacaggccatcgagaagagagaccacatcgtggaaatgcagcttagacagcataaggagtctctggttgccggtcagtggagagatatgatggactatatgctgcaaggcgtggctcagccaagcatggaggaaggcagtggccaactgctggaagggcatgtgcacatggctgcagtcgatctcctaatcggcggtactgaaaccacggccaatacattgtcgtgggcagtggtgtttttactgcatcaccccgagatacagcagcgcctgcaggaagagctcgaccacgagctagggcccggggcttctagctcaagagtcccctataaagatcgggctcggttgccccttctaaatgccacaattgccgaggtgctgaggttgagacctgtcgtgcctctggccttgcctcatcgcacaacgcgcccttcctctatttccggctatgacatcccggagggtaccgtgattatcccaaacctccagggagctcacctggacgagactgtttgggaaagacctcacgaattttggccagatcgcttcctcgaacccgggaagaacagcagagctctcgcattcggatgcggagctcgagtgtgtttgggagagccactcgccaggctggaattattcgtggtcctgactaggctgctgcaggcctttaccttattaccctcgggcgacgcgctgccctctcttcagccgctgccccactgctccgtgattcttaagatgcagcctttccaggtgcgtctacaacctagagggatgggcgcccattcaccaggacagaatcagtag

SEQ ID NO: 46370 - DNA, 1398 bp, Artificial Sequence
  derived and/or modified sequence
atgctcctgctgggccttctgttgcttctacctctgttagccggagctaggctcttgtggaactggtggaaacttcgtagcctgcacttgccaccactggcccctggttttttacatctgttacagccagacttgccgatctacttacttggtttgacacaaaaattcggcccaatctatagactgcatctcggactgcaggacaaactggttagtaggaattatccagatctctccctaggcgactattctctcttatggaaagcccacaagaagctgacgagaagtgcgctgctgctgggaattcgggatagcatggagcccgtggtagagcagctgacacaggagttttgcgagcggatgcgcgctcaacccggaacccccgtagcaatcgaggaggaattcagtctgctgacatgcagtatcatctgctatctgactttcggagataagattaaggacgataacctcatgcccgcttattataagtgcatccaagaggtgctgaagacctggagccactggtcgatccaaattgtcgatgtgataccattcttgcggtttttcccaaatccagggctgcgtaggctcaaacaggctattgaaaaacgggatcacatcgtggagatgcagctccgccagcataaggagtccctggtcgctggtcagtggcgagatatgatggactatatgctccaaggggtggctcaaccttcaatggaggaaggcagcggccagctgctagagggacacgtacatatggctgccgtggatctgctaatcgggggtactgagactactgcaaacaccttgtcttgggccgtagtatttcttttacaccacccagagattcagcaacggctccaggaggagctggaccacgagctgggcccaggggcttcctcatctagagtgccctataaagaccgagcacgccttccgctgctcaatgctacaatcgccgaggttctacggcttcggcctgtcgtgccactggcgctgccacacagaactactaggcctagctctattagcggctatgacattccggaagggaccgttatcataccgaatctacagggggcacaccttgacgaaactgtatgggaaagacctcacgaattttggccggataggttcttggaacccggaaaaaacagtagagctctggcttttgggtgcggtgcacgggtgtgtctcggcgagcccctagcaaggctggagctgtttgtggtactcacccgactcctgcaagctttcaccctccttccatctggggacgctttaccctctctccagccgcttccccactgctccgtaatcctgaagatgcagccatttcaggttcgccttcaaccaagaggcatgggtgcccacagccccggtcagagtcaatag

SEQ ID NO: 46371 - DNA, 1398 bp, Artificial Sequence
  derived and/or modified sequence
atgttactcctaggactgctgctgttgcttccactgctggccggagccaggctgctgtggaactggtggaagttgcgatctctccatctcccccctctggcccctgggtttctccatctcttgcagccagacctgcctatctatctgttaggcctcacccagaagtttggcccaatataccgtctccacctggggctccaggataagctggttagtcgaaattacccggacctgtccctaggcgactatagtctgctttggaaggcacataagaagttaacacggagcgccctgctgttaggtatccgggatagcatggaaccggttgtggagcaactgacccaggagttttgcgaacgcatgcgtgcccagcccggtacacccgtcgccatagaagaagagtttagtttgttaacctgtagcatcatttgctacctgacattcggggataagattaaggatgacaatctgatgcccgcttactacaaatgcatacaagaggtcctgaaaacgtggtcgcactggagcatccaaattgtcgacgtcataccgtttctgcggttctttcctaatcccggactgcgacgacttaagcaggctatcgaaaagcgcgaccacattgtggaaatgcaactgcggcagcataaagaatccctggttgctggccagtggagagacatgatggattacatgctgcagggggtggcccagcctagcatggaggagggtagtggccagttgctcgaagggcacgtgcatatggcagcagttgatctactgatcgggggaaccgagaccacagccaatactctgagctgggccgtggtgtttctactgcaccaccccgagatccagcagcgactgcaagaagagctggaccacgagttaggtccaggagcgtctagtagcagagttccttacaaggacagggctagattacccctcttgaatgcaaccatcgcggaagtgttacgcctgcggccagtcgtgcctctggcactgcctcacaggacgactaggccgtcgagtatatccggttacgacataccagaggggaccgtgattattcctaacctccaaggcgctcatttagacgagactgtgtgggaacggccacacgaattctggcctgaccgttttttggagccaggcaagaactcccgtgcactagcttttggatgtggagcccgagtgtgtctcggagagccattggcacgcctggaattgtttgtggtgctaactcggcttcttcaggcgttcactctccttcccagcggagacgccttgccttctctgcagcctcttcctcattgcagtgtcattctgaagatgcagcctttccaggttcgcctgcaacccagaggcatgggagctcacagcccgggacagagccagtag

SEQ ID NO: 46372 - DNA, 1398 bp, Artificial Sequence
  derived and/or modified sequence
atgttgttgctgggtctgctgctactgctgccccttttggccggtgctcgtttactctggaattggtggaagctgcgctcgctgcatttgccccctctcgctcccggattcttacatctgctgcagcctgacttaccaatctatctcctggggctaacacaaaaatttggccctatatacaggctccatttgggtctgcaggacaaactcgtcagccgcaactaccccgatctcagcctgggagattacagccttctttggaaggcacacaagaaactcacccgctcagccctattgcttgggatcagagatagcatggagcccgtggtcgaacagctgacacaagagttttgcgagcggatgagggctcagccaggaacacctgtggccatcgaagaagagttctctttactgacctgttcaataatatgctacttgactttcggcgataaaattaaggacgacaacctgatgcccgcttattacaaatgtattcaagaggtcctgaagacatggagtcactggtcgatacagatcgtcgacgtcattccgttcctccggttttttccaaaccccggtcttcgaaggctgaagcaagctatcgaaaagagggatcacatcgtggagatgcagctaagacaacacaaggaaagtctggtagcagggcagtggcgggacatgatggattacatgttgcagggtgtggcacagccgtctatggaggaggggagcggccagttactggaggggcacgtgcacatggccgcagtggacctcctcatcggcggaaccgagaccacagccaacacactcagttgggctgtcgtgttcctgctgcaccatcccgagatccagcaaagactccaagaggaactcgatcacgagcttggcccaggcgcttcttcctctcgcgtgccgtacaaagaccgcgctcgtcttccactcctgaacgcaacaatcgccgaagttctgcgcctgagacccgtggtgcctctggcacttccacatcgcacaacaaggccctccagcattagcgggtatgacatccccgaggggaccgtcataatccctaacctgcagggggctcacctggacgagacagtctgggaacgaccccacgagttttggccggacagatttcttgaacctggaaaaaactctcgcgcactggccttcgggtgcggcgcacgggtctgccttggtgaaccccttgcacggctcgaactttttgtggtgttaacccggctgttgcaggcatttacattgctgcccagcggggatgccttaccatccctacaacccctgccacactgtagcgtgattctcaagatgcagccattccaggtccgcctacaacctagaggaatgggagcacacagccctggccaatcccaatag

SEQ ID NO: 46373 - DNA, 1395 bp, Artificial Sequence
  derived and/or modified sequence
atgcttctcctgggccttctactgttgcccctgctggctggagccagactcttatggaattggtggaagctccggagcctgcacctcccaccacttgccccaggcttcctgcacctgctccaacctgatctgcccatctacctgttgggactaactcagaaattcgggcctatctatcgacttcacctgggcctgcaggacaaactggtttctaagaactacccagacctgagtctgggagattatagcctgctgtggaaggctcacaagaagttaacccgatccgccctgctgcttggtatccgcgattcaatggaacccgtggtagaacaactcacccaggagttctgcgagcggatgagagcccagccaggaacgccggtggcaattgaagaggagttcagcttgctgacctgctcgatcatctgctatctgaccttcggggacaaaataaaggacgacaacctgatgcctgcctattataagtgtatccaagaagtgctgaagacctggagccactggtctattcagattgtggatgtgattccttttttaagattttttcctaaccctggtttgcgcaggctgaaacaggcgattgagaagcgggaccatatcgtggagatgcagctgagacagcacaaagagagtctggtagccggacagtggcgcgacatgatggattatatgctgcagggggttgctcagcctagcatggaggaggggagcggccagctgcttgaggggcacgtacacatggcagctgtagatctcctgattggcggtacagagacaaccgccaatactttgtcctgggccgtggtgttcttactgcatcacccagagatacaacagaggctgcaggaagaactggaccacgaactgggccctggcgcatcctccagcagggtgccttataaggaccgagctcggctacccctgctgaatgcaactatcgccgaggttttgcgcctcagaccggtggtccccctcgcccttccacatcgaactacccgccctagcagtatttccggctatgacatacccgaaggcacggtgatcattcccaatctccaaggcgctcacttagacgagacagtgtgggaacggccacatgagttctggcctgatcggtttctagagccaggtaagaacagccgagctctggcatttggttgtggagccagagtgtgtctgggcgagcccctggcgagactcgaactttttgtcgttttaaccaggttactgcaagcattcaccttactccctagcggggacgccttaccctctcttcaaccactaccacattgctctgtgattctcaaaatgcagcctttccaggttagactgcaacctcggggtatgggggctcatagtcctggacagaatcagtag

SEQ ID NO: 46374 - DNA, 1398 bp, Artificial Sequence
  derived and/or modified sequence
atgctattgctgggacttctgttgcttttgccactgctggccggagccagactgctctggaactggtggaaactgaggtctctgcacttaccacctctggctcctgggttcctgcatcttttgcagccagacctccctatctacctcctgggacttacacagaaattcgggcctatttatcgattacacctggggttgcaggacaaactcgtgagcaggaactatccagatttgagcttgggagattattccctgctctggaaggcacacaagaaactgactcggagtgctctgctcctcggcatccgggacagcatggaaccagtggtggaacagcttactcaggagttctgtgagcggatgcgagcccaaccaggcactccggttgcaatagaggaagagttcagccttctcacctgcagcattatctgctacctgaccttcggagacaaaattaaagatgataacctgatgcccgcatattacaaatgcatccaggaagtgctgaagacctggtcgcattggagcatccagattgtcgacgtcattcctttcctgagattctttcctaatccgggtctgagacggctgaaacaagctatcgagaagcgcgaccatattgtggaaatgcagttgcgccaacataaggaatccctggtcgctggccaatggcgcgacatgatggattatatgctgcagggcgttgcacaaccctcaatggaggagggctccggacaacttttggagggacacgtgcacatggccgctgttgatcttctgattgggggaactgagacaactgccaatacattgtcctgggctgtggtatttctgttgcaccatccagagatccaacagcggctgcaggaggagctagaccacgaactagggccaggtgccagctctagccgggtgccttacaaggacagagctcgactacccttactgaacgcaactattgctgaggtacttcgattgcgtccagtggtgcccttagcactgccccataggaccacaagaccgagtagtataagtggctacgatatcccagaagggactgtaattatcccaaacctacagggcgctcatctcgacgaaacagtctgggaacggccacatgagttctggcccgaccgcttcctcgagcccggaaaaaattcccgtgcactggcctttggctgtggggcacgcgtctgtttaggagagcctttagctagattggagctgtttgtggtgttgacacggctgttgcaagcatttacactgctcccgagtggggacgctctgccttccctccaaccgctgcctcattgttcggtgattttaaagatgcaacccttccaggttcggctccagccaaggggaatgggcgcacatagtccaggtcagtcccagtag

SEQ ID NO: 46375 - DNA, 1395 bp, Artificial Sequence
  derived and/or modified sequence
atgctgctgttgggactgctcctgctgccactgctggccggagcgaggctgctgtggaattggtggaaactacgttctctccacttgccaccactggcacctgggttcttacacctcctgcaaccagatctgccgatctatctgttaggcttgactcagaaattcggtcctatctacagactgcatttgggtctccaggataaactggtctctaaaaactacccagatctctccctgggcgactatagcctgctttggaaagcccataagaagttaacccggtcagctctgctgcttggcattagggattccatggagcccgtggtcgagcagttgacccaggagttctgtgagcgaatgcgggctcagcctggcactccagtagccattgaggaagagttcagtctgctgacatgtagtattatttgctacctgacctttggggacaagattaaggatgacaatctgatgcccgcatattataagtgtattcaggaagtgcttaaaacatggagccactggagcatacagattgtggacgtgataccttttctgcgcttcttcccaaaccccggactgcgcagactgaaacaggctatcgagaagcgggaccatatagtagaaatgcagttacggcagcataaagaatcccttgtagccggacagtggagagacatgatggattacatgctgcagggagtggctcagcctagcatggaagaagggtccggtcaattgctggagggccatgtccacatggccgctgtggacctgctgatcggcggtaccgaaaccacagccaacaccctaagctgggctgtggtatttctgcttcatcatcctgaaattcagcagagactgcaggaagagctagatcatgagctgggacctggagcctcctcgtcccgcgtgccatacaaagaccgggcaagactgccattgctcaacgccactattgcagaagtgctgagactgagacctgttgtgcctctggccctcccccaccgaactacccggccttcaagtatcagtgggtacgacatccctgaggggacagtgatcattcctaatttgcagggcgcacatctggacgaaacagtgtgggagcggcctcacgagttctggccggaccgattcttggagccagggaaaaattcaagagcactggctttcggatgtggagccagagtgtgcctcggtgaaccacttgccagactcgaactgttcgttgtgctcacgcgcctgctgcaggccttcaccctgctcccatctggagacgcgctaccatccctccaacctcttccccattgctcagtgatcctcaagatgcagccattccaggttagattacagcccaggggcatgggtgcacattcacccggacagaaccagtag

SEQ ID NO: 46376 - DNA, 1398 bp, Artificial Sequence
  derived and/or modified sequence
atgctcctgctgggattactattgctgctgcccctcctcgccggtgccaggcttttatggaactggtggaagctgcgatctctgcatcttctgcccctggcacccggatttcttcatcttcttcagcccgacctgcccatctaccttttgggcttgacccaaaagttcgggcctatttacagactgcatctcggtctgcaggataagctggtgagtaagaattatccagatctctcacttggagactacagcctcttatggaaggctcataagaagctgacgcgctcggcattgttgctggggatacgtgactctatggagcccgtagtagagcaactgacacaggaattctgcgagcgcatgcgcgcacagcccggtaccccagtcgctatcgaggaagagttttccctcctgacctgctctataatctgctatttgacttttggagacaagattaaagatgacaacttgatgcctgcatattataaatgcatccaggaagtgctaaagacttggtcacactggtctatccaaatcgtggatgtcatcccctttctgcggttcttcccaaatcccggactgagaaggcttaagcaggctatcgagaaacgagaccatatcgtggaaatgcaactcagacagcacaaggagtctttggttgctggtcagtggagagatatgatggattatatgcttcagggggtggcccagcctagtatggaggaaggctccggacagttgctggagggtcatgtgcacatggctgcagtcgacctactgatcgggggtaccgaaaccaccgcaaatactctatcttgggcagttgtcttcctgctgcaccaccccgagatccagcagaggctccaggaggagctggatcatgagctcgggccaggcgcatcctcaagtcgagtgccctacaaggatcgggcaagactgcccctgctgaatgcgaccattgcagaggttctgcgcttgaggccagtagtgccgctggcactcccacaccgcactacaaggccttcttctatctccggatatgacatccccgaaggaacggtgatcatacctaacctacagggagcacacctcgacgaaacggtgtgggagagaccacacgagttttggcccgaccgtttcctggaacccggtaaaaactcacgggctctggcctttggatgcggtgccagggtctgtttgggcgagccgttagcaaggcttgaactcttcgttgtcctgacaaggctgctgcaggccttcacactgctgccatccggtgacgcactgcctagcttgcagcctctgccacactgttcagtaatcctcaaaatgcagccatttcaggtgcgcttacagcccagaggaatgggtgcgcacagtccgggacagaatcaatag

SEQ ID NO: 46377 - DNA, 1942 bp, Artificial Sequence
  derived and/or modified sequence
gtctcgccatgctgctcctgggcctgctgctgctgctgcccctgctggctggcgcccgcctgctgtggaactggtggaagctccggagcctccacctcccgcctcttgccccgggcttcttgcacttgctgcagcccgacctcccaatctatctgcttggcctgactcagaaattcgggcccatctacaggctccaccttgggctgcaagacaagctggtgtctaggaactacccggacctgtccttgggagactactccctgctctggaaagcccacaagaagctcacccgctcagccctgctgctgggcatccgtgactccatggagccagtggtggagcagctgacccaggagttctgtgagcgcatgagagcccagcccggcacccctgtggccattgaggaggaattctctctcctcacctgcagcatcatctgttacctcaccttcggagacaagatcaaggacgacaacttaatgcctgcctattacaaatgtatccaggaggtgttaaaaacctggagccactggtccatccaaattgtggacgtgattccctttctcaggttcttccccaatccaggtctccggaggctgaagcaggccatagagaagagggatcacatcgtggagatgcagctgaggcagcacaaggagagcctcgtggcaggccagtggagggacatgatggactacatgctccaaggggtggcgcagccgagcatggaagagggctctggacagctcctggaagggcacgtgcacatggctgcagtggacctcctgatcggtggcactgagaccacagcaaacaccctctcctgggccgtggtttttttgcttcaccaccctgagattcagcagcgactgcaggaggagctagaccacgaactgggccctggtgcctccagctcccgggtcccctacaaggaccgtgcacggctgcccttgctcaatgccaccatcgccgaggtgctgcgcctgcggcccgttgtgcccttagccttgccccaccgcaccacacggcccagcagcatctccggctacgacatccctgagggcacagtcatcattccgaacctccaaggcgcccacctggatgagacggtctgggagaggccacatgagttctggcctgatcgcttcctggagccaggcaagaactccagagctctggccttcggctgcggtgcccgcgtgtgcctgggcgagccgctggcgcgcctggagctcttcgtggtgctgacccgactgctgcaggccttcacgctgctgccctccggggacgccctgccctccctgcagcccctgccccactgcagtgtcatcctcaagatgcagcctttccaagtgcggctgcagccccgggggatgggggcccacagcccgggccagagccagtgatggggcaggaccgatgccagccgggtacctcagtttctcctttattgctcctgtacgaacccctcccctcccccctgtaaacacagtgctgcgagatcgctggcagagaaggcttcctccagcggctgggtggtgaaggaccctggctcttctctcggggcgacccctcagtgctcggcagtcatactggggtgcgagagaggtgggcagcagctcagcctccccccgctggggagcgaaagtttcttggtctcagcttcatttccgtgaagggcaccgagaactcgaagcccttccagtggtaccagctcactccctgggaaaggggttgtcaagagagagtcaaagccggatgtcccatctgctcttcccgttccccttaaggaggtagctcccagcactcaaccaacctccccgcagagctcccttcctgaccctccgctgcagaggattgaggcttaattctgagctggccctttccagccaataaatcaactccagctccctctgcgaggctggcatgattgttccatttc

SEQ ID NO: 46378 - DNA, 1942 bp, Artificial Sequence
  derived and/or modified sequence
gtctcgccatgctgctcctgggcctgctgctgctgctgcccctgctggctggcgcccgcctgctgtggaactggtggaagctccggagcctccacctcccgcctcttgccccgggcttcttgcacttgctgcagcccgacctcccaatctatctgcttggcctgactcagaaattcgggcccatctacaggctccaccttgggctgcaagacaagctggtgtctaggaactacccggacctgtccttgggagactactccctgctctggaaagcccacaagaagctcacccgctcagccctgctgctgggcatccgtgactccatggagccagtggtggagcagctgacccaggagttctgtgagcgcatgagagcccagcccggcacccctgtggccattgaggaggaattctctctcctcacctgcagcatcatctgttacctcaccttcggagacaagatcaaggacgacaacttaatgcctgcctattacaaatgtatccaggaggtgttaaaaacctggagccactggtccatccaaattgtggacgtgattccctttctcaggttcttccccaatccaggtctccggaggctgaagcaggccatagagaagagggatcacatcgtggagatgcagctgaggcagcacaaggagagcctcgtggcaggccagtggagggacatgatggactacatgctccaaggggtggcgcagccgagcatggaagagggctctggacagctcctggaagggcacgtgcacatggctgcagtggacctcctgatcggtggcactgagaccacagcaaacaccctctcctgggccgtggtttttttgcttcaccaccctgagattcagcagcgactgcaggaggagctagaccacgaactgggccctggtgcctccagctcccgggtcccctacaaggaccgtgcacggctgcccttgctcaatgccaccatcgccgaggtgctgcgcctgcggcccgttgtgcccttagccttgccccaccgcaccacacggcccagcagcatctctggctacgacatccctgagggcacagtcatcattccgaacctccaaggcgcccacctggatgagacggtctgggagaggccacatgagttctggcctgatcgcttcctggagccaggcaagaactccagagctctggccttcggctgcggtgcccgcgtgtgcctgggcgagccgctggcgcgcctggagctcttcgtggtgctgacccgactgctgcaggccttcacgctgctgccctccggggacgccctgccctccctgcagcccctgccccactgcagtgtcatcctcaagatgcagcctttccaagtgcggctgcagccccgggggatgggggcccacagcccgggccagagccagtgatggggcaggaccgatgccagccgggtacctcagtttctcctttattgctcccgtacgaacccctcccctcccccctgtaaacacagtgctgcgagatcgctggcagagaaggcttcctccagcggctgggtggtgaaggaccctggctcttctctcggggcgacccctcagtgctcggcagtcatactggggtgcgagagaggtgggcagcagctcagcctccccccgctggggagcgaaagtttcttggtctcagcttcatttccgtgaagggcaccgagaactcgaagcccttccagtggtaccagctcactccctgggaaaggggttgtcaagagagagtcaaagccggatgtcccatctgctcctcccgttccccttaaggaggtggctcccagcactcaaccaacctccccgcagagctcccttcctgaccctctgccgcagaggattgaggcttaatcctgagctggtcctttccagccaataaatcaactccagctccctctgcgaggctggcatgattgttccatttc

SEQ ID NO: 46379 - DNA, 1914 bp, Artificial Sequence
  derived and/or modified sequence
gtctcgccatgctgctcctgggcctgctgctgctgctgcccctgctggctggcgcccgcctgctgtggaactggtggaagctccggagcctccacctcccgcctcttgccccgggcttcttgcacctgctgcagcccgacctccccatctatctgcttggcctgactcagaaattcgggcccatctacaggctccaccttgggctgcaagacaagctggtgtctaggaactacccggacctgtccttgggagactactccctgctctggaaagcccacaagaagctcacccgctcagccctgctgctgggcatccgtgactccatggagccagtggtggagcagctgacccaggagttctgtgagcgcatgagagcccagcccggcacccctgtggccattgaggaggaattctctctcctcacctgcagcatcatctgttacctcaccttcggagacaagatcaaggacgacaacttaatgcctgcctattacaaatgtatccaggaggtgttaaaaacctggagccactggtccatccaaattgtggacgtgattccctttctcaggttcttccccaatccaggtctccggaggctgaagcaggccatagagaagagggatcacatcgtggagatgcagctgaggcagcacaaggagagcctcgtggcaggccagtggagggacatgatggactacatgctccaaggggtggcgcagccgagcatggaagagggctctggacagctcctggaagggcacgtgcacatggctgcagtggacctcctgatcggtggcactgagaccacagcaaacaccctctcctgggccgtggtttttttgcttcaccaccctgagattcagcagcgactgcaggaggagctagaccacgaactgggccctggtgcctccagctcccgggtcccctacaaggaccgtgcacggctgcccttgctcaatgccaccatcgccgaggtgctgcgcctgcggcccgttgtgcccttagccttgccccaccgcaccacacggcccagcagcatctccggctacgacatccctgagggcacagtcatcattccgaacctccaaggcgcccacctggatgagacggtctgggagaggccacatgagttctggcctgatcgcttcctggagccaggcaagaactccagagctctggccttcggctgcggtgcccgcgtgtgcctgggcgagccgctggcgcgcctggagctcttcgtggtgctgacccgactgctgcaggccttcacgctgctgccctccggggacgccctgccctccctgcagcccctgccccactgcagtgtcatcctcaagatgcagcctttccaagtgcggctgcagccccgggggatgggggcccacagcccgggccagagccagtgatggggcaggaccgatgccagccgggtacctcagtttctcctttattgctcccgtacgaacccctcccctcccccctgtaaacacagtgctgcgagatcgctggcagagaaggcttcctccagcggctgggtggtgaaggaccctggctcttctctcggggcgacccctcagtgctcggcagtcatactggggtgcgagagaggtgggcagcagctcagcctccccccgctggggagcgaaagtttcttggtctcagcttcatttccgtgaagggcaccgagaactcgaagcccttccagtggtaccagctcactccctgggaaaggggttgtcaagagagagtcaaagccggatgtcccatctgctcttcccgttccccttaaggaggtagctcccagcactcaaccaacctccccgcagagctcccttcctgaccctccgctgcagaggattgaggcttaattctgagctggccctttccagccaataaatcaactccagctccctc

SEQ ID NO: 46380 - DNA, 1939 bp, Artificial Sequence
  derived and/or modified sequence
gtctcgccatgctgctcctgggcctgctgctgctgcccctgctggctggcgcccgcctgctgtggaactggtggaagctccggagcctccacctcccgcctcttgccccgggcttcttgcacttgctgcagcccgacctcccaatctatctgcttggcctgactcagaaattcgggcccatctacaggctccaccttgggctgcaagacaagctggtgtctaagaactacccggacctgtccttgggagactactccctgctctggaaagcccacaagaagctcacccgctcagccctgctgctgggcatccgtgactccatggagccagtggtggagcagctgacccaggagttctgtgagcgcatgagagcccagcccggcacccctgtggccattgaggaggaattctctctcctcacctgcagcatcatctgttacctcaccttcggagacaagatcaaggacgacaacttaatgcctgcctattacaaatgtatccaggaggtgttaaaaacctggagccactggtccatccaaattgtggacgtgattccctttctcaggttcttccccaatccaggtctccggaggctgaagcaggccatagagaagagggatcacatcgtggagatgcagctgaggcagcacaaggagagcctcgtggcaggccagtggagggacatgatggactacatgctccaaggggtggcgcagccgagcatggaagagggctctggacagctcctggaagggcacgtgcacatggctgcagtggacctcctgatcggtggcactgagaccacagcaaacaccctctcctgggccgtggtttttttgcttcaccaccctgagattcagcagcgactgcaggaggagctagaccacgaactgggccctggtgcctccagctcccgggtcccctacaaggaccgtgcacggctgcccttgctcaatgccaccatcgccgaggtgctgcgcctgcggcccgttgtgcccttagccttgccccaccgcaccacacggcccagcagcatctccggctacgacatccctgagggcacagtcatcattccgaacctccaaggcgcccacctggatgagacggtctgggagaggccacatgagttctggcctgatcgcttcctggagccaggcaagaactccagagctctggccttcggctgcggtgcccgcgtgtgcctgggcgagccgctggcgcgcctggagctcttcgtggtgctgacccgactgctgcaggccttcacgctgctgccctccggggacgccctgccctccctgcagcccctgccccactgcagtgtcatcctcaagatgcagcctttccaagtgcggctgcagccccgggggatgggggcccacagcccaggccagaaccagtgatggggcaggaccgatgccagccgggtacctcagtttctcctttattgctcccgtacgaacccctcccctcccccctgtaaacacagtgctgcgagatcgctggcagagaaggcttcctccagcggctgggtggtgaaggaccctggctcttctctcggggcgacccctcagtgctcggcagtcatactggggtgcgagagaggtgggcagcagctcagcctccccccgctggggagcgaaagtttcttggtctcagcttcatttccgtgaagggcaccgagaactcgaagcccttccagtggtaccagctcactccctgggaaaggggttgtcaagagagagtcaaagccggatgtcccatctgctcttcccgttccccttaaggaggtagctcccagcactcaaccaacctccccgcagagctcccttcctgaccctccgctgcagaggattgaggcttaattctgagctggccctttccagccaataaatcaactccagctccctctgcgaggctggcatgattgttccatttc

SEQ ID NO: 46381 - DNA, 2024 bp, Artificial Sequence
  derived and/or modified sequence
tgggaaggcacctgagggtggggtcaagggaggccccaaaacagtctacacagcaggagggatggctggggctcttgagctataagtggcacctcagggccctgacgggcgtcttgccatgctgctcctgggcctgctgctgctgctgcccctgctggctggcgcccgcctgctgtggaactggtggaagctccggagcctccacctcctgcctcttgccccgggcttcttgcacctgctgcagcccgacctccccatctatctgcttggcctgactcagaaattcgggcccatctacaggctccaccttgggctgcaagacaagctggtgtctaagaactacccggacctgtccttgggagactactccctgctctggaaagcccacaagaagctcacccgctcagccctgctgctgggcatccgtgactccatggagccagtggtggagcagctgacccaggagttctgtgagcgcatgagagcccagcccggcacccctgtggccattgaggaggaattctctctcctcacctgcagcatcatctgttacctcaccttcggagacaagatcaaggacgacaacttaatgcctgcctattacaaatgtatccaggaggtgttaaaaacctggagccactggtccatccaaattgtggacgtgattccctttctcaggttcttccccaatccaggtctccggaggctgaagcaggccatagagaagagggatcacatcgtggagatgcagctgaggcagcacaaggagagcctcgtggcaggccagtggagggacatgatggactacatgctccaaggggtggcgcagccgagcatggaagagggctctggacagctcctggaagggcacgtgcacatggctgcagtggacctcctgatcggtggcactgagaccacagcaaacaccctctcctgggccgtggtttttttgcttcaccaccctgagattcagcagcgactgcaggaggagctagaccacgaactgggccctggtgcctccagctcccgggtcccctacaaggaccgtgcacggctgcccttgctcaatgccaccatcgccgaggtgctgcgcctgcggcccgttgtgcccttagccttgccccaccgcaccacacggcccagcagcatctccggctacgacatccctgagggcacagtcatcattccgaacctccaaggcgcccacctggatgagacggtctgggagaggccacatgagttctggcctgatcgcttcctggagccaggcaagaactccagagctctggccttcggctgcggtgcccgcgtgtgcctgggcgagccgctggcgcgcctggagctcttcgtggtgctgacccgactgctgcaggccttcacgctgctgccctccggggacgccctgccctccctgcagcccctgccccactgcagtgtcatcctcaagatgcagcctttccaagtgcggctgcagccccgggggatgggggcccacagcccaggccagaaccagtgatggggcaggaccgatgccagccgggtacctcagtttctcctttattgctcccgtacgaacccctcccctcccccctgtaaacacagtgctgcgagatcgctggcagagaaggcttcctccagcggctgggtggtgaaggaccctggctcttctctcggggcgacccctcagtgctcggcagtcatactggggtgcgagagaggtgggcagcagctcagcctccccccgctggggagcgaaagtttcttggtctcagcttcatttccgtgaagggcaccgagaactcgaagcccttccagtggtaccagctcactccctgggaaaggggttgtcaagagagagtcaaagccggatgtcccatctgctcttcccgttccccttaaggaggtagctcccagcactcaaccaacctccccgcagagctcccttcctgaccctccgctgcagaggattgaggcttaattctgagctggccctttccagccaataaatcaactccagctccctc

SEQ ID NO: 46382 - DNA, 1398 bp, Artificial Sequence
  derived and/or modified sequence
atgctgctgctgggcctgctgctgctgctgcccctgctggccggcgccagactgctgtggaactggtggaagctgagaagcctgcacctgccccccctggcccccggcttcctgcacctgctgcagcccgacctgcccatctacctgctgggcctgacccagaagttcggccccatctacagactgcacctgggcctgcaggacaagctggtgagcagaaactaccccgacctgagcctgggcgactacagcctgctgtggaaggcccacaagaagctgaccagaagcgccctgctgctgggcatcagagacagcatggagcccgtggtggagcagctgacccaggagttctgcgagagaatgagagcccagcccggcacccccgtggccatcgaggaggagttcagcctgctgacctgcagcatcatctgctacctgaccttcggcgacaagatcaaggacgacaacctgatgcccgcctactacaagtgcatccaggaggtgctgaagacctggagccactggagcatccagatcgtggacgtgatccccttcctgagattcttccccaaccccggcctgagaagactgaagcaggccatcgagaagagagaccacatcgtggagatgcagctgagacagcacaaggagagcctggtggccggccagtggagagacatgatggactacatgctgcagggcgtggcccagcccagcatggaggagggcagcggccagctgctggagggccacgtgcacatggccgccgtggacctgctgatcggcggcaccgagaccaccgccaacaccctgagctgggccgtggtgttcctgctgcaccaccccgagatccagcagagactgcaggaggagctggaccacgagctgggccccggcgccagcagcagcagagtgccctacaaggacagagccagactgcccctgctgaacgccaccatcgccgaggtgctgagactgagacccgtggtgcccctggccctgccccacagaaccaccagacccagcagcatcagcggctacgacatccccgagggcaccgtgatcatccccaacctgcagggcgcccacctggacgagaccgtgtgggagagaccccacgagttctggcccgacagattcctggagcccggcaagaacagcagagccctggccttcggctgcggcgccagagtgtgcctgggcgagcccctggccagactggagctgttcgtggtgctgaccagactgctgcaggccttcaccctgctgcccagcggcgacgccctgcccagcctgcagcccctgccccactgcagcgtgatcctgaagatgcagcccttccaggtgagactgcagcccagaggcatgggcgcccacagccccggccagagccagtag

SEQ ID NO: 46383 - DNA, 1395 bp, Artificial Sequence
  derived and/or modified sequence
atgctgctgctgggcctgctgctgctgcccctgctggccggcgccagactgctgtggaactggtggaagctgagaagcctgcacctgccccccctggcccccggcttcctgcacctgctgcagcccgacctgcccatctacctgctgggcctgacccagaagttcggccccatctacagactgcacctgggcctgcaggacaagctggtgagcaagaactaccccgacctgagcctgggcgactacagcctgctgtggaaggcccacaagaagctgaccagaagcgccctgctgctgggcatcagagacagcatggagcccgtggtggagcagctgacccaggagttctgcgagagaatgagagcccagcccggcacccccgtggccatcgaggaggagttcagcctgctgacctgcagcatcatctgctacctgaccttcggcgacaagatcaaggacgacaacctgatgcccgcctactacaagtgcatccaggaggtgctgaagacctggagccactggagcatccagatcgtggacgtgatccccttcctgagattcttccccaaccccggcctgagaagactgaagcaggccatcgagaagagagaccacatcgtggagatgcagctgagacagcacaaggagagcctggtggccggccagtggagagacatgatggactacatgctgcagggcgtggcccagcccagcatggaggagggcagcggccagctgctggagggccacgtgcacatggccgccgtggacctgctgatcggcggcaccgagaccaccgccaacaccctgagctgggccgtggtgttcctgctgcaccaccccgagatccagcagagactgcaggaggagctggaccacgagctgggccccggcgccagcagcagcagagtgccctacaaggacagagccagactgcccctgctgaacgccaccatcgccgaggtgctgagactgagacccgtggtgcccctggccctgccccacagaaccaccagacccagcagcatcagcggctacgacatccccgagggcaccgtgatcatccccaacctgcagggcgcccacctggacgagaccgtgtgggagagaccccacgagttctggcccgacagattcctggagcccggcaagaacagcagagccctggccttcggctgcggcgccagagtgtgcctgggcgagcccctggccagactggagctgttcgtggtgctgaccagactgctgcaggccttcaccctgctgcccagcggcgacgccctgcccagcctgcagcccctgccccactgcagcgtgatcctgaagatgcagcccttccaggtgagactgcagcccagaggcatgggcgcccacagccccggccagaaccagtag

SEQ ID NO: 46384 - DNA, 1398 bp, Artificial Sequence
  derived and/or modified sequence
atgctgctgctgggcctgctgctgctgctgcccctgctggccggcgccagactgctgtggaactggtggaagctgagaagcctgcacctgctgcccctggcccccggcttcctgcacctgctgcagcccgacctgcccatctacctgctgggcctgacccagaagttcggccccatctacagactgcacctgggcctgcaggacaagctggtgagcaagaactaccccgacctgagcctgggcgactacagcctgctgtggaaggcccacaagaagctgaccagaagcgccctgctgctgggcatcagagacagcatggagcccgtggtggagcagctgacccaggagttctgcgagagaatgagagcccagcccggcacccccgtggccatcgaggaggagttcagcctgctgacctgcagcatcatctgctacctgaccttcggcgacaagatcaaggacgacaacctgatgcccgcctactacaagtgcatccaggaggtgctgaagacctggagccactggagcatccagatcgtggacgtgatccccttcctgagattcttccccaaccccggcctgagaagactgaagcaggccatcgagaagagagaccacatcgtggagatgcagctgagacagcacaaggagagcctggtggccggccagtggagagacatgatggactacatgctgcagggcgtggcccagcccagcatggaggagggcagcggccagctgctggagggccacgtgcacatggccgccgtggacctgctgatcggcggcaccgagaccaccgccaacaccctgagctgggccgtggtgttcctgctgcaccaccccgagatccagcagagactgcaggaggagctggaccacgagctgggccccggcgccagcagcagcagagtgccctacaaggacagagccagactgcccctgctgaacgccaccatcgccgaggtgctgagactgagacccgtggtgcccctggccctgccccacagaaccaccagacccagcagcatcagcggctacgacatccccgagggcaccgtgatcatccccaacctgcagggcgcccacctggacgagaccgtgtgggagagaccccacgagttctggcccgacagattcctggagcccggcaagaacagcagagccctggccttcggctgcggcgccagagtgtgcctgggcgagcccctggccagactggagctgttcgtggtgctgaccagactgctgcaggccttcaccctgctgcccagcggcgacgccctgcccagcctgcagcccctgccccactgcagcgtgatcctgaagatgcagcccttccaggtgagactgcagcccagaggcatgggcgcccacagccccggccagaaccagtag

SEQ ID NO: 46385 - protein, 546 aa, Artificial Sequence
  derived and/or modified sequence
MGTLGKAREAPRKPSHGCRAASKARLEAKPANSPFPSHPSLAHITQFRMMVSLGHLAKGASLDDLIDSCIQSFDADGNLCRSNQLLQVMLTMHRIVISSAELLQKVITLYPDALAKNSPGLCLKICYFVRYWITEFWVMFKMDASLTDTMEEFQELVKAKGEELHCRLIDTTQINARDWSRKLTQRIKSNTSKKRKVSLLFDHLEPEELSEHLTYLEFKSFRRISFSDYQNYLVNSCVKENPTMERSIALCNGISQWVQLMVLSRPTPQLRAEVFIKFIQVAQKLHQLQNFNTLMAVIGGLCHSSISRLKETSSHVPHEINKVLGEMTELLSSSRNYDNYRRAYGECTDFKIPILGVHLKDLISLYEAMPDYLEDGKVNVHKLLALYNHISELVQLQEVAPPLEANKDLVHLLTLSLDLYYTEDEIYELSYAREPRNHRAPSVFKNYDHDQDGYISQEEFEKIAASFPFSFCVMDKDREGLISRDEITAYFMRASSIYSKLGLGFPHNFQETTYLKPTFCDNCAGFLWGVIKQGYRCKGNKYSESR

SEQ ID NO: 46386 - protein, 762 aa, Artificial Sequence
  derived and/or modified sequence
MGTLGKAREAPRKPSHGCRAASKARLEAKPANSPFPSHPSLAHITQFRMMVSLGHLAKGASLDDLIDSCIQSFDADGNLCRSNQLLQVMLTMHRIVISSAELLQKVITLYKDALAKNSPGLCLKICYFVRYWITEFWVMFKMDASLTDTMEEFQELVKAKGEELHCRLIDTTQINARDWSRKLTQRIKSNTSKKRKVSLLFDHLEPEELSEHLTYLEFKSFRRISFSDYQNYLVNSCVKENPTMERSIALCNGISQWVQLMVLSRPTPQLRAEVFIKFIQVAQKLHQLQNFNTLMAVIGGLCHSSISRLKETSSHVPHEINKVLGEMTELLSSSRNYDNYRRAYGECTDFKIPILGVHLKDLISLYEAMPDYLEDGKVNVHKLLALYNHISELVQLQEVAPPLEANKDLVHLLTLSLDLYYTEDEIYELSYAREPRNHRAPSVFKNYDHDQDGYISQEEFEKIAASFPFSFCVMDKDREGLISRDEITAYFMRASSIYSKLGLGFPHNFQETTYLKPTFCDNCAGFLWGVIKQGYRCKDCGMNCHKQCKDLVVFECKKRAKNPVAPTENNTSVGPVSNLCSLGAKDLLHAPEEGPFTFPNGEAVEHGEESKDRTIMLMGVSSQKISLRLKRAVAHKATQTESQPWIGSEGPSGPFVLSSPRKTAQDTLYVLPSPTSPCPSPVLVRKRAFVKWENKDSLIKSKEELRHLRLPTYQELEQEINTLKADNDALKIQLKYAQKKIESLQLEKSNHVLAQMEQGDCS

SEQ ID NO: 46387 - protein, 481 aa, Artificial Sequence
  derived and/or modified sequence
MGTLGKAREAPRKPSHGCRAASKARLEAKPANSPFPSHPSLAHITQFRMMVSLGHLAKGASLDDLIDSCIQSFDADGNLCRSNQLLQVMLTMHRIVISSAELLQKVITLYPDALAKNSPGLCLKICYFVRYWITEFWVMFKMDASLTDTMEEFQELVKAKGEELHCRLIDTTQINARDWSRKLTQRIKSNTSKKRKVSLLFDHLEPEELSEHLTYLEFKSFRRISFSDYQNYLVNSCVKENPTMERSIALCNGISQWVQLMVLSRPTPQLRAEVFIKFIQVAQKLHQLQNFNTLMAVIGGLCHSSISRLKETSSHVPHEINKVLGEMTELLSSSRNYDNYRRAYGECTDFKIPILGVHLKDLISLYEAMPDYLEDGKVNVHKLLALYNHISELVQLQEVAPPLEANKDLVHLLTLSLDLYYTEDEIYELSYAREPRNHRAPSVFKNYDHDQDGYISQEEFEKIAASFPFSFCVMDKDRSGA

SEQ ID NO: 46388 - protein, 546 aa, Artificial Sequence
  derived and/or modified sequence
MGTLGKAREAPRKPSHGCRAASKARLEAKPANSPFPSHPSLAHITQFRMMVSLGHLAKGASLDDLIDSCIQSFDADGNLCRSNQLLQVMLTMHRIVISSAELLQKVITLYKDALAKNSPGLCLKICYFVRYWITEFWVMFKMDASLTDTMEEFQELVKAKGEELHCRLIDTTQINARDWSRKLTQRIKSNTSKKRKVSLLFDHLEPEELSEHLTYLEFKSFRRISFSDYQNYLVNSCVKENPTMERSIALCNGISQWVQLMVLSRPTPQLRAEVFIKFIQVAQKLHQLQNFNTLMAVIGGLCHSSISRLKETSSHVPHEINKVLGEMTELLSSSRNYDNYRRAYGECTDFKIPILGVHLKDLISLYEAMPDYLEDGKVNVHKLLALYNHISELVQLQEVAPPLEANKDLVHLLTLSLDLYYTEDEIYELSYAREPRNHRAPSVFKNYDHDQDGYISQEEFEKIAASFPFSFCVMDKDREGLISRDEITAYFMRASSIYSKLGLGFPHNFQETTYLKPTFCDNCAGFLWGVIKQGYRCKGNKYSESR

SEQ ID NO: 46389 - DNA, 2289 bp, Artificial Sequence
  derived and/or modified sequence
atgggcacgttaggcaaagctcgggaagctcccagaaaacccagtcatgggtgccgcgccgcaagcaaggcccggcttgaggccaaaccagctaatagcccttttccatctcaccctagtttagcccatatcacgcaattccgtatgatggtgtctctgggtcacctggcaaagggggcctctctcgacgacctgatagattcctgtattcagtccttcgacgccgacggtaacctgtgccgaagtaatcaattactacaggtgatgcttacgatgcatagaattgtgataagctccgctgagctgctccagaaggttattacgctatacaaggatgcactggccaagaactcaccaggtctgtgcctgaagatttgctactttgtgcgttactggattaccgagttctgggtaatgtttaagatggacgcctctttaaccgacactatggaggagttccaggaactggtgaaagccaagggagaggagctgcattgccgattgatagacacaacacagattaatgcccgcgattggtcccgcaagctgacccaacgaatcaaatctaacacctccaaaaagcgcaaagtctctctcctcttcgatcatttggaacccgaagagctgtcggagcatctgacctatctggaatttaaatccttccgtagaatctccttctccgactaccagaactaccttgtcaactcttgtgtcaaggaaaaccccactatggaacgatcgatcgctctctgtaatggtattagccagtgggtccagttgatggttctttcccggcccactccccagttaagagccgaagtgtttatcaaattcattcaagtggcccagaaactgcatcaattgcagaatttcaataccttgatggcagttatcgggggcctgtgccactcaagtatttccagattaaaggagacctcctcacacgtaccccatgaaattaacaaggtgctgggagaaatgacggagctgttatcctcatcccggaattacgacaattatcggcgggcatacggcgagtgtacagactttaaaattccaatcttaggtgtgcatttgaaggacctaatctccctgtacgaggctatgccagattatcttgaggatggtaaggtcaatgtccataaactgctggcattgtataaccatatttcagagctggtacagctgcaggaagtggctcccccattggaagctaataaggatcttgtgcacctactgacactgtcccttgacctgtactatacggaagacgagatttatgagctttcttacgcgagagaaccaaggaatcacagggcaccgtccgtcttcaagaactacgatcacgatcaggatggttatatctctcaggaggagtttgagaagatcgcggcctctttcccattcagcttctgcgtgatggacaaagacagggaaggtcttatttcccgggatgagatcaccgcctactttatgcgtgccagttctatctacagcaaactgggacttggattcccccataatttccaggagactacatacttgaagccaacattctgcgacaattgcgctgggtttctgtggggcgtgataaagcagggatatcggtgcaaggattgtgggatgaattgccataaacagtgcaaggatctagtggtgttcgagtgcaagaagagagcaaaaaatcccgttgcccccacggagaacaacacttctgtgggccccgtgtccaatctttgtagtttaggagccaaggacttactgcacgccccagaagagggacccttcacatttccaaatggtgaagccgttgaacacggcgaggagtctaaggaccggaccattatgctgatgggggtctcaagccaaaagatttctctcaggttgaaacgagcagtagcacacaaagcaacccagactgaaagccagccttggatcggatccgagggcccttctggcccgttcgttctgagcagccccagaaagactgcccaggacacgctttacgtgcttcccagcccaacatccccatgtccttcccccgtgctagtgcggaaacgtgcatttgtcaaatgggagaacaaagacagtcttataaaatctaaggaagaactccgacacctgcggttgccaacctaccaggaattggaacaggagatcaacacacttaaggcagacaacgatgccctaaaaattcaactcaaatacgcgcagaagaagatcgagtcacttcagctggaaaaatccaatcatgttctggcccagatggagcagggggactgctcgtag

SEQ ID NO: 46390 - DNA, 2289 bp, Artificial Sequence
  derived and/or modified sequence
atgggcaccctgggcaaggcccgggaggcccccaggaagcccagccacggctgccgggccgccagcaaggcccggctggaggccaagccagccaacagccccttccccagccaccccagcctggcccacatcacccagttcaggatgatggtgtccctgggccacctggccaagggggccagcctggatgacctgattgacagctgcatccagagctttgatgctgatggcaacctgtgccgcagcaaccagctgctgcaggtgatgctgaccatgcacagaattgtcatcagcagcgctgagctgctgcagaaggtgatcaccctgtacaaggatgccctggccaagaacagccctggcctgtgcctgaagatctgctactttgtgcgctactggatcacagagttctgggtgatgttcaagatggatgccagcctgacagacaccatggaggagttccaggagctggtgaaggccaagggggaggagctgcactgccgcctgattgacaccacccagatcaatgcccgggactggagcaggaagctgacccagaggatcaagagcaacaccagcaagaagaggaaggtgtccctgctgtttgaccacctggagcctgaggagctgtctgagcacctgacctacctggagttcaagagcttccgccgcatctccttcagtgactaccagaactacctggtgaacagctgtgtgaaggagaaccccaccatggagaggagcatcgccctgtgcaatggcatcagccagtgggtgcagctgatggtgctgagccggcccaccccccagctgcgggcagaggtgttcatcaagttcatccaggtggcccagaagctgcaccagctgcagaacttcaacaccctgatggccgtcatcggcggcctgtgccacagcagcatcagccggctgaaggagaccagcagccacgtgccccatgagatcaacaaggtgctgggggagatgacagagctgctgagcagcagcagaaattatgacaactacagaagagcctacggggagtgcacagacttcaagatccccatcctgggcgtgcacctgaaggacctgatcagcctgtatgaggccatgccagactacctggaggatggcaaggtgaatgtgcacaagctgctggccctgtacaaccacatcagcgagctggtgcagctgcaggaggtggccccacccctggaggccaacaaggacctggtgcacctgctgaccctgagcctggacctgtactacacagaagatgagatctatgagctgtcctatgcccgggagcccaggaaccaccgggcccccagcgtcttcaagaactatgaccatgaccaggacggctacatcagccaggaggagtttgagaagattgctgccagcttccccttctccttctgtgtgatggacaaggaccgggagggcctcatcagcagagatgagatcacagcctacttcatgagggccagcagcatctacagcaagctgggcctgggcttcccccacaacttccaggagaccacctacctgaagcccaccttctgtgacaactgtgccggcttcctgtggggcgtcatcaagcagggctaccgctgcaaggactgtggcatgaactgccacaagcagtgcaaggacctggtggtgtttgagtgcaagaagagggccaagaaccctgtggcccccacagagaacaacacctctgtgggccctgtgagcaacctgtgcagcctgggcgccaaggacctgctgcacgcccctgaggagggccccttcaccttccccaacggggaggccgtggagcacggggaggagagcaaggacaggaccatcatgctgatgggcgtgagcagccagaagatcagcctgcggctgaagagagctgtggcccacaaggccacccagacagagagccagccctggattggcagcgagggccccagcggcccctttgtgctgagcagccccaggaagacagcccaggacaccctgtatgtgctgcccagccccaccagcccctgccccagccctgtgctggtgaggaagagggcctttgtgaagtgggagaacaaggacagcctcatcaagagcaaggaggagctgcggcacctgcggctgcccacctaccaggagctggagcaggagatcaacaccctgaaggctgacaatgatgccctgaagatccagctgaagtatgcccagaagaagattgagagcctgcagctggagaagagcaaccacgtgctggcccagatggagcagggcgactgcagctag

SEQ ID NO: 46391 - DNA, 2289 bp, Artificial Sequence
  derived and/or modified sequence
atgggcaccctgggcaaggcccgggaggccccccggaagcccagccacggctgcagagcagcctctaaggcacgcttggaggccaaacctgccaacagccccttcccatctcacccttctctggcacatatcacccaatttaggatgatggtttcacttggacatctcgctaagggggccagtctggacgacctcatcgactcttgcattcagagctttgatgcagacggcaacctttgccgaagcaaccagctgctccaggtcatgttgaccatgcacagaatcgtgatctccagtgccgagctcctacagaaggtcattacactgtataaggatgcactggccaaaaatagccctgggctgtgcctgaagatttgttattttgtgaggtactggattaccgaattttgggtcatgttcaagatggatgccagcctaaccgatacaatggaagagttccaagagctggtgaaggccaagggcgaggagctgcactgcagactcattgacacaacacagataaatgccagagactggtccaggaagttgacacagagaattaagtctaacacctcgaaaaagcgtaaagtcagtctgctcttcgatcaccttgagcccgaggaattaagcgaacaccttacatatctcgagtttaagtctttccgacgcattagttttagtgactaccagaactacctggttaacagctgtgtcaaagagaacccgacgatggaaagatctattgccctgtgcaatgggattagccagtgggtgcagctgatggtcctgtccagaccaaccccacagctgagagcagaggtcttcataaaattcattcaagtagctcagaagcttcatcagttgcagaatttcaatacactcatggctgtgatcggtggcctgtgccacagcagtatctccaggttgaaggagacttctagccacgttcctcatgaaattaataaagttctgggcgaaatgaccgagcttttgagctcctcgcgaaattatgataactacagacgggcctacggggagtgcacagactttaagattcccattctcggcgtacatctcaaagacttgatctccctgtacgaggcaatgcctgattatctggaagacgggaaagtaaacgttcacaagctactggccttatacaaccacattagcgaactggttcagctccaggaagtcgcacccccattagaagctaataaggatttggttcaccttctgacattgagcctggatctgtattatactgaggacgaaatatatgagctttcctacgcacgagagccacggaaccaccgtgccccttctgtgttcaagaactacgatcacgatcaggacgggtatatcagtcaggaagaattcgagaagattgcagctagttttcccttttccttctgcgtgatggataaggacagagagggactgatctcccgagacgagattacagcttattttatgcgcgcttcctctatctactcgaaattgggtctgggcttcccacataacttccaggagaccacctatctgaagccaacattttgcgataattgtgcaggatttctgtggggagtcatcaaacagggttatcgctgcaaagattgcggcatgaactgccataaacaatgcaaggacctggttgttttcgagtgcaagaagagggcaaaaaaccccgtagctcccactgagaacaacacttcagtgggaccagtctcaaatttatgctcactgggcgcaaaagaccttttacatgctcctgaagagggcccgtttaccttccccaacggtgaggctgtcgagcatggagaagaaagcaaagacaggaccattatgttaatgggtgtaagctcacagaagattagtctacggcttaaaagggcggtcgcacataaagccacccaaaccgaatcccagccatggattggaagcgagggtccctccggcccattcgtgctctcttcacctagaaagaccgcacaagacaccctttacgtgcttccgtcaccaacgtctccatgtccttccccagtgcttgtccggaaaagagcttttgttaagtgggagaataaagactctcttataaagtcaaaggaggaactgaggcacctgcgcttgccaacctaccaggagttggagcaggagatcaacacactcaaggctgataatgacgcattaaagattcagttgaaatatgcgcagaagaagattgagtccctacagctggaaaaatcgaatcacgtcctcgcccagatggaacagggcgactgttcctag

SEQ ID NO: 46392 - DNA, 2289 bp, Artificial Sequence
  derived and/or modified sequence
atgggaacacttggcaaggcgagagaggcgccaagaaagccttcccacgggtgccgggcagcgagtaaagcaaggttggaggccaagccagcgaattccccctttccgtcccatccttcactagcccatataacacaattccgcatgatggtcagcttgggccacctggccaagggcgcttctctggacgatcttatcgattcctgcatccaatctttcgacgccgatggcaatctgtgtcgctcaaatcaactccttcaggtgatgctcacaatgcatcggatagttatcagcagtgccgaactactccaaaaggtgataacattgtacaaggacgccctcgcaaagaacagtcccggtctatgtcttaagatctgctactttgtccgctactggatcaccgagttctgggtcatgtttaagatggacgcatctctcactgacactatggaagaattccaggaactggttaaagcgaagggggaagagctgcactgtcgtttaattgatactacccagatcaatgctcgagattggagtcgcaaactgacgcaaagaataaagtcaaatacgagcaagaaaagaaaagtgtccctgcttttcgatcatttagagccggaagaattgtccgaacacctgacatacttagaattcaagagtttccgtaggatctcatttagcgactaccagaattacctcgtcaatagctgtgtgaaagaaaacccaactatggagaggagcattgccctgtgtaacggtatctctcagtgggtgcagttaatggtactgtccagaccaactccccagttgcgcgctgaggtcttcatcaaattcattcaagttgctcagaaactacaccagctccaaaactttaacacactgatggctgtgattggaggcctatgtcacagttcaatctcaagacttaaggagaccagcagccatgtgccacacgaaatcaataaggtgctgggagagatgaccgaactcctgtcgagctccaggaattacgacaactatcgtagggcctatggggagtgcactgacttcaagatccccattctcggcgttcatctgaaggaccttatcagcctttacgaggccatgccggactacctggaagacgggaaagtgaatgtgcacaaattgctggcactgtacaatcacatatctgaattggtgcaattacaagaggttgctccacccctggaagcgaataaagatctagttcacttgcttactctgagtcttgacctatattataccgaggacgagatttatgagctaagttatgctagggagccccgtaaccacagagctccgtccgtttttaagaattacgatcacgatcaagacggatatatcagtcaagaggaatttgagaagattgccgcttcatttcctttcagcttttgtgtcatggataaagatcgcgaggggttaatcagccgggatgagattactgcctatttcatgcgtgcctcttcaatatactcgaagctgggcttgggctttccccataatttccaggagactacttacttgaaaccaacattttgtgacaactgtgctggtttcctgtggggagtcattaaacagggttaccggtgtaaggactgcgggatgaactgtcataaacaatgtaaggatttagttgtgttcgagtgtaaaaagcgggcaaaaaatcccgtggcacccacggagaacaatacatctgtcggacccgtttcaaacctgtgctctctcggagcaaaagatctgttgcatgcccctgaagaagggccttttacttttccaaacggggaagccgtggagcacggggaagaatcaaaagacagaacaataatgctgatgggggtgtcttctcaaaaaattagcctgagacttaaacgcgctgtggcacacaaagcaactcagactgaatctcagccttggatcgggtccgaaggaccttctgggccattcgtcctgagctctccaaggaaaaccgctcaggacaccttatatgtgttgccaagccccaccagtccatgtccttccccagtgttggtgagaaaacgtgcctttgtcaagtgggaaaacaaggactcactgattaagagcaaagaggagctgaggcatttgcggctccccacatatcaggagctagagcaagagattaatacccttaaggccgataacgatgccctgaaaatacagctgaagtacgcgcagaaaaagattgagagccttcagctggagaagtctaaccacgtcctggcccaaatggagcagggtgactgtagctag

SEQ ID NO: 46393 - DNA, 2296 bp, Artificial Sequence
  derived and/or modified sequence
cgcggccatgggcaccctgggcaaggcgagagaggctccgcggaaaccttcccatggctgcagagctgcctctaaagcaagactagaggcaaagccagccaacagccccttcccctcccatcccagcttggcccacatcacccagttccgaatgatggtgtctctgggacatttagccaaaggagccagcctggacgatctcattgacagctgcattcaatcttttgatgcagatggaaacctgtgtcgaagtaaccaactgttgcaagtcatgctgaccatgcaccgaattgtcatctcctctgcagaactgctccaaaaagttatcaccctctataaggatgctttggcaaagaattcaccaggactttgcctgaagatctgttattttgtaaggtattggataacagaattctgggtcatgtttaaaatggacgccagcttgacagacactatggaggagtttcaggaactggtgaaagctaagggtgaggagttacattgccgcctgattgacacaactcaaatcaatgcccgtgactggtccaggaaacttactcaaaggataaaatcaaataccagcaagaaacggaaagtctccctgctctttgaccatctggaaccagaagagctatccgagcacctcacctaccttgagttcaagtctttccggaggatatcgttctctgattatcagaattaccttgtaaatagctgtgtgaaggaaaaccccaccatggagcgatctattgctctgtgcaacggcatctcccagtgggtacaactgatggttctcagccgccccacgccgcagctccgagcagaagtcttcatcaagttcatccaggtggctcagaagctccaccaactacagaacttcaatacactgatggctgtgataggtgggctgtgtcacagctcaatctcgaggctcaaggagacaagttcgcatgtcccacatgaaatcaataaggttctcggtgagatgactgagctgctgtcctcctccagaaactacgacaattaccggcgagcctatggagagtgcaccgacttcaagatccccattctgggtgtgcatctcaaggacctcatctccctgtatgaagccatgcctgactatctggaggacgggaaagtgaacgtccataagctactggccctatacaatcatatcagtgaattggtccagctgcaagaggtggccccacccttggaggctaacaaggacttggtacacttgctgacgttatccctggatctttactacactgaggatgaaatctatgagctttcctatgcccgggaaccaaggaaccacagagctccatctgtcttcaagaactatgatcacgaccaggatggatacatttctcaggaagaatttgaaaagattgctgcgagttttccattttccttctgtgtgatggacaaagacagggaaggcctcatcagcagggatgagatcacagcctacttcatgagagccagctcaatctattccaagctgggcctgggctttcctcacaacttccaagagaccacctacctgaagcccactttttgtgacaactgtgctggatttctctggggagtgatcaaacaaggatatcgatgtaaagactgcgggatgaactgtcacaaacaatgcaaagatctggttgtgtttgagtgtaagaagcgagccaagaacccagtagctcccacagagaacaacacttctgtggggccagtgtccaacctttgctcattgggagccaaagatctgctccatgcacctgaggaaggaccttttacattccctaatggggaggctgtggaacatggtgaggagagtaaggatcggaccatcatgctgatgggagtgtcctcacagaagatttctcttcggctgaagagggctgttgcccacaaggccacccagactgaatcacagccttggattggcagtgagggcccttcaggtccctttgtgctgtcttccccaaggaagacagcccaggatactctatatgtgcttcccagtcccacctctccatgtcctagcccagtcttggtcagaaagcgggcttttgtcaagtgggagaataaagactccctcataaaatcaaaggaggagctccgtcacctcagactgcctacctaccaagaactggaacaggaaataaatactctgaaagcagataatgatgccctaaagatccaactgaaatatgcacagaagaaaatagaatccctccagcttgaaaaaagcaatcatgtcttagctcaaatggagcagggtgactgttcttag

SEQ ID NO: 46394 - DNA, 2289 bp, Artificial Sequence
  derived and/or modified sequence
atgggcaccctgggcaaggccagagaggcccccagaaagcccagccacggctgcagagccgccagcaaggccagactggaggccaagcccgccaacagccccttccccagccaccccagcctggcccacatcacccagttcagaatgatggtgagcctgggccacctggccaagggcgccagcctggacgacctgatcgacagctgcatccagagcttcgacgccgacggcaacctgtgcagaagcaaccagctgctgcaggtgatgctgaccatgcacagaatcgtgatcagcagcgccgagctgctgcagaaggtgatcaccctgtacaaggacgccctggccaagaacagccccggcctgtgcctgaagatctgctacttcgtgagatactggatcaccgagttctgggtgatgttcaagatggacgccagcctgaccgacaccatggaggagttccaggagctggtgaaggccaagggcgaggagctgcactgcagactgatcgacaccacccagatcaacgccagagactggagcagaaagctgacccagagaatcaagagcaacaccagcaagaagagaaaggtgagcctgctgttcgaccacctggagcccgaggagctgagcgagcacctgacctacctggagttcaagagcttcagaagaatcagcttcagcgactaccagaactacctggtgaacagctgcgtgaaggagaaccccaccatggagagaagcatcgccctgtgcaacggcatcagccagtgggtgcagctgatggtgctgagcagacccaccccccagctgagagccgaggtgttcatcaagttcatccaggtggcccagaagctgcaccagctgcagaacttcaacaccctgatggccgtgatcggcggcctgtgccacagcagcatcagcagactgaaggagaccagcagccacgtgccccacgagatcaacaaggtgctgggcgagatgaccgagctgctgagcagcagcagaaactacgacaactacagaagagcctacggcgagtgcaccgacttcaagatccccatcctgggcgtgcacctgaaggacctgatcagcctgtacgaggccatgcccgactacctggaggacggcaaggtgaacgtgcacaagctgctggccctgtacaaccacatcagcgagctggtgcagctgcaggaggtggccccccccctggaggccaacaaggacctggtgcacctgctgaccctgagcctggacctgtactacaccgaggacgagatctacgagctgagctacgccagagagcccagaaaccacagagcccccagcgtgttcaagaactacgaccacgaccaggacggctacatcagccaggaggagttcgagaagatcgccgccagcttccccttcagcttctgcgtgatggacaaggacagagagggcctgatcagcagagacgagatcaccgcctacttcatgagagccagcagcatctacagcaagctgggcctgggcttcccccacaacttccaggagaccacctacctgaagcccaccttctgcgacaactgcgccggcttcctgtggggcgtgatcaagcagggctacagatgcaaggactgcggcatgaactgccacaagcagtgcaaggacctggtggtgttcgagtgcaagaagagagccaagaaccccgtggcccccaccgagaacaacaccagcgtgggccccgtgagcaacctgtgcagcctgggcgccaaggacctgctgcacgcccccgaggagggccccttcaccttccccaacggcgaggccgtggagcacggcgaggagagcaaggacagaaccatcatgctgatgggcgtgagcagccagaagatcagcctgagactgaagagagccgtggcccacaaggccacccagaccgagagccagccctggatcggcagcgagggccccagcggccccttcgtgctgagcagccccagaaagaccgcccaggacaccctgtacgtgctgcccagccccaccagcccctgccccagccccgtgctggtgagaaagagagccttcgtgaagtgggagaacaaggacagcctgatcaagagcaaggaggagctgagacacctgagactgcccacctaccaggagctggagcaggagatcaacaccctgaaggccgacaacgacgccctgaagatccagctgaagtacgcccagaagaagatcgagagcctgcagctggagaagagcaaccacgtgctggcccagatggagcagggcgactgcagctag

SEQ ID NO: 46395 - protein, 1514 aa, Artificial Sequence
  derived and/or modified sequence
MAVEGSTITSRIKNLLRSPSIKLRRSKAGNRREDLSSKVTLEKVLGITVSGGRGLACDPRSGLVAYPAGCVVVLFNPRKHKQHHILNSSRKTITALAFSPDGKYLVTGESGHMPAVRVWDVAEHSQVAELQEHKYGVACVAFSPSAKYIVSVGYQHDMIVNVWAWKKNIVVASNKVSSRVTAVSFSEDCSYFVTAGNRHIKFWYLDDSKTSKVNATVPLLGRSGLLGELRNNLFTDVACGRGKKADSTFCITSSGLLCEFSDRRLLDKWVELRNIDSFTTTVAHCISVSQDYIFCGCADGTVRLFNPSNLHFLSTLPRPHALGTDIASVTEASRLFSGVANARYPDTIALTFDPTNQWLSCVYNDHSIYVWDVRDPKKVGKVYSALYHSSCVWSVEVYPEVKDSNQACLPPSSFITCSSDNTIRLWNTESSGVHGSTLHRNILSSDLIKIIYVDGNTQALLDTELPGGDKADASLLDPRVGIRSVCVSPNGQHLASGDRMGTLRVHELQSLSEMLKVEAHDSEILCLEYSKPDTGLKLLASASRDRLIHVLDAGREYSLQQTLDEHSSSITAVKFAASDGQVRMISCGADKSIYFRTAQKSGDGVQFTRTHHVVRKTTLYDMDVEPSWKYTAIGCQDRNIRIFNISSGKQKKLFKGSQGEDGTLIKVQTDPSGIYIATSCSDKNLSIFDFSSGECVATMFGHSEIVTGMKFSNDCKHLISVSGDSCIFVWRLSSEMTISMRQRLAELRQRQRGGKQQGPSSPQRASGPNRHQAPSMLSPGPALSSDSDKEGEDEGTEEELPALPVLAKSTKKALASVPSPALPRSLSHWEMSRAQESVGFLDPAPAANPGPRRRGRWVQPGVELSVRSMLDLRQLETLAPSLQDPSQDSLAIIPSGPRKHGQEALETSLTSQNEKPPRPQASQPCSYPHIIRLLSQEEGVFAQDLEPAPIEDGIVYPEPSDNPTMDTSEFQVQAPARGTLGRVYPGSRSSEKHSPDSACSVDYSSSCLSSPEHPTEDSESTEPLSVDGISSDLEEPAEGDEEEEEEEGGMGPYGLQEGSPQTPDQEQFLKQHFETLASGAAPGAPVQVPERSESRSISSRFLLQVQTRPLREPSPSSSSLALMSRPAQVPQASGEQPRGNGANPPGAPPEVEPSSGNPSPQQAASVLLPRCRLNPDSSWAPKRVATASPFSGLQKAQSVHSLVPQERHEASLQAPSPGALLSREIEAQDGLGSLPPADGRPSRPHSYQNPTTSSMAKISRSISVGENLGLVAEPQAHAPIRVSPLSKLALPSRAHLVLDIPKPLPDRPTLAAFSPVTKGRAPGEAEKPGFPVGLGKAHSTTERWACLGEGTTPKPRTECQAHPGPSSPCAQQLPVSSLFQGPENLQPPPPEKTPNPMECTKPGAALSQDSEPAVSLEQCEQLVAELRGSVRQAVRLYHSVAGCKMPSAEQSRIAQLLRDTFSSVRQELEAVAGAVLSSPGSSPGAVGAEQTQALLEQYSELLLRAVERRMERKL

SEQ ID NO: 46396 - DNA, 4545 bp, Artificial Sequence
  derived and/or modified sequence
atggccgtggagggcagcaccatcaccagcagaatcaagaacctgctgagaagccccagcatcaagctgagaagaagcaaggccggcaacagaagagaggacctgagcagcaaggtgaccctggagaaggtgctgggcatcaccgtgagcggcggcagaggcctggcctgcgaccccagaagcggcctggtggcctaccccgccggctgcgtggtggtgctgttcaaccccagaaagcacaagcagcaccacatcctgaacagcagcagaaagaccatcaccgccctggccttcagccccgacggcaagtacctggtgaccggcgagagcggccacatgcccgccgtgagagtgtgggacgtggccgagcacagccaggtggccgagctgcaggagcacaagtacggcgtggcctgcgtggccttcagccccagcgccaagtacatcgtgagcgtgggctaccagcacgacatgatcgtgaacgtgtgggcctggaagaagaacatcgtggtggccagcaacaaggtgagcagcagagtgaccgccgtgagcttcagcgaggactgcagctacttcgtgaccgccggcaacagacacatcaagttctggtacctggacgacagcaagaccagcaaggtgaacgccaccgtgcccctgctgggcagaagcggcctgctgggcgagctgagaaacaacctgttcaccgacgtggcctgcggcagaggcaagaaggccgacagcaccttctgcatcaccagcagcggcctgctgtgcgagttcagcgacagaagactgctggacaagtgggtggagctgagaaacatcgacagcttcaccaccaccgtggcccactgcatcagcgtgagccaggactacatcttctgcggctgcgccgacggcaccgtgagactgttcaaccccagcaacctgcacttcctgagcaccctgcccagaccccacgccctgggcaccgacatcgccagcgtgaccgaggccagcagactgttcagcggcgtggccaacgccagataccccgacaccatcgccctgaccttcgaccccaccaaccagtggctgagctgcgtgtacaacgaccacagcatctacgtgtgggacgtgagagaccccaagaaggtgggcaaggtgtacagcgccctgtaccacagcagctgcgtgtggagcgtggaggtgtaccccgaggtgaaggacagcaaccaggcctgcctgccccccagcagcttcatcacctgcagcagcgacaacaccatcagactgtggaacaccgagagcagcggcgtgcacggcagcaccctgcacagaaacatcctgagcagcgacctgatcaagatcatctacgtggacggcaacacccaggccctgctggacaccgagctgcccggcggcgacaaggccgacgccagcctgctggaccccagagtgggcatcagaagcgtgtgcgtgagccccaacggccagcacctggccagcggcgacagaatgggcaccctgagagtgcacgagctgcagagcctgagcgagatgctgaaggtggaggcccacgacagcgagatcctgtgcctggagtacagcaagcccgacaccggcctgaagctgctggccagcgccagcagagacagactgatccacgtgctggacgccggcagagagtacagcctgcagcagaccctggacgagcacagcagcagcatcaccgccgtgaagttcgccgccagcgacggccaggtgagaatgatcagctgcggcgccgacaagagcatctacttcagaaccgcccagaagagcggcgacggcgtgcagttcaccagaacccaccacgtggtgagaaagaccaccctgtacgacatggacgtggagcccagctggaagtacaccgccatcggctgccaggacagaaacatcagaatcttcaacatcagcagcggcaagcagaagaagctgttcaagggcagccagggcgaggacggcaccctgatcaaggtgcagaccgaccccagcggcatctacatcgccaccagctgcagcgacaagaacctgagcatcttcgacttcagcagcggcgagtgcgtggccaccatgttcggccacagcgagatcgtgaccggcatgaagttcagcaacgactgcaagcacctgatcagcgtgagcggcgacagctgcatcttcgtgtggagactgagcagcgagatgaccatcagcatgagacagagactggccgagctgagacagagacagagaggcggcaagcagcagggccccagcagcccccagagagccagcggccccaacagacaccaggcccccagcatgctgagccccggccccgccctgagcagcgacagcgacaaggagggcgaggacgagggcaccgaggaggagctgcccgccctgcccgtgctggccaagagcaccaagaaggccctggccagcgtgcccagccccgccctgcccagaagcctgagccactgggagatgagcagagcccaggagagcgtgggcttcctggaccccgcccccgccgccaaccccggccccagaagaagaggcagatgggtgcagcccggcgtggagctgagcgtgagaagcatgctggacctgagacagctggagaccctggcccccagcctgcaggaccccagccaggacagcctggccatcatccccagcggccccagaaagcacggccaggaggccctggagaccagcctgaccagccagaacgagaagccccccagaccccaggccagccagccctgcagctacccccacatcatcagactgctgagccaggaggagggcgtgttcgcccaggacctggagcccgcccccatcgaggacggcatcgtgtaccccgagcccagcgacaaccccaccatggacaccagcgagttccaggtgcaggcccccgccagaggcaccctgggcagagtgtaccccggcagcagaagcagcgagaagcacagccccgacagcgcctgcagcgtggactacagcagcagctgcctgagcagccccgagcaccccaccgaggacagcgagagcaccgagcccctgagcgtggacggcatcagcagcgacctggaggagcccgccgagggcgacgaggaggaggaggaggaggagggcggcatgggcccctacggcctgcaggagggcagcccccagacccccgaccaggagcagttcctgaagcagcacttcgagaccctggccagcggcgccgcccccggcgcccccgtgcaggtgcccgagagaagcgagagcagaagcatcagcagcagattcctgctgcaggtgcagaccagacccctgagagagcccagccccagcagcagcagcctggccctgatgagcagacccgcccaggtgccccaggccagcggcgagcagcccagaggcaacggcgccaacccccccggcgccccccccgaggtggagcccagcagcggcaaccccagcccccagcaggccgccagcgtgctgctgcccagatgcagactgaaccccgacagcagctgggcccccaagagagtggccaccgccagccccttcagcggcctgcagaaggcccagagcgtgcacagcctggtgccccaggagagacacgaggccagcctgcaggcccccagccccggcgccctgctgagcagagagatcgaggcccaggacggcctgggcagcctgccccccgccgacggcagacccagcagaccccacagctaccagaaccccaccaccagcagcatggccaagatcagcagaagcatcagcgtgggcgagaacctgggcctggtggccgagccccaggcccacgcccccatcagagtgagccccctgagcaagctggccctgcccagcagagcccacctggtgctggacatccccaagcccctgcccgacagacccaccctggccgccttcagccccgtgaccaagggcagagcccccggcgaggccgagaagcccggcttccccgtgggcctgggcaaggcccacagcaccaccgagagatgggcctgcctgggcgagggcaccacccccaagcccagaaccgagtgccaggcccaccccggccccagcagcccctgcgcccagcagctgcccgtgagcagcctgttccagggccccgagaacctgcagccccccccccccgagaagacccccaaccccatggagtgcaccaagcccggcgccgccctgagccaggacagcgagcccgccgtgagcctggagcagtgcgagcagctggtggccgagctgagaggcagcgtgagacaggccgtgagactgtaccacagcgtggccggctgcaagatgcccagcgccgagcagagcagaatcgcccagctgctgagagacaccttcagcagcgtgagacaggagctggaggccgtggccggcgccgtgctgagcagccccggcagcagccccggcgccgtgggcgccgagcagacccaggccctgctggagcagtacagcgagctgctgctgagagccgtggagagaagaatggagagaaagctgtag

SEQ ID NO: 46397 - DNA, 4545 bp, Artificial Sequence
  derived and/or modified sequence
atggctgtggaaggatctactattacatcgaggatcaagaatttactccgaagcccctccattaagctgaggcgcagcaaggctggaaatagaagagaggatctgagcagtaaggtaacactggagaaggttttgggaatcactgtctccggagggagaggattagcttgtgaccctagatctgggctggttgcatatcctgctggctgcgtggttgttttgttcaaccctcgcaaacataaacaacaccacatcttaaattcatctcgcaaaacaataactgctctggctttcagtcctgatgggaaatatttagttactggagagtctggccatatgcccgctgtgcgggtgtgggatgtggcggaacacagccaggtggccgagctccaggaacacaagtatggggtcgcttgtgtggcgtttagcccctcagccaagtacatcgtttcagttggataccagcatgatatgattgtgaacgtgtgggcatggaaaaagaatatcgtggtcgcttctaataaagtctcgagccgggttacagcggtttctttttccgaggactgctcttattttgtgaccgccgggaacagacacatcaaattttggtatctagacgatagcaaaacttccaaagttaatgccaccgtgccgctgctggggcggagcgggctcttaggggagcttagaaacaatttgtttacagatgtcgcctgcgggcggggcaagaaagccgatagcacgttctgcatcacctcttccgggctcttgtgcgaattttctgatcggaggttgctggacaagtgggtagaactgaggaacatcgattctttcaccaccacagtggcccattgcatatctgtctcccaggattatatcttctgtggctgcgccgatgggaccgtgagactgtttaacccatctaatctgcacttcctcagtacactcccgcgaccacatgccctcggcaccgatatcgcctctgtgaccgaggccagtaggctttttagtggcgtggcaaatgctcgatatcccgacactattgcactgactttcgatcctactaatcagtggttaagctgcgtctacaatgatcattctatctatgtgtgggatgtccgagaccccaaaaaggtcggaaaagtctatagcgccctgtatcactcttcttgtgtttggagtgtagaggtgtaccccgaagttaaagattccaaccaggcctgtctgcccccctccagttttattacctgctcgtccgataacaccatacgtctctggaataccgagtcaagcggggtacacggaagcacactccaccgcaatattctctcttccgacttgattaaaattatctacgtggatggaaatactcaggcactactggacactgagctacccgggggagacaaggccgacgccagtttacttgacccacgcgtggggatccggtccgtctgcgtctcgccaaacgggcagcatctcgcctcaggggacagaatgggcactctcagggtgcacgagcttcagtcactgagtgaaatgctgaaggtggaggcccatgattccgagatcctatgcttagaatacagcaagcccgacacaggtctcaaacttctggccagcgcctccagggaccggctcatccacgtattagatgctgggcgcgaatatagtctccaacagactctggatgagcattcatcatctattacagccgtcaaatttgctgcctctgacggacaggtgaggatgatcagctgcggcgcagataaatcaatctacttccgcacagcccagaaaagcggcgacggcgtccagttcactcgcacgcatcacgtagtgcggaagacaacactttatgacatggacgtggaaccaagttggaagtataccgccattggctgtcaggatcggaacatcaggatattcaatatcagcagcggaaaacagaagaaactgtttaagggcagccaaggggaggacggtactttgatcaaagtgcagaccgacccttccgggatttacattgcaacatcgtgttctgacaaaaacttatccatttttgacttctcctcaggagagtgtgttgcgactatgtttggccatagcgaaatagtgacgggcatgaaattctctaatgattgcaaacacctgatttccgtttccggcgactcctgtattttcgtttggcggttgtcttctgaaatgaccattagcatgcgccaaaggctggctgagcttaggcagcgccagagggggggaaagcaacagggtcccagtagtccccaacgtgcctctggtccaaatagacatcaagcgccaagtatgctcagccccggaccagccttgtcaagcgattctgataaagagggggaagacgagggcacggaggaggaactgcccgccctgcccgttctagccaaaagtaccaaaaaggcattggcctccgtccccagtccagccttacccagaagtcttagccattgggagatgtcacgcgcccaggagtccgttggatttctggaccctgccccggctgctaatcctggccccaggagacggggccgatgggttcagcccggagtggagctgtctgtccgttctatgctggacctgcggcagctcgagacgctcgccccaagcctacaggatccttcccaggatagcctggctattattccttcggggcccaggaaacacgggcaggaagccttggaaacaagcctcaccagccagaacgagaagccgccaagaccacaagcaagccagccttgcagctatccacacataattagattgctgtcgcaggaagaaggggtcttcgctcaagacttggaaccagcccctatagaggatggcattgtgtaccccgagccctctgataacccaactatggataccagcgaatttcaggttcaggcccctgcgcgcgggaccctcgggcgggtgtatccaggcagtcgctcatcagagaaacacagcccagattctgcctgctcagtcgactattctagctcttgtctaagctcgccagaacatccaaccgaggatagcgagagtactgagccactgtctgtggacggaatctcttctgatctggaggaaccagcagaaggcgacgaggaggaggaggaggaggaaggcggaatgggcccatacggcctgcaggaaggttcaccacagaccccggaccaggaacagtttctgaagcagcacttcgagacccttgcgtccggggccgcccctggggctcctgtccaggtgccagagcggagtgaaagtcggagcatcagctctcggtttctgctgcaggtgcaaacacggccacttcgggaacccagtccctcaagttcctctcttgcactgatgtctcgccccgcccaggtgccacaagctagtggtgaacagccccggggcaacggcgcaaaccccccaggtgcgccgccagaggtagagccttcctccggcaatccctcccctcaacaggcggccagtgtcctcctcccccggtgtcgactgaaccccgacagttcttgggcccccaagcgtgtcgccactgctagccctttttccggtttacagaaggcacagtctgtccacagcctggttccccaggagcggcacgaagcgagcctgcaggcccctagccccggggctctgctcagccgggaaattgaagcacaggacgggctgggcagcctgccgccggctgacgggcggccatcgcgaccacatagctaccagaatcccaccacatcctcgatggctaagattagccggtccatctcagttggagaaaacctggggttggttgccgagcctcaggctcacgcccctattcgcgtcagccctctgagcaaactggccctcccgtcacgtgctcatctggtccttgatatcccaaagcccctcccagataggcccacattagctgctttttcccccgtcaccaagggccgtgctcctggagaagcggagaaacccggattccccgtcggattgggcaaagcccactcgaccacagaacgctgggcctgtcttggcgagggaaccaccccaaagcctaggacagaatgtcaggcacatccaggtccctcttccccttgtgcgcagcagctgccggtctccagcttattccaagggccagagaacttgcaacctccacctcctgagaagacacccaatccgatggaatgtaccaaaccaggagcagcccttagccaggattctgaacccgctgtcagtttggaacaatgcgaacaactggtggctgagctgcgaggtagcgttcgccaggctgttaggctctatcactccgtagctggctgcaagatgccctcagctgaacaatctcgaattgcacagctacttcgggacaccttttcgagcgtgagacaggagttggaagcagttgccggcgccgtcctgagctcaccaggatccagtcctggagccgtcggcgctgagcagacacaggcactactggaacaatactctgaactgctgttacgagccgttgagcggcggatggagaggaagctctag

SEQ ID NO: 46398 - DNA, 4545 bp, Artificial Sequence
  derived and/or modified sequence
atggctgtggagggcagcaccatcaccagccgcatcaagaacctgctgcggagccccagcatcaagctgcggcgcagcaaggccggcaacagaagagaggacctgagcagcaaggtgaccctggagaaggtgctgggcatcaccgtgtctgggggccggggcctggcctgtgaccccaggagcggcctggtggcctacccagctggctgtgtggtggtgctcttcaaccccaggaagcacaagcagcaccacatcctgaacagcagcaggaagaccatcacagccctggccttctccccagatggcaagtacctggtgactggagagagcggccacatgcctgctgtgcgggtgtgggatgtggccgagcacagccaggtggccgagctgcaggagcacaagtatggagtggcctgtgtggccttcagccccagcgccaagtacatcgtgtctgtgggctaccagcacgacatgattgtgaatgtgtgggcctggaagaagaacatcgtggtggccagcaacaaggtgagcagccgggtgacagctgtgtccttcagcgaggactgcagctactttgtgacagctggcaacagacacatcaagttctggtacctggatgacagcaagaccagcaaggtgaatgccaccgtgcccctgctgggccgcagcggcctgctgggggagctgaggaacaacctcttcacagatgtggcctgtggccggggcaagaaggctgacagcaccttctgcatcaccagcagcggcctgctgtgtgagttcagtgaccggcggctgctggacaagtgggtggagctgagaaatattgacagcttcaccaccaccgtggcccactgcatctctgtgtcccaggactacatcttctgtggctgtgctgatggcaccgtgcggctcttcaaccccagcaacctgcacttcctgagcaccctgccccggccccacgccctgggcacagacatcgcctctgtgacagaggccagccgcctcttctctggagtggccaatgcccgctacccagacaccatcgccctgacctttgaccccaccaaccagtggctgagctgtgtgtacaatgaccacagcatctacgtgtgggatgtgcgggaccccaagaaggtgggcaaggtgtacagcgccctgtaccacagcagctgtgtgtggagcgtggaggtgtacccagaggtgaaggacagcaaccaggcctgcctgccccccagcagcttcatcacctgcagcagtgacaacaccatccggctgtggaacacagagagcagtggagtgcacggcagcaccctgcacaggaacatcctgagcagtgacctgatcaagatcatctacgtggatggcaacacccaggccctgctggacacagagctgcccggcggggacaaggcagatgccagcctgctggacccccgggtgggcatccgctctgtgtgtgtgagccccaacggccagcacctggccagcggggacaggatgggcaccctgcgggtgcatgagctgcagagcctgtctgagatgctgaaggtggaggcccatgacagcgagatcctgtgcctggagtacagcaagccagacaccggcctgaagctgctggccagcgccagccgggacaggctcatccacgtgctggatgctggccgggagtacagcctgcagcagaccctggatgagcacagcagcagcatcacagctgtgaagtttgctgccagtgatggccaggtgaggatgatcagctgtggggctgacaagagcatctacttcagaacagcccagaagtctggagatggagtgcagttcaccaggacccaccacgtggtgaggaagaccaccctgtatgacatggatgtggagcccagctggaagtacacagccatcggctgccaggacaggaacatccgcatcttcaacatcagcagcggcaagcagaagaagctgttcaagggcagccagggagaagatggcaccctcatcaaggtgcagacagaccccagcggcatctacatcgccaccagctgcagcgacaagaacctgagcatctttgacttcagcagcggggagtgtgtggccaccatgtttggccacagcgagatcgtgacaggcatgaagttcagcaatgactgcaagcacctgatctctgtgtctggggacagctgcatctttgtgtggaggctgagcagcgagatgaccatctccatgaggcagaggctggccgagctgcggcagaggcagagaggaggcaagcagcagggccccagcagcccccagagggccagcggccccaacagacaccaggcccccagcatgctgagccctggccctgccctgagcagtgacagcgacaaggagggggaggatgagggcacagaggaggagctgcctgccctgcctgtgctggccaagagcaccaagaaggccctggcctctgtgcccagccctgccctgcccaggagcctgagccactgggagatgagccgggcccaggagagcgtgggcttcctggaccctgccccagctgccaaccctggccccaggagaagaggccgctgggtgcagcccggggtggagctgtctgtgcgctccatgctggacctgcggcagctggagaccctggcccccagcctgcaggaccccagccaggacagcctggccatcatccccagcggccccaggaagcacggccaggaggccctggagaccagcctgaccagccagaatgagaagccaccccggccccaggccagccagccctgcagctacccccacatcatccggctgctgagccaggaggagggcgtgtttgcccaggacctggagcccgcccccattgaagatggcatcgtgtacccagagcccagcgacaaccccaccatggacaccagcgagttccaggtgcaggccccagcccggggcaccctgggccgggtgtacccaggcagccgcagcagcgagaagcacagcccagattctgcctgcagcgtggactacagcagcagctgcctgagcagccctgagcaccccacagaggacagcgagagcacagagcccctgtctgtggatggcatcagcagtgacctggaggagccagcagaaggagatgaggaggaggaggaggaggagggcggcatgggcccctacggcctgcaggagggcagcccccagaccccagaccaggagcagttcctgaagcagcactttgagaccctggccagcggggccgcccctggggcccctgtgcaggtgcctgagaggtctgagagccgcagcatcagcagccgcttcctgctgcaggtgcagacccggcccctgcgggagcccagccccagcagcagcagcctggccctgatgagcaggcctgcccaggtgccccaggccagcggggagcagcccagaggaaatggagccaaccccccaggggcccctcctgaggtggagcccagcagcggcaaccccagcccccagcaggccgcctctgtgctgctgccccgctgccgcctgaacccagacagctcctgggcccccaagagggtggccacagccagccccttcagcggcctgcagaaggcccagagcgtgcacagcctggtgccccaggagagacatgaggccagcctgcaggcccccagccctggggccctgctgagccgggagattgaggcccaggacggcctgggcagcctgcccccagcagatggccggcccagccggccccacagctaccagaaccccaccaccagctccatggccaagatcagccgcagcatctctgtgggggagaacctgggcctggtggccgagccccaggcccacgcccccatccgggtgagccccctgagcaagctggccctgcccagccgggcccacctggtgctggacatccccaagcccctgcctgaccggcccaccctggccgccttcagccctgtgaccaagggccgggcccctggagaggccgagaagccaggcttccctgtgggcctgggcaaggcccacagcaccacagagcgctgggcctgcctgggggagggcaccacccccaagcccaggacagagtgccaggcccaccctggccccagcagcccctgtgcccagcagctgcctgtgagcagcctcttccagggccctgagaacctgcagcccccacctcctgagaagacccccaaccccatggagtgcaccaagccaggggccgccctgagccaggacagcgagcctgctgtgtccctggagcagtgtgagcagctggtggccgagctgcggggctctgtgcggcaggccgtgcggctgtaccacagcgtggccggctgcaagatgcccagcgctgagcagagcagaattgcccagctgctgcgggacaccttcagctctgtgcggcaggagctggaggccgtggccggggctgtgctgagcagccctggcagcagccctggagctgtgggcgctgagcagacccaggccctgctggagcagtacagcgagctgctgctgcgggctgtggagaggaggatggagaggaagctgtag

SEQ ID NO: 46399 - DNA, 4545 bp, Artificial Sequence
  derived and/or modified sequence
atggccgtggagggcagcaccatcaccagccggatcaagaacctgttgcggagcccctctataaagctgcgaagatccaaggctggcaaccggcgcgaagatttgagctctaaggtgacacttgaaaaagtcttgggtattactgtcagtggaggaagagggctcgcctgcgacccacggagtgggcttgtagcctatcccgcgggttgcgtggtggttctgtttaatcctcggaagcacaagcagcatcacatcctgaactcctctcgcaaaacaatcactgccctcgcttttagcccagacggaaagtacctggtgacaggagagtcaggtcatatgccagcggtccgagtgtgggacgtggccgaacattcccaggttgccgaactccaggagcacaaatacggggtcgcgtgtgtggcgttcagcccaagtgctaagtacatagtgtcggtgggataccagcatgatatgattgtcaacgtttgggcctggaagaagaatatcgtggtcgcgtctaacaaagtttcatctagggtgaccgcggtaagctttagcgaggactgtagttactttgtgactgcaggtaatcggcatattaagttctggtatctagatgattctaagaccagcaaggtgaacgctacagtgcccctcctgggaagaagcggccttttgggcgaactccggaacaacttattcactgacgtggcctgcggcaggggaaagaaggccgacagtacgttttgcatcacctcttctgggctgctgtgcgagttcagtgatcgccgtctcctcgacaagtgggttgagctccgcaatattgacagcttcacaacgaccgtggcccattgcattagcgtttcgcaagattatatattttgtgggtgtgcagatggaacggtccggttgtttaatcccagtaacttacactttctatcaaccctgcccaggcctcacgctctgggaactgacatagccagcgtgactgaggcttctcgattgttttctggagtggccaacgcgaggtacccggacaccattgccctgacatttgatcctactaaccagtggctgtcgtgcgtgtataacgatcacagcatatacgtctgggatgttagagatcccaagaaggtaggtaaagtgtacagcgcactctatcactctagctgcgtctggtcggtggaggtgtaccctgaggtgaaggattccaatcaggcctgcttgcctccttcttcattcattacctgtagcagcgacaacaccatccggctctggaataccgaaagcagcggcgtccatggcagtacactgcacaggaacatcctgagttccgatctgattaagattatctacgtggacgggaatacacaggcacttcttgatactgaactgcctggaggtgataaagctgacgcgagcctgctggacccacgcgttggtatccggagcgtctgcgtttctcccaatggacagcacttagcttcaggcgataggatgggtacactcagggtgcacgagcttcagtccttgagtgagatgctgaaagtggaggcccatgatagcgagattctgtgcctcgagtattctaagccagacactggattgaagctgctggcaagcgcctctcgggaccgtctgattcatgtccttgatgccgggcgagaatacagccttcagcagacactcgacgaacattctagttccattactgcggtcaagttcgctgccagtgatggtcaggtgaggatgatcagctgtggagcggataaatctatatattttaggactgctcagaagagcggagacggagttcagttcacccgtacccatcacgtggttcggaaaacgaccctttatgacatggacgtggaaccttcctggaaatacactgctatcgggtgtcaggaccgcaatatccgaattttcaatatctcttcaggcaaacaaaaaaagctgttcaaggggtcacagggtgaagatggaactctcatcaaagtgcagacagatcctagtggcatctatatcgccacgagctgttccgacaagaacctctccatctttgacttcagttcgggcgagtgtgtggccacaatgtttggtcacagtgagatcgtgacaggcatgaagttctccaatgactgcaagcacctgatctcagtgtcgggggattcatgcattttcgtctggaggctcagttccgaaatgacaattagtatgagacagcgacttgcagaactgcgacagcgacagcgaggaggaaagcagcagggcccatcatccccacagcgagcatctggccctaataggcaccaggcaccctcaatgctttctccggggcccgcactatcaagcgactccgataaggagggagaggatgaaggcacggaagaggaactgcccgcccttccggttctggccaagtctaccaagaaggctttggcttccgtcccctctccggcccttccacggtctttgagccattgggagatgtcccgcgcccaggagagcgttgggtttcttgatccagcacccgctgcgaaccctgggcccagacgcagaggcagatgggttcagccaggcgtagagctctcggttaggtcaatgttggatctgcgccaactggagacattagctccttccttacaggacccatctcaggactcgctcgccattattcccagcggcccacggaagcacggacaggaagcacttgaaacttctctgactagccaaaacgagaagcccccgaggccacaggcttctcagccgtgcagctacccacatatcatacgtctgctcagtcaggaagaaggtgtgttcgcccaggacttggaacctgctcccatcgaagacggaattgtgtacccagaacctagtgacaatccgaccatggacacctccgaattccaggtccaggccccggcgaggggaactctcggccgggtttaccctggatctaggtccagtgaaaaacacagtcccgactccgcgtgtagcgtcgactactcctcttcatgtttgtcaagtcccgagcacccaaccgaggacagtgagagcaccgaacctctgagtgtggacggaatttcatctgaccttgaagagcccgctgagggagatgaggaagaggaggaagaagaagggggtatgggcccttacggcctgcaggagggatcaccccagactcccgaccaagaacagtttctcaaacagcactttgaaacccttgcatctggcgctgcgcccggagcacccgtgcaggtgcccgaacggtctgaatcccggtctatctctagccgctttttgcttcaagtgcagacgaggcccctgcgagagccttccccttcctcctcctcactcgctctcatgtcccgtcccgcacaagtgcctcaggcatctggagagcagccgagaggcaacggagccaaccctccaggtgcgcctcccgaagtggaaccatcatctggtaatcccagcccccagcaggccgcgtctgtcctcctccctcgctgccgactgaatcccgattcgagctgggctcccaagcgtgtggccacagccagcccctttagtggcctgcaaaaagcccagtccgtccattccctggtccctcaggaacgacatgaagcaagtcttcaggccccatctcctggtgcgctattgtcgcgtgagatcgaagcacaagacggtcttgggagcctcccccccgcagatggccggccctccaggcctcactcctaccagaaccctaccacctctagtatggcaaagatatcccgctctatcagcgtgggcgaaaatctgggcctggtagccgaacctcaggctcatgctcctatccgcgtttccccccttagcaagttagctctgcctagccgagcccatttggtgcttgacattcctaaaccactgcctgatcgccctacactggcagcttttagcccggtgactaagggcagggctcccggcgaagctgagaaacccggctttcccgtgggccttggcaaagcacattccacgactgaacgatgggcctgtctgggcgagggcactaccccaaagcctagaaccgagtgtcaggcacatcccggcccaagcagcccttgcgcccaacagttgcccgtgtccagcctgttccaaggtcctgaaaatctacagccaccaccaccagaaaagacaccaaacccaatggaatgtaccaagcccggagcagctctgagtcaagactccgagccagccgtgtcattggagcagtgcgaacagcttgtggccgagctgagagggtcagtgcggcaggccgtgcgactgtatcactctgtcgccggatgtaagatgccatccgcagagcaatctagaatagcccagttgctgcgtgacacattttcttctgttcggcaagagcttgaggctgtggctggagccgtgctatcctccccaggctcatcccccggcgctgtaggagccgagcagacacaggctctcctggaacagtacagcgagctgctgctgagagccgtggagagacgaatggagcgcaaactgtag

SEQ ID NO: 46400 - DNA, 7158 bp, Artificial Sequence
  derived and/or modified sequence
cgctgcggctaccgcggcggagctgaaattgccgaacgcgatgcccgagggcgctgtgagcggggtggccttagctcgccgaggctggtcagtgagagggcatactgggaagccctctggagtgggaagacagtgccgctgttgagacaagacccaggactgggccggggactgtcccaaagggtttctcgtcataatggctgtggaagggtcaaccattaccagccggatcaagaatctgttgagatctccatccatcaaactgcgcaggagtaaggcaggaaaccgacgagaggacctcagctccaaggtgaccttggagaaggtgctgggaattacagtgtctggaggcagaggacttgcctgtgacccccgatcaggtttagttgcttacccagcagggtgtgtggttgtgttgttcaatccccggaaacacaaacagcaccacatcctcaacagttccaggaaaaccatcactgcccttgccttctcccctgatggcaagtacttggtcactggagagagtgggcacatgcctgccgtgcgggtttgggacgtggcagagcacagccaggtggccgagctgcaggagcacaagtatggtgtggcttgtgtggccttctctcctagcgccaagtacattgtctctgtgggctaccagcatgacatgatcgtcaacgtgtgggcctggaagaaaaacattgtggtggcctccaacaaggtgtccagtcgggtgacagcagtgtccttctctgaggattgcagctactttgtcactgcaggcaaccgacacatcaaattctggtatctcgatgacagcaagacctcaaaggtgaatgccactgtgcccttgctgggccgctcagggctgctgggagagctacggaacaacctattcactgatgtggcctgtggcagaggaaaaaaggcggacagtaccttctgcatcacgtcctcagggctgctgtgcgagttcagtgatcgaaggcttttggacaagtgggtggagctgaggaacatagacagcttcacaaccacagtggcccactgcatctctgtgagccaagactacatcttctgtggctgtgctgatggcaccgtgcgccttttcaacccctctaacctgcacttccttagcaccttgccccgaccccatgctctggggacagacattgctagcgtcaccgaggccagtcgcctcttctctggagtggcgaatgccaggtatccagacaccattgccttgacctttgatcctactaatcagtggctgtcttgtgtgtacaacgatcatagcatttatgtttgggatgtgagggaccccaagaaagtgggcaaggtgtactcggctctgtatcattcttcctgcgtctggagtgtggaggtctaccccgaggtgaaggatagtaaccaggcctgcctgccccccagttcctttattacctgctcctcagacaacaccatccgcctgtggaacacagagagctccggggtgcatggctccaccctccaccgaaacatcctcagcagtgacctcattaaaatcatctatgtggatgggaacacccaggccctgctggacacagagctgcctggaggagacaaagctgatgcatccctgttggatccccgcgtgggcatccgctcggtgtgtgtcagccccaatggacagcatctagcatcaggggaccgtatgggcacacttagggtgcacgaacttcagtccctgagtgagatgctgaaggtggaggcccatgactctgagattctgtgcctggagtattctaagccagacacaggtctgaaactgctagcatcggcgagccgggaccggctgatccatgtgctggatgccgggcgggagtacagcctacagcagacgctggacgaacactcatcctccatcactgctgttaagtttgcagccagtgatgggcaagtccgcatgatcagctgtggagcagacaagagcatctacttccgcactgcgcagaagtctggagatggagtgcagttcacacggacacaccacgtggtgcggaagacgaccctctatgacatggatgtggagcccagctggaagtacacggctatcggctgccaggaccgaaatattcggatatttaacatcagcagtggaaagcagaagaagctgtttaaagggtcacagggtgaggacggcacactcattaaggtgcagacagacccctcagggatctacattgccaccagctgttctgacaagaatctctccatttttgacttctcctcaggcgagtgcgtggccaccatgtttggccactcagagattgtcactggcatgaaatttagtaatgattgtaaacatctcatctctgtgtctggggacagctgcatatttgtgtggcgcctgagctctgagatgaccatcagcatgaggcagcgtctggccgagttgcgccagcgtcagcggggcggcaagcagcaaggaccatcctctccccaaagggcttctggacccaaccggcaccaggccccatcaatgctgtctcctggaccggctctctcatcagacagtgacaaggagggagaagatgaggggactgaagaagaacttccagcactgcccgtccttgccaagagtaccaagaaggcactggcctcggtccccagcccagctttgccccgaagcctgtcccactgggagatgagtcgggcacaggagtccgtggggttcctggacccagctcctgcagccaacccaggacccagaagaagagggcgctgggttcagccaggtgtggaactgagcgttagatccatgctggatctgcggcagctggaaacactggccccaagcctgcaggaccctagccaggactcgctggccatcatcccatctggtcccaggaagcatgggcaggaggcccttgagacttcactcactagccagaatgaaaagccccctcggcctcaggcttcccaaccttgttcctatccccatattatccgattattgtcacaagaggaaggggtctttgcccaagatctggaacctgcacccattgaagatggtattgtctacccggagccgagtgacaaccccaccatggataccagtgagttccaagtgcaggctccagcccggggaactctgggaagagtgtacccaggcagcaggagctcagaaaagcacagccctgacagtgcctgctctgtggattacagcagcagctgcctttccagcccggagcaccccactgaagactctgagagcacggagcccctcagtgtggatggcatctcctcagaccttgaagagccagctgagggtgatgaagaagaggaagaagaggagggaggcatgggcccctatgggctacaggagggcagcccccagactccagaccaggagcagtttctaaaacagcactttgagactctggccagtggagctgctccaggggccccagtgcaggtcccagagaggtcagagtctcggagtatctcttcacgattcctgttgcaagtacagacccgcccactcagggaaccatccccatcctcctcaagcctggcactgatgtcgagaccagcccaggtgccacaggcatctggtgagcagccgagaggcaatggtgccaatccccctggagcacccccggaggtggaaccgtcctctggcaaccccagcccccagcaggcagcctctgtgctgttgccacgatgccgtctcaaccctgacagcagctgggctcccaagagagtggccacagccagccccttttctggactccagaaggcccagtctgtgcacagtctggtgccacaggaaagacatgaggccagtctgcaggccccttcaccaggcgcactgctgtctcgggagatcgaagctcaggatggtctgggctccctgcccccagctgatggccgtccgtctcggcctcactcctatcagaaccccaccaccagttccatggccaagatatcccgcagtatctctgttggggagaacctgggcctggtggctgaacctcaagctcatgcccccatccgagtctcaccactcagcaagctggccctgcccagccgggctcacctggtcctggacatccccaaaccactgcctgaccgtcctaccctggctgcattctctcctgtcaccaaaggccgggcccctggcgaggcagaaaagcctggcttcccggtgggcctaggaaaagctcacagtacaactgagagatgggcctgtttgggggagggcaccactcccaagcctaggacagagtgccaggctcatcctgggcccagcagcccctgtgcccagcaactgccagtcagcagcctcttccaaggccctgaaaacttgcagcccccaccccctgagaagactcccaaccccatggaatgcaccaagccaggggcagccctgagccaggactcagagccagcggtgagcctggagcagtgtgagcagctggtggcagagctccgcggcagcgtgcgccaggcagtgcggctctaccactcggtggctggctgcaagatgccctcagcagagcaaagtcggattgcccagctcctcagagacaccttctcttcagtgcgacaggagctggaagctgtggctggggcagtgctgtccagcccaggcagcagccctggggctgtgggagccgagcagacacaggccctgctggagcaatactcagaactgttgcttcgagccgtggaacggcgtatggaacgcaaactctgagttctggaagcctgtcccaagtgaatgaatgctccagcgattccaaactgcagcccctctgcccctcaccaaaacctgcggggctgcttggagtggaaagcagggagcagtgttcagaggcaaagcagccttcccagccgctcctcgtggggggcctgtatttattaatttatttccctgactgttgcctcacttccttggaactcctgcctccacagcccctccagtggcagggacaggtcttgggtctttgtcatcttggtgctgtgagaggtaggagggcagcctgccccatctaggaatctgggaagggctggccctctcttagaagccatttgaaattactgcagggattagctccctgtggtggagcatacacagggtactctggggtcgaggtgagaggtgatgtggtattcagtgcccgtcagccaactgtgggccttcacctctacctgcacttcccctctcacaccagctgcactcccgtggctgccagagcagggtggttttccccaatacctggagctcagaaaggcagagccatctggccctccagggtgtccccagccatcaggagacttgagttggtatttggacctgagcccgcacattccactcccattctccctccaagaggggcccagcattgtatttccctgtgaccccttactctcctggccagaacttgagccagctgtgggatgttgctgcaggacagtaagccctcacctgggcaaacatgaagctctggcctcctttcctcagccccttgttcttccctgtcctccaccctggaccccagccggctgctggagcccagaggccaccttctccctgcatcctgaatgatgcttagtcagaagcctgtgttggaacatccctcgtttacggggcgctggcctacctcctgaggacctcagccacagatgagatcacacgcatgcacgtgcacacatgtacacacacacacctacctgcacagcacgctgttgagtgttggttgctagagtatctggctggctgctgtgtgcctggtttcctcacatcctgcctcagcttcaccaccctggcttatgtggaacacctatcagggagcagaaaaggggtgcagtacactaagtgaacccagattctggattcttggtgtccacagcctagctgatacgagatagcccataggacacctggtttaggtagaaggagcctcctcaaaggcagtgctgggcacccacgggtgtgctggatactggagtttgagaggagggaggtgctggggccaaaggagacactagaaaagtggtagatgggacaggtaagtggcagaggtgaggggataagttagaatgtaaaagggcagtaattaggggtgagggaaaggagataggggaccctaggaggtagagtgggaccatgtcgtgaggcagttgaagagttgaggaaaggtttttctgggccctactgctcccctctgctgcaggtaagtcagagcagctttaccacagcttcaggccacgagagccccttcacccgccctgctgcgccataggcagaggcttataaagaaatgggttctgggccaggtgtggtggctcaagcctgtaatcccagcactttgggaggccgaggcgggtggatcacctgaggttaggagttcgagatcagcctggccaacatggtgaaaccctgtctactaaaaataaaaaaattagctgggcgtggtggtgggcgcctgtaatcccagctactcgggaggtttaggcaggagaatcgcttgaaccctggaggtggaggtggaggttgcagtgagccgagatcgcgccattgcactccaacctaggtgacaaagctacacgccatctcaaaaaaaaaaaagaaaaagggttacaaaaggttcccagctccggggcatcagcctgagtgcgcttgagctgctccaaacctggcccttccccactcctctagcatcgccacccgcatggccctggaactcccgcggcggcgggggcgggcccgtgcctgctgtgccccgacttcccacaccagccgcgcccaccgcaggtgggactcaggttcgccctctgggccaggtccttcacgaggagggagctacccttcgccagaagtttgtgagaatgtggccgcccttttcctgccctctgccccatgtgggtggggggcctcgtggcccggccggcgccccgtccccttctgcatgtctgaggccaccggcaaccgccgccccactccagatttgcccccgccttgttttgaaagccccttatttataacttttatactttgtgcaggtcgcggcgcttcctgcctcatcctcggctgcatggggcgggggcgctgtttttaacgtgcccgtttgtactgatgtatgaacttgtcaataaacacaattgtttgtt

SEQ ID NO: 46401 - DNA, 4545 bp, Artificial Sequence
  derived and/or modified sequence
atggccgtcgaagggagcaccataacatctcggatcaagaatctgctcagatcccctagtatcaaactccgtaggtccaaggcagggaataggagagaggatctgtcatctaaagtcactcttgagaaagtcctgggaatcactgtgtccggagggaggggactggcatgtgatcctagatctggccttgttgcatacccggcaggatgcgtggtggttctgtttaaccccagaaaacacaaacaacaccacatactgaactcaagcaggaagacaataacggccttggctttttctccagacggcaagtatctggtgaccggggaaagcggccatatgccagctgttagagtctgggatgtcgccgagcacagtcaggtggcggagctgcaggaacataagtacggcgtcgcatgcgtggccttttcgccctcggccaagtatatcgtgtctgtcgggtaccagcatgatatgattgttaacgtatgggcctggaagaagaacattgttgtggcatccaacaaggtttcaagcagggtaactgcagtcagcttcagcgaggactgtagctattttgtgacggctggcaatagacacatcaagttttggtacctagacgatagcaagacaagtaaggtgaacgccacagtacctctgctggggcgaagcggcctccttggggagctacgaaataacctttttactgacgtggcctgtgggagggggaaaaaagcagatagcacgttctgcatcacgtcttctggcctgctttgcgagttcagtgacagacgactgctggacaagtgggtggagctcaggaatattgattcatttacaaccaccgtcgctcactgtatttctgtctcacaggactacatcttttgcgggtgtgccgatggaaccgtacgcctgtttaatccttcaaatttgcacttcctgtcgactctgccccgtcctcacgctctcggcactgatattgcatcagtaacagaagcctctcggttgtttagcggcgtggctaatgcaagataccccgatacaattgccctgacattcgatcctaccaatcaatggttgtcgtgtgtgtataatgatcacagcatttacgtgtgggatgtcagagatcccaagaaagtggggaaagtatattccgctttgtatcactcatcttgcgtttggagcgtggaggtctatccagaagtgaaagacagcaatcaggcctgcctgccgccatcaagctttattacatgttcttctgataataccatccgactgtggaacacggagtcaagcggtgtccacggttctactctccacaggaacatcctgtccagcgacctgataaagatcatctatgttgacggcaacactcaggcgctgctggataccgaactccctgggggtgataaagccgacgcctcactgcttgaccccagagttggcatccgatcagtctgtgtcagtccaaatggacagcacttggcaagcggcgaccggatgggaacacttcgggtccacgagctccaatcattaagtgaaatgctaaaggtggaagcacatgattccgagattttgtgcttagagtactccaagccagacaccgggctcaaactgctagctagcgcctctcgtgatagactcatacacgtgctagacgcagggagagagtactctcttcagcagacattggacgagcattcgagcagtatcacagcggtgaagttcgctgcatcagatggccaggtgcgcatgatcagttgtggagctgataaatccatctattttagaacggctcagaaatccggggacggcgtccagtttaccaggacacatcacgttgtgagaaagactaccttatacgatatggacgtcgaaccctcttggaaatacacagcgattgggtgtcaggaccgcaatattagaatatttaatatcagcagcgggaaacagaagaagttatttaagggttcacagggagaggatggaaccctcattaaggtccaaacagatcctagtggcatttacattgcaacatcctgcagcgacaagaatctttcgatttttgatttttcttccggagagtgtgtggctaccatgttcgggcactccgaaatcgtgactggcatgaaattcagtaatgactgcaagcaccttatatccgtgtcaggtgattcatgcattttcgtgtggcggctatcctctgaaatgacaatctcaatgcggcagcgacttgcagagctccgacagagacagcgcggtggaaagcagcagggaccttcatcaccgcaacgcgcatctgggccaaatcgccaccaggccccttctatgctgtctccaggcccagctctcagttctgattctgacaaagaaggtgaagacgagggcacagaggaagagcttcccgctctacctgtgctggccaagtctactaagaaggccttagcgagtgttccttcgccagccctcccacgctctctgagtcactgggagatgtctcgcgctcaagagtcagtggggtttcttgaccccgcacctgctgccaaccccggtccgagacgcagggggaggtgggtgcagcccggagttgaactgtctgtacgcagtatgctagaccttcgccagctcgaaacacttgccccatctctccaggaccccagccaggatagccttgctataattccatcaggtccccgaaaacacgggcaagaagcattggagactagcctgacatcacaaaacgagaagccaccaaggcctcaggcttcgcagccttgctcctatccacacattatccggttactgagtcaggaagaaggggtatttgctcaggatctcgagcccgcacccatcgaggacgggattgtttatccggagccttctgataaccccacgatggatacctctgagttccaggtacaggctcccgcaagaggaaccttaggcagggtttaccccggaagtcgttctagcgagaagcactcaccggacagtgcctgttcggtcgattattcttccagctgcctttctagtccagagcatccgaccgaggatagtgaatctacagagccccttagtgttgacggcatttccagcgacttagaagagcctgccgaaggcgacgaagaagaagaagaggaggagggcggaatgggaccctacggcctacaggaaggctcacctcaaacgcccgaccaggagcagtttctaaagcagcattttgagacactggcttccggagctgcaccaggcgctccagttcaggttcctgaacgttcggaatctaggtcgatctcctcacgcttcctcctgcaggttcagacccggcctctcagggaacctagtccctctagttcctcactggccttgatgagtcgccctgctcaagtacctcaagcaagcggcgaacagcctcgcggaaatggggcaaaccctcccggagcaccgcctgaagtggagcccagttctggcaatcctagcccccagcaggctgcttccgtcctgctgcccagatgccgacttaatcccgactccagttgggctccgaaaagggtagcgacagcgagtccattcagtggccttcagaaggctcaatcagtgcactctttggtgcctcaggaacgtcatgaggccagcctgcaggccccaagtcctggagcactattgagtcgagagatcgaagcccaggacggcctaggtagcctacctcccgcagatggtaggccctccagaccccactcttatcagaaccctaccacatcttcaatggccaagatctcaagaagcattagcgtcggtgaaaacctgggattggtcgccgagccccaggcccacgctcccattagggtctctcccctctccaagctagcattaccaagcagggctcaccttgtcctcgatatccccaaaccattgcctgatcgccctaccctagccgctttcagccccgtaacgaaaggtcgggctcccggtgaagccgaaaaaccaggattcccggttggtctgggtaaagcacacagtaccacggagagatgggcttgtcttggggaaggcacaaccccaaagcctcggacagaatgccaggcgcaccccggacccagttctccttgcgcccagcaactccccgtaagctctttattccagggaccagagaatctgcagcccccaccacctgagaagactcctaatccaatggagtgtaccaagcccggagctgcccttagccaggattccgagcctgccgtgtccttggagcagtgcgagcagctcgtagccgaactaagaggctctgtacgacaggctgtgcggttataccattccgtggccggttgcaagatgcccagtgccgagcagtcccgcatagctcagctgctgcgagacacctttagtagcgtgagacaggagcttgaagcggtcgccggagctgtgctaagctctccgggttcctcgcctggagccgtgggagcagagcagacgcaagctttgctggagcagtactctgagctcttgttgcgcgctgtggagaggcggatggagaggaagctctag

SEQ ID NO: 46402 - protein, 1118 aa, Artificial Sequence
  derived and/or modified sequence
MPAVASVPKELYLSSSLKDLNKKTEVKPEKISTKSYVHSALKIFKTAEECRLDRDEERAYVLYMKYVTVYNLIKKRPDFKQQQDYFHSILGPGNIKKAVEEAERLSESLKLRYEEAEVRKKLEEKDRQEEAQRLQQKRQETGREDGGTLAKGSLENVLDSKDKTQKSNGEKNEKCETKEKGAITAKELYTMMTDKNISLIIMDARRMQDYQDSCILHSLSVPEEAISPGVTASWIEAHLPDDSKDTWKKRGNVEYVVLLDWFSSAKDLQIGTTLRSLKDALFKWESKTVLRNEPLVLEGGYENWLLCYPQYTTNAKVTPPPRRQNEEVSISLDFTYPSLEESIPSKPAAQTPPASIEVDENIELISGQNERMGPLNISTPVEPVAASKSDVSPIIQPVPSIKNVPQIDRTKKPAVKLPEEHRIKSESTNHEQQSPQSGKVIPDRSTKPVVFSPTLMLTDEEKARIHAETALLMEKNKQEKELRERQQEEQKEKLRKEEQEQKAKKKQEAEENEITEKQQKAKEEMEKKESEQAKKEDKETSAKRGKEITGVKRQSKSEHETSDAKKSVEDRGKRCPTPEIQKKSTGDVPHTSVTGDSGSGKPFKIKGQPESGILRTGTFREDTDDTERNKAQREPLTRARSEEMGRIVPGLPSGWAKFLDPITGTFRYYHSPTNTVHMYPPEMAPSSAPPSTPPTHKAKPQIPAERDREPSKLKRSYSSPDITQAIQEEEKRKPTVTPTVNRENKPTCYPKAEISRLSASQIRNLNPVFGGSGPALTGLRNLGNTCYMNSILQCLCNAPHLADYFNRNCYQDDINRSNLLGHKGEVAEEFGIIMKALWTGQYRYISPKDFKITIGKINDQFAGYSQQDSQELLLFLMDGLHEDLNKADNRKRYKEENNDHLDDFKAAEHAWQKHKQLNESIIVALFQGQFKSTVQCLTCHKKSRTFEAFMYLSLPLASTSKCTLQDCLRLFSKEEKLTDNNRFYCSHCRARRDSLKKIEIWKLPPVLLVHLKRFSYDGRWKQKLQTSVDFPLENLDLSQYVIGPKNNLKKYNLFSVSNHYGGLDGGHYTAYCKNAARQRWFKFDDHEVSDISVSSVKSSAAYILFYTSLGPRVTDVAT

SEQ ID NO: 46403 - protein, 331 aa, Artificial Sequence
  derived and/or modified sequence
LTGLRNLGNTCYMNSILQCLCNAPHLADYFLTGKYMSNLLGHKGEVAEEFGIIMKALWTGQYRYISPKDFKITIGKINDQFAGYSQQDSQELLLFLMDGLHEDLNKFQADNRKRYKEETAEHAWQKHKQLNESIIVALFQGQFKSTVQCLTCHKKSRTFEAFMYLSLPLASTSKCTLQDCLRLFSKEEKLTDNNRFYCSHCRARRDSLKKIEIWKLPPVLLVHLKRFSYDGRWKQKLQTSVDFPLENLDLSQYVIGPKNNLKKYNLFSVSNHYGGLDGGHYTAYCKNAARQRWFKFDDHEVSDISVSSVKSSAAYILFYTSLGPRVTDVAT

SEQ ID NO: 46404 - protein, 135 aa, Artificial Sequence
  derived and/or modified sequence
MPAVASVPKELYLSSSLKDLNKKTEVKPEKISTKSYVHSALKIFKTAEECRLDRDEERAYVLYMKYVTVYNLIKKRPDFKQQQDYFHSILGPGNIKKAVEEAERLSESLKLRYEEAEVRKKLEEKDRQEEAQRLQ

SEQ ID NO: 46405 - protein, 73 aa, Artificial Sequence
  derived and/or modified sequence
MPAVASVPKELYLSSSLKDLNKKTEVKPEKISTKSYVHSALKIFKTAEECRLDRDEERAYVLYMKYVTVYNLI

SEQ ID NO: 46406 - DNA, 3357 bp, Artificial Sequence
  derived and/or modified sequence
atgcccgccgtggccagcgtgcccaaggagctgtacctgagcagcagcctgaaggacctgaacaagaagaccgaggtgaagcccgagaagatcagcaccaagagctacgtgcacagcgccctgaagatcttcaagaccgccgaggagtgcagactggacagagacgaggagagagcctacgtgctgtacatgaagtacgtgaccgtgtacaacctgatcaagaagagacccgacttcaagcagcagcaggactacttccacagcatcctgggccccggcaacatcaagaaggccgtggaggaggccgagagactgagcgagagcctgaagctgagatacgaggaggccgaggtgagaaagaagctggaggagaaggacagacaggaggaggcccagagactgcagcagaagagacaggagaccggcagagaggacggcggcaccctggccaagggcagcctggagaacgtgctggacagcaaggacaagacccagaagagcaacggcgagaagaacgagaagtgcgagaccaaggagaagggcgccatcaccgccaaggagctgtacaccatgatgaccgacaagaacatcagcctgatcatcatggacgccagaagaatgcaggactaccaggacagctgcatcctgcacagcctgagcgtgcccgaggaggccatcagccccggcgtgaccgccagctggatcgaggcccacctgcccgacgacagcaaggacacctggaagaagagaggcaacgtggagtacgtggtgctgctggactggttcagcagcgccaaggacctgcagatcggcaccaccctgagaagcctgaaggacgccctgttcaagtgggagagcaagaccgtgctgagaaacgagcccctggtgctggagggcggctacgagaactggctgctgtgctacccccagtacaccaccaacgccaaggtgacccccccccccagaagacagaacgaggaggtgagcatcagcctggacttcacctaccccagcctggaggagagcatccccagcaagcccgccgcccagaccccccccgccagcatcgaggtggacgagaacatcgagctgatcagcggccagaacgagagaatgggccccctgaacatcagcacccccgtggagcccgtggccgccagcaagagcgacgtgagccccatcatccagcccgtgcccagcatcaagaacgtgccccagatcgacagaaccaagaagcccgccgtgaagctgcccgaggagcacagaatcaagagcgagagcaccaaccacgagcagcagagcccccagagcggcaaggtgatccccgacagaagcaccaagcccgtggtgttcagccccaccctgatgctgaccgacgaggagaaggccagaatccacgccgagaccgccctgctgatggagaagaacaagcaggagaaggagctgagagagagacagcaggaggagcagaaggagaagctgagaaaggaggagcaggagcagaaggccaagaagaagcaggaggccgaggagaacgagatcaccgagaagcagcagaaggccaaggaggagatggagaagaaggagagcgagcaggccaagaaggaggacaaggagaccagcgccaagagaggcaaggagatcaccggcgtgaagagacagagcaagagcgagcacgagaccagcgacgccaagaagagcgtggaggacagaggcaagagatgccccacccccgagatccagaagaagagcaccggcgacgtgccccacaccagcgtgaccggcgacagcggcagcggcaagcccttcaagatcaagggccagcccgagagcggcatcctgagaaccggcaccttcagagaggacaccgacgacaccgagagaaacaaggcccagagagagcccctgaccagagccagaagcgaggagatgggcagaatcgtgcccggcctgcccagcggctgggccaagttcctggaccccatcaccggcaccttcagatactaccacagccccaccaacaccgtgcacatgtacccccccgagatggcccccagcagcgccccccccagcaccccccccacccacaaggccaagccccagatccccgccgagagagacagagagcccagcaagctgaagagaagctacagcagccccgacatcacccaggccatccaggaggaggagaagagaaagcccaccgtgacccccaccgtgaacagagagaacaagcccacctgctaccccaaggccgagatcagcagactgagcgccagccagatcagaaacctgaaccccgtgttcggcggcagcggccccgccctgaccggcctgagaaacctgggcaacacctgctacatgaacagcatcctgcagtgcctgtgcaacgccccccacctggccgactacttcaacagaaactgctaccaggacgacatcaacagaagcaacctgctgggccacaagggcgaggtggccgaggagttcggcatcatcatgaaggccctgtggaccggccagtacagatacatcagccccaaggacttcaagatcaccatcggcaagatcaacgaccagttcgccggctacagccagcaggacagccaggagctgctgctgttcctgatggacggcctgcacgaggacctgaacaaggccgacaacagaaagagatacaaggaggagaacaacgaccacctggacgacttcaaggccgccgagcacgcctggcagaagcacaagcagctgaacgagagcatcatcgtggccctgttccagggccagttcaagagcaccgtgcagtgcctgacctgccacaagaagagcagaaccttcgaggccttcatgtacctgagcctgcccctggccagcaccagcaagtgcaccctgcaggactgcctgagactgttcagcaaggaggagaagctgaccgacaacaacagattctactgcagccactgcagagccagaagagacagcctgaagaagatcgagatctggaagctgccccccgtgctgctggtgcacctgaagagattcagctacgacggcagatggaagcagaagctgcagaccagcgtggacttccccctggagaacctggacctgagccagtacgtgatcggccccaagaacaacctgaagaagtacaacctgttcagcgtgagcaaccactacggcggcctggacggcggccactacaccgcctactgcaagaacgccgccagacagagatggttcaagttcgacgaccacgaggtgagcgacatcagcgtgagcagcgtgaagagcagcgccgcctacatcctgttctacaccagcctgggccccagagtgaccgacgtggccacctag

SEQ ID NO: 46407 - DNA, 3357 bp, Artificial Sequence
  derived and/or modified sequence
atgccggccgtcgcgagtgtccccaaggagctctatttgagctcatcactcaaggacctgaataagaaaacagaggtaaaaccagaaaaaataagtaccaaatcatatgtgcattcagcgttaaagattttcaaaactgctgaagaatgccggctcgaccgcgacgaggaaagagcctacgtgctgtacatgaaatacgtcactgtgtacaatctgatcaaaaaacgacccgactttaaacaacagcaggattattttcattcaatcctgggccccggcaatattaagaaggcggttgaggaggccgaaagattgagtgagtctctgaagctgcgttacgaagaggcggaagtgagaaagaagctggaggagaaagatcgacaggaggaagcccaaagacttcagcagaaaaggcaggagacaggacgcgaagacggtggaacattggcgaagggaagtcttgagaacgtgttggatagtaaagacaaaacccagaagagcaatggggagaaaaatgagaaatgtgagacaaaagagaagggcgccatcaccgccaaagagctttatactatgatgaccgataagaacatttctctcataatcatggatgcccggaggatgcaggactatcaggactcatgcatcttacattctttaagcgtgcctgaagaggccatctcaccaggtgtcactgctagttggatcgaagcccatctgcccgacgactcaaaagacacctggaaaaagagggggaacgtggagtatgtcgtccttctcgattggttttcatccgctaaagatctgcagatcggcaccacactaagaagcctgaaggatgccttgtttaagtgggaatcaaaaacagtgctgcggaatgaacctctcgtgctcgagggcggctacgaaaattggctgttgtgttatccgcagtacaccactaacgcgaaggtgacccctccacctcgtcggcagaacgaagaggtgtcgatttcgctcgacttcacttaccctagtctggaggaatctattcccagtaagccggccgcacagactccccccgcgagtattgaggtggacgagaatattgagctgatctctggccagaacgagaggatggggccactgaatattagcactcctgtggaacctgtggccgcaagtaagtcggacgtttcccccataatacagcccgtgcccagtattaaaaacgtacctcagatcgaccggactaagaaacccgcagttaaactgccagaggagcatcgcatcaagagcgagtcaactaaccacgagcagcagtcccctcagtctggtaaagtgatcccagataggagtacgaagcccgtggtgttttcccccacactgatgctcacagatgaggaaaaggctcggattcatgcggagacagctcttctgatggagaaaaacaaacaggaaaaagaattgcgggagaggcagcaggaggaacagaaggagaagttgcgcaaagaagagcaggaacagaaagctaagaaaaaacaggaggccgaggagaatgagataacagaaaaacagcagaaagccaaggaagaaatggagaaaaaagaaagtgaacaggccaaaaaagaggacaaggaaacgtccgctaagcggggcaaggaaatcacgggggtcaagaggcagtctaaatccgagcatgaaacatcagatgccaagaagtccgttgaggacaggggcaagagatgtcctacaccagagattcagaagaagagcactggggatgtaccccacacaagtgtgacaggcgattcaggttccgggaagccattcaaaattaaaggccagcccgagtcaggcattctgcgaaccgggacctttcgggaggatacggatgatacagaaaggaacaaggcgcagagggagcctttaacacgcgctcggagcgaggagatgggacggattgtgcctggtttgcctagcggttgggccaagttcttggaccctattacaggtaccttcagatactaccattctcccaccaatacggtccacatgtatccaccagagatggccccatccagcgcaccaccgagcacgccacccacacacaaggctaagccacaaatcccggcagagagagacagagagcctagtaagctaaaaagaagctactccagtcccgatataacacaagcaatccaggaagaggaaaagcggaaacccacggtgacacccacagtcaaccgggaaaacaagcctacctgttatcccaaggccgagatctcgagactgagcgcttcccagattcgcaacctgaatcccgtctttggagggtccggtcctgccctcactggtctgcggaacctgggaaatacctgttatatgaattcaatcttgcaatgcttgtgtaatgctccccacctagcagattactttaacaggaactgctaccaagatgatattaacaggtcgaacttattgggacacaaaggagaagtggctgaggaattcggcattattatgaaggctctgtggacgggtcagtataggtacatctcccccaaggacttcaaaatcaccattggcaagattaatgaccagttcgctggatacagtcaacaggactctcaggaactcttgctcttcctgatggatggtttgcatgaagatttgaacaaagcagataaccggaagaggtacaaggaagaaaataacgaccatctcgatgactttaaagctgcagagcatgcctggcaaaagcacaaacaacttaacgagagtataatcgtagccctgtttcaggggcagttcaaatctactgtgcaatgcctgacttgccataagaaaagccgaacattcgaggcttttatgtacctctccctgccactcgcttcgaccagtaagtgtacactccaggattgtttgcggcttttctccaaggaagagaagttgactgataataatcggttttattgttcgcattgccgggcccgtcgcgactcactaaaaaagatcgaaatttggaaactcccccctgtactgcttgtccacctgaaaagattctcttacgacggcaggtggaagcagaagttacagaccagcgtggacttccctcttgagaaccttgatctgtcacagtatgtgatcggccccaaaaacaacctgaagaagtataacctgttcagcgtctctaaccattacgggggtttggacgggggccattatactgcatactgcaaaaatgccgcccggcagagatggttcaaatttgatgaccatgaagtgagcgatattagtgtgtcctctgtgaaatccagcgcagcatatatcctcttctacacctcactggggcctagagtcacggatgtcgccacctag

SEQ ID NO: 46408 - DNA, 3357 bp, Artificial Sequence
  derived and/or modified sequence
atgccagccgtggcttctgtgcctaaagagctgtatctgtcctcatccctgaaggacttgaacaagaagactgaggtaaaaccagagaaaattagcacaaaaagctacgtacactcggccctgaaaatctttaagactgctgaggagtgcagactagacagggacgaagagcgggcatatgtgttgtacatgaagtatgtgacggtgtacaacctaattaaaaagaggccagacttcaaacaacagcaggattactttcactccatcctaggcccggggaacataaaaaaagctgtagaggaggcagagagactaagcgaaagcctgaagctgcgctacgaggaagcggaagtgcggaagaagctagaagaaaaggatagacaagaagaagctcagagattgcagcagaaacgacaggagacaggacgggaagacggtgggacactggctaagggtagtctggagaacgtgttagatagcaaggataagacacagaagtcaaacggagagaaaaacgaaaaatgcgagacgaaggagaagggtgcaatcactgctaaggaactgtatacaatgatgacagacaagaatattagtctgataataatggacgcacgcagaatgcaggactatcaggattcctgcatcctacactcattgtccgtgcccgaagaagctattagtccgggcgtcacagcaagctggatagaggcccatctgccagacgacagtaaagacacttggaaaaagaggggcaatgtcgaatacgtagtgctcctcgactggttcagctctgctaaagaccttcagataggcacaactctgcgaagcctgaaggacgctcttttcaagtgggaatctaagacagtgctgcggaatgagccactcgtgcttgagggcggatatgagaactggctcttgtgttatcctcagtacacaacgaatgcaaaggtgaccccccctcctagacggcagaatgaggaggtgtctatttccctggacttcacttaccccagtctggaagagagtatcccgtctaaacccgccgctcagacgcctccggcttccatcgaagtcgatgagaatatcgagctcatctcgggacaaaacgaaaggatgggtcctttaaatataagtacccctgtggaacctgtggctgcatcaaaaagcgatgtttctcccataattcaacccgtaccctcaatcaagaatgtccctcagatcgatagaacgaaaaaaccagcggtgaagttgccggaggaacaccgcatcaagtcagaaagcactaatcacgaacaacaatcgccacagtcagggaaggtcatccccgaccgatccacaaagccagtagtattctcacccactctcatgctaaccgatgaagaaaaggcaaggattcacgccgaaacagctttgcttatggagaaaaacaaacaagagaaagaattacgggagaggcagcaggaggaacagaaggagaaactgaggaaagaggaacaggaacagaaggcaaagaagaagcaggaagccgaggaaaacgagattactgaaaaacagcagaaggccaaggaggagatggagaaaaaggagagcgagcaggccaagaaggaggacaaggagacatctgctaagcggggaaaggagattacaggtgtcaagcgacagagtaagtccgaacatgaaacaagcgacgcaaagaaaagcgtcgaggatagagggaagcggtgcccaactccagaaatccagaaaaaaagcacaggagatgtgccacacacctcagttactggggacagtggaagtggaaagcccttcaaaatcaagggacagcccgaaagtggcatacttcggacaggcacctttcgggaggataccgatgatacggaacgaaataaggcacagcgggaaccactcactcgcgctcgatcggaggaaatgggccggatagtacctgggttaccctctggatgggctaagtttctggatcccataaccgggactttcaggtattaccattcgcccactaacaccgttcacatgtacccacctgagatggcccccagttccgccccaccgagcacgccccccacacataaggccaagccccagattcctgccgagcgcgatcgggaaccatcaaagctgaaaaggtcctactcgtctcctgacatcactcaggctatacaggaggaagaaaagagaaagcccacagtcactcctacagtgaaccgcgagaataagccaacctgctatcccaaggctgaaatatcaagattaagcgcatctcagattcgaaacctaaaccccgtgtttggaggatccggacccgctcttaccggtctgcgcaacttgggtaacacctgctacatgaactcgatacttcagtgcctctgcaatgcaccacatctggccgactatttcaaccgcaactgttatcaagatgacattaatcggtccaatctgctgggccacaaaggcgaggtagctgaagagttcggcattatcatgaaagcactgtggactggccaatacaggtacatatctcctaaggacttcaagatcacaattggcaaaattaacgaccagttcgctggctactctcaacaagacagccaggagttgttgctgttcctgatggacggactgcatgaggacttgaataaggccgataatcgcaaacgatacaaagaagaaaacaatgatcatcttgatgactttaaagccgcagaacatgcctggcagaaacacaaacagctcaacgaaagtatcattgtggccctatttcagggccagttcaagagtaccgtgcagtgtctcacctgtcacaagaagtccaggacgtttgaagccttcatgtatctgtcattaccgcttgctagcacgtccaaatgcaccctgcaggactgtctcaggctatttagcaaagaggagaaactcaccgacaacaatcgcttttactgctcccactgtcgggcccgccgagatagtttgaagaagattgagatttggaaactcccacccgttcttctggtgcacctcaagcgtttctcatacgatggaaggtggaaacagaagctccagacctccgtggacttcccactggaaaatcttgacctgtctcagtatgtgattggacccaagaacaacctgaagaagtacaatctgtttagtgtctcgaaccactatgggggtttggatgggggacactacaccgcgtattgtaaaaatgctgcccggcagcgatggtttaaatttgacgaccatgaggtctcagacatttcagtgagtagtgtgaagtcatccgccgcctacatccttttttacacttccctaggaccacgggtcacagacgtagctacttag

SEQ ID NO: 46409 - DNA, 3357 bp, Artificial Sequence
  derived and/or modified sequence
atgcccgccgtcgcatccgtgcccaaagagctttatctgagcagcagcctgaaagacttaaacaaaaagacggaagtaaagcccgagaagatttcaacaaagagttatgtccacagcgccctgaaaatcttcaaaaccgccgaagaatgtagactggaccgagacgaggaaagggcctacgtgctctatatgaaatacgttacggtatacaatctcatcaagaagaggcccgatttcaaacaacagcaggattacttccatagtatactcggtcccggcaacatcaaaaaggccgtcgaggaagccgagcgcttatctgaatccctaaaactaaggtatgaggaagctgaggtgcggaagaagctcgaggagaaagatcgccaagaagaagcacagcgcctgcagcaaaaacgccaggaaactggccgcgaggatgggggtacacttgctaagggtagcttggaaaatgtgctcgatagcaaggacaaaacccagaaaagtaacggggagaaaaacgagaagtgtgagacaaaggagaagggagccataactgccaaggaactgtacactatgatgactgataaaaatatttcacttatcatcatggatgctcgccggatgcaggactatcaggattcatgcatcctccactctctttccgtgcccgaggaggccatttctcccggcgttacagcttcttggattgaggctcacctccctgatgacagtaaggatacttggaagaagcggggcaacgtagagtatgtggtactgctggactggttctcgagtgcgaaggatcttcagatcgggacaacgttaaggtctctgaaagacgctctctttaagtgggagtcaaaaaccgtcttacgtaatgagcccttggttttagagggagggtatgagaattggctgctatgttacccgcagtatacaaccaatgcaaaggttaccccaccccccagacgccagaatgaggaagtctctatctcacttgactttacatacccatctttggaagaatctatcccatctaagcccgcagcgcagacacctcctgcttccattgaagtcgatgagaacatcgagctaatttccggacagaatgaacgcatgggacccctgaatataagtacccccgtggagccagtggcagcttccaagtccgacgtgagccctatcatccagccagtgccaagtattaagaatgttccacaaattgaccgcaccaaaaagccagcagtcaagctgcccgaggagcatcgaatcaagagtgagtccacgaaccatgaacagcaatccccccagtccggcaaagtgattccagaccgatcgacaaaacctgtcgtcttcagcccgaccctgatgctgactgatgaagagaaagcaaggatccatgccgagacagctcttctcatggagaaaaacaagcaggagaaggagttgagagaaaggcagcaggaggaacagaaggaaaagctgcgcaaggaagagcaggagcaaaaggcaaagaaaaaacaagaggccgaggagaacgagataactgagaaacagcagaaagccaaggaggagatggaaaaaaaagagagtgagcaggcaaaaaaggaggacaaggaaacctctgcaaagcggggaaaggaaatcactggggttaagcgtcaatccaaaagcgagcatgaaactagcgatgccaagaaatcagtggaagaccggggcaaaagatgtcctactcctgagatacagaagaaatccactggagacgttcctcacacatccgtgacaggggacagtgggagtggtaagcctttcaaaatcaagggacaacccgagagtggtattttacggacaggaacatttagagaagatactgatgacaccgagcgaaataaagcccagagggaaccactcactcgcgcaaggtccgaagaaatgggtcgcatagtgcctgggctccctagcggctgggccaaattcttggatcctatcacagggaccttccgatactaccactcacccacgaacaccgtgcatatgtatccacccgagatggccccatcatccgcacccccctctacgccacctacccacaaggccaaacctcaaatacctgcagagagagaccgggaaccctccaagttaaaaaggtcctactctagtcctgacattacacaggctattcaggaggaggaaaagagaaagccaaccgtcacacctaccgttaaccgggagaacaagcctacttgttacccaaaggccgaaatttctagactgagtgccagtcagatccggaatctgaacccagttttcggcggctcagggccagccctaactggcttaaggaatctcggaaacacttgttacatgaactctatcctccagtgcctctgcaatgcaccacacctggcggattatttcaataggaactgttaccaggatgacatcaacagatcaaatctgttgggtcacaagggagaggtggccgaggagtttgggatcatcatgaaggcactgtggaccggacagtacaggtatatcagtcccaaagatttcaagatcacgattggcaagattaatgatcagttcgcgggttactcccagcaagactcacaagaactcctacttttcctcatggacggcctccatgaagacctcaataaagcagataaccgaaagcgttataaagaagaaaataacgatcacctcgatgactttaaggcggccgagcacgcgtggcaaaagcacaagcagctgaacgagtccattatcgtagccttgttccagggacaattcaagtccacggtgcagtgtctcacgtgccacaagaagtccaggactttcgaggcttttatgtacctatctttgcctctagctagcacctcaaagtgtacactacaagactgcttacgcctgtttagcaaagaggagaagctaacagataacaacagattttattgctctcattgtcgggctcggcgtgattccctcaaaaagattgagatttggaaactgccccctgtgctgttggttcacctgaagagattctcatatgatggccgttggaaacaaaagctacagaccagtgtcgatttccccctggagaaccttgacttgagccaatacgtcataggtcctaagaacaacctgaagaagtacaacttattctcagtgtcaaatcattacggaggacttgacggggggcattacacagcctactgtaaaaacgcggcccggcagcggtggttcaagtttgacgaccatgaggtgtcagacatcagcgtaagtagcgtgaaaagctcagctgcctacatcctgttctacacctcactgggcccacgagtaacagacgttgctacctag

SEQ ID NO: 46410 - DNA, 3357 bp, Artificial Sequence
  derived and/or modified sequence
atgcctgctgtggcctctgtgcccaaggagctgtacctgagcagcagcctgaaggacctgaacaagaagacagaggtgaagccagagaagatcagcaccaagagctatgtgcacagcgccctgaagatcttcaagacagcagaagaatgtcggctggacagagatgaggagcgggcctacgtgctgtacatgaagtatgtgacagtgtacaacctgatcaagaagaggccagacttcaagcagcagcaggactacttccacagcatcctgggccctggcaacatcaagaaggctgtggaggaggccgagcggctgtctgagagcctgaagctgcgctatgaggaggccgaggtgaggaagaagctggaggagaaggaccggcaggaggaggcccagaggctgcagcagaagaggcaggagaccggccgggaggatggcggcaccctggccaagggcagcctggagaatgtgctggacagcaaggacaagacccagaagagcaatggagagaagaatgagaagtgtgagaccaaggagaagggggccatcacagccaaggagctgtacaccatgatgacagacaagaacatcagcctcatcatcatggatgcccggaggatgcaggactaccaggacagctgcatcctgcacagcctgtctgtgcctgaggaggccatcagccctggggtgacagcctcctggattgaggcccacctgcctgatgacagcaaggacacctggaagaagagaggaaatgtggagtatgtggtgctgctggactggttcagcagcgccaaggacctgcagatcggcaccaccctgcggagcctgaaggatgccctcttcaagtgggagagcaagacagtgctgagaaatgagcccctggtgctggagggcggctatgagaactggctgctgtgctacccccagtacaccaccaatgccaaggtgaccccaccaccccggcggcagaatgaggaggtgtccatcagcctggacttcacctaccccagcctggaggagagcatccccagcaagccagctgcccagaccccaccagccagcattgaggtggatgagaacatcgagctgatcagcggccagaatgaaagaatgggccccctgaacatcagcacccctgtggagcctgtggccgccagcaagagtgatgtgagccccatcatccagcctgtgcccagcatcaagaatgtgccccagattgacaggaccaagaagccagctgtgaagctgcctgaggagcaccgcatcaagtctgagagcaccaaccacgagcagcagagcccccagagcggcaaggtgatcccagacaggagcaccaagcctgtggtgttcagccccaccctgatgctgacagatgaggagaaggcccgcatccatgctgagacagccctgctgatggagaagaacaagcaggagaaggagctgcgggagcggcagcaggaggagcagaaggagaagctgaggaaggaggagcaggagcagaaggccaagaagaagcaggaggccgaggagaatgagatcacagagaagcagcagaaggccaaggaggagatggagaagaaggagagcgagcaggccaagaaggaggacaaggagaccagcgccaagaggggcaaggagatcactggagtgaagaggcagagcaagtcagaacatgagaccagtgatgccaagaagtctgtggaggaccggggcaagcgctgccccaccccagagatccagaagaagagcactggagatgtgccccacacctctgtgactggagacagcggcagcggcaagcccttcaagatcaagggccagcctgagagcggcatcctgaggacaggcaccttccgggaggacacagatgacacagagaggaacaaggcccagcgggagcccctgacccgggcccggtctgaggagatgggcagaattgtgcccggcctgcccagcggctgggccaagttcctggaccccatcaccggcaccttccgctactaccacagccccaccaacacagtgcacatgtacccacctgagatggcccccagcagcgccccacccagcaccccacccacccacaaggccaagccccagatcccagctgagcgggaccgggagcccagcaagctgaagaggagctacagcagcccagacatcacccaggccatccaggaggaggagaagaggaagcccaccgtgacccccaccgtgaaccgggagaacaagcccacctgctaccccaaggccgagatcagccggctgagcgccagccagatccggaacctgaaccctgtgtttggaggcagcggccctgccctgaccggcctgaggaacctgggcaacacctgctacatgaacagcatcctgcagtgcctgtgcaatgccccccacctggccgactacttcaacagaaactgctaccaggatgacatcaacagaagcaacctgctgggccacaagggggaggtggccgaggagtttggcatcatcatgaaggccctgtggacaggccagtaccgctacatcagccccaaggacttcaagatcaccatcggcaagatcaatgaccagtttgctggctacagccagcaggacagccaggagctgctgctcttcctgatggatggcctgcacgaggacctgaacaaggctgacaacaggaagcgctacaaggaggagaacaatgaccacctggatgacttcaaggctgctgagcacgcctggcagaagcacaagcagctgaatgaaagcatcatcgtggccctcttccagggccagttcaagagcacagtgcagtgcctgacctgccacaagaagagcaggacctttgaggccttcatgtacctgagcctgcccctggccagcaccagcaagtgcaccctgcaggactgcctgcggctcttcagcaaggaggagaagctgacagacaacaaccgcttctactgcagccactgccgggcccggcgggacagcctgaagaagattgagatctggaagctgccccctgtgctgctggtgcacctgaagcgcttctcctatgatggccgctggaagcagaagctgcagacctctgtggacttccccctggagaacctggacctgagccagtatgtgattggccccaagaacaacctgaagaagtacaacctcttctctgtgagcaaccactacggcggcctggatggcggccactacacagcctactgcaagaatgctgcccggcagcgctggttcaagtttgatgaccacgaggtgtctgacatctctgtgtcctctgtgaagagcagcgctgcctacatcctcttctacaccagcctgggcccccgggtgacagatgtggccacctag

SEQ ID NO: 46411 - DNA, 3357 bp, Artificial Sequence
  derived and/or modified sequence
atgcccgccgtggccagcgtgcccaaggagctgtacctgagcagctcgctcaaagaccttaataagaaaactgaagtaaagcccgaaaagattagcactaagagctacgtccacagcgcactcaaaatttttaaaacagcggaagaatgccggttagacagagacgaggaaagagcttatgttctttatatgaagtatgtaaccgtgtacaatctgatcaaaaagagacctgacttcaagcaacagcaggactacttccatagcatattaggacccggcaacatcaagaaagcggtcgaagaagccgagaggctctctgaatcactgaaactccgttatgaggaagcagaagtgagaaagaaactggaagagaaagacaggcaggaggaagcccagcgtctccagcaaaaacggcaagagacagggcgcgaggatggtgggacacttgccaagggatcactcgaaaacgtactggatagcaaagacaaaacgcagaaatccaacggcgagaagaacgaaaagtgtgaaactaaggagaagggagccatcacagcgaaagagctgtacaccatgatgacagacaaaaatatcagcttgatcataatggacgccaggcggatgcaggattatcaggacagctgcattctgcactcattgtcagtgcccgaggaggcaatttcccctggagtgaccgcgagctggatcgaggcacatcttccagacgattctaaggatacctggaaaaagagaggcaatgtagaatatgtagtgctgctcgactggttttctagcgctaaggatcttcaaattggcactaccctgagatcactgaaggacgcccttttcaagtgggaatcaaagacggtgctgagaaacgagcctctggtgctggagggcggatacgaaaattggttgctttgttatcctcagtataccacaaacgctaaagttaccccacccccacgccgacagaacgaggaggtgtccatttcgcttgattttacatatcctagcctggaagaaagcatcccgagcaaaccagctgcgcagacgccacccgcatctattgaagtcgatgagaacatcgaactgattagtgggcagaacgagcgtatgggcccactaaacatctcaaccccagtggaacctgtagcagcaagtaagagtgacgtgtccccgattatccaacccgtgccctcaatcaagaatgtcccacagatcgaccggaccaagaaacccgctgtgaaattgccagaagagcatcgcattaaaagtgaaagtactaaccacgaacaacagtccccccaatccggcaaagtgatccctgatagaagcaccaagccagtggtttttagtcctacccttatgcttaccgatgaggaaaaggcaaggatccatgccgagaccgctctgctgatggagaagaacaaacaggaaaaggagcttagggaacgtcagcaggaggagcagaaggaaaaactaagaaaagaggagcaggagcagaaggccaagaagaagcaggaggccgaggaaaatgagatcaccgaaaagcaacagaaagcaaaggaagaaatggagaagaaggagagcgagcaggccaagaaggaagataaggagacctctgcaaagcgcggcaaggagattaccggtgtgaagagacaatccaagagcgagcatgaaactagcgatgccaaaaagagcgtcgaggatcgcggcaagcggtgccccacgccagaaattcagaaaaagtcaaccggtgatgtccctcatactagcgtgacaggcgactccggttctggaaaaccattcaaaatcaaagggcagcccgagagcggaattcttaggactgggaccttccgggaggacactgacgacactgagcggaacaaggcacagcgagaacccctgacacgagcccggtcggaggaaatgggaaggattgtgcctgggctgccgtccggatgggctaaattcctggatcccatcaccggcacttttagatactaccacagcccaactaatacagtgcacatgtatccacccgagatggcgccctcctctgctccaccctccacccccccgacccataaagctaaaccgcagattcccgccgaacgggaccgggagcctagcaagctgaaacgctcctactcaagtcctgatatcacccaggctatccaagaggaagaaaagagaaaacccactgtgacccccaccgtaaaccgggagaataaacccacctgttacccaaaggccgaaataagcagactcagcgcaagccagataagaaatttaaatccagtgtttggcggttccgggcctgccctcactgggctccgcaatctcggcaacacttgttacatgaactccattctccagtgcttgtgtaacgccccccatctcgccgactatttcaatcgcaattgttatcaggacgacatcaatagaagcaatttgctcggacacaaaggcgaagtggctgaagagtttggaataattatgaaggctctatggacagggcaatatagatatatctcccctaaggacttcaaaatcactattggaaagatcaatgaccagttcgcaggctatagccaacaggacagccaggaactgcttctgttcttgatggacgggctacacgaggacctgaataaggctgataataggaaacggtataaagaagagaataatgaccaccttgacgatttcaaggccgccgagcacgcttggcaaaaacacaagcagctgaacgaaagcatcatcgtcgcgctttttcagggacagttcaagagtacagtccagtgtctcacttgccataagaaatcgaggacatttgaagccttcatgtacctgtctctccccttggcgtctacctcaaagtgtaccctgcaggactgcctgaggctcttctcaaaagaggagaagctgacggacaacaatagattctactgtagtcattgtcgtgctaggcgagacagtctgaaaaagatcgagatttggaaactgccaccagtactgctggttcacttaaagcgcttcagctacgacggtagatggaagcagaaactgcagacaagcgtggacttcccgctcgagaaccttgatctctcccagtatgttataggcccaaaaaacaatctcaagaagtacaacctgttctccgtgagcaaccactacggaggtctcgacggtgggcactatacagcatactgcaagaatgccgcacgacagagatggttcaaatttgacgaccatgaggtgagcgacatctcggtttccagcgtgaagagctccgcggcatacattctcttctacacaagcttggggccccgggttacagatgtggctacctag

SEQ ID NO: 46412 - DNA, 3357 bp, Artificial Sequence
  derived and/or modified sequence
atgcccgccgtggccagcgtgcccaaggagctgtacctgagcagctccctgaaggacctgaataagaaaactgaagtcaaacctgagaagatcagtactaaatcttatgttcatagcgctcttaaaattttcaagactgccgaggaatgtaggttagaccgcgacgaggaacgggcctacgttctttacatgaagtacgttactgtatataacttgattaaaaaacgccctgacttcaaacagcagcaggattacttccattcaattcttggtccgggcaacattaaaaaagccgtggaggaggctgagagattgagtgagtccctcaagctcagatatgaggaggcagaggttcgcaagaagctggaagaaaaggacagacaggaagaagcacagcggctgcagcaaaagcgccaggagacaggtagggaagacggggggactttggccaaagggtctctggagaacgtcctggatagcaaagataaaacgcaaaaatccaatggtgagaaaaatgaaaaatgcgaaacaaaagagaagggagccattaccgccaaagaactttatacaatgatgactgataaaaatatttccttgatcataatggacgctcgccgcatgcaggactaccaggatagttgtattctccactctctcagcgtgccagaggaagctatctctcccggtgttactgccagttggattgaggcacatctacctgatgatagcaaggatacgtggaagaaaagagggaatgtggagtatgttgtccttctcgactggtttagctcagcaaaggatctccaaattggcactacgctgcggagtctgaaggatgccttatttaaatgggagtcaaaaaccgtactgagaaacgagcccttggtgttagagggtggatatgagaactggctcctgtgctacccccagtatacaacaaacgctaaggtgacccctccaccgcggcgccagaacgaagaggtctccatctccctggactttacctatcctagcctggaggagagcattcccagcaaacccgcagcacagacgccacctgcgagtattgaggttgacgagaatatcgagttgatttctggacagaatgagagaatgggacccctgaatatatctacccccgtcgagccagttgccgcatccaagtcagacgtgtcccctatcattcagccggtgccctccatcaaaaacgtcccacagatcgatcgcacaaagaaacctgctgtgaaactgcctgaggagcataggattaagtcagagagcactaaccacgagcagcagtcccctcagagtggaaaagtcatccctgacaggtccactaaacctgtcgtcttcagcccgactttgatgctgacagacgaggaaaaagctagaatccacgctgaaaccgcactgttaatggagaagaataaacaggaaaaagagctgcgcgaacgtcagcaggaggaacaaaaggaaaaactgcgcaaggaagagcaagaacagaaggctaaaaaaaaacaggaagccgaagaaaacgagataactgaaaagcagcaaaaggctaaggaagagatggagaagaaggagtccgagcaggccaagaaggaggacaaggaaacttctgcgaaacgtggcaaagagattaccggagtcaagagacagtccaagagtgagcacgagaccagcgatgcgaaaaaatccgtcgaagaccggggaaagcggtgtcccacacctgaaattcaaaaaaaaagtacaggggatgtgccacacaccagcgtgaccggggatagcggcagcggcaagcctttcaagattaaaggacagcctgagtcagggatccttagaactgggacatttagagaggacacagatgataccgagcggaacaaagctcaaagggagcctctgacaagagcccgctcagaggaaatgggacgaattgtccctgggttgccctcaggttgggccaagttccttgatcctataaccggaaccttcaggtactaccattctcctaccaacactgtccatatgtatcctcctgagatggcccctagttcagcgcccccttccacaccccccactcacaaagcgaaacctcagatccccgccgagcgggaccgggagccgtcgaaactgaagagaagctattcttcccccgacatcacccaggctatccaggaggaggagaagaggaaaccaaccgtgacccccaccgtcaacagagagaacaagcctacgtgctaccctaaggcagagatcagtaggctaagtgcgagccagatccgtaacctgaacccagtgttcggtggaagcggaccagcgctgacggggcttcgaaatctgggaaacacgtgttacatgaatagcatcctacagtgcctgtgtaacgcaccgcatctggctgactattttaatcgcaattgttaccaagacgacatcaacagatccaacttgttgggacacaaaggcgaagtggcagaagaatttgggatcataatgaaagccctctggaccggccaataccgttacatctctcccaaggattttaaaatcaccatagggaagattaacgaccagtttgccggctatagtcagcaggattctcaggaattgttattgtttctgatggacggcctacacgaggatctgaataaggccgataataggaaaaggtacaaagaggagaacaatgaccatctggacgatttcaaagcagctgagcatgcatggcagaaacacaagcaactcaatgaaagcatcattgtggcattgttccagggacaattcaagagcacagtccaatgcctgacttgtcacaagaaatcaagaaccttcgaggcattcatgtacctgtccctgccgttggcgtctacttcgaaatgcaccctgcaagactgtctgcgtttgttttccaaggaagagaaacttaccgacaacaaccgcttctattgctcccactgcagggccagaagggattcgctaaaaaagattgagatttggaaactgccgcccgtccttctggtacacctaaaacgttttagctatgacggaaggtggaaacagaaactgcaaacctccgtggacttcccgctggagaatctggacctgtcccagtatgtgattggcccaaagaacaatctgaagaagtataacctgttttctgtcagcaatcactatggcggactcgatggtggccactatacagcatactgcaagaatgctgcgcgtcagcgatggttcaagtttgacgaccacgaagtctctgatatttccgtgagttccgttaaatcatctgcagcgtatattttgttttatacatcactggggccacgcgtcacagacgtcgctacttag

SEQ ID NO: 46413 - DNA, 3357 bp, Artificial Sequence
  derived and/or modified sequence
atgcccgccgtggccagcgtgcccaaggagctgtacctgagcagctccctgaaagatctaaataagaagacggaggtcaaacctgaaaagatctccaccaaatcatatgtccattcagctttaaagatcttcaagacagcagaggaatgtagattggacagggacgaggagcgcgcatatgtgttgtacatgaaatatgtgaccgtgtataacttaatcaagaagagacccgattttaagcagcagcaagactactttcactcaattctcggcccagggaacattaaaaaggcagtggaggaagccgaacggctgagtgaatctctgaaattgcgatacgaggaggcggaagttaggaagaaattggaagagaaagatagacaggaagaggcccagaggctgcaacagaaaaggcaggagaccggtcgagaagatggtggcaccctggctaaaggctcgctcgaaaacgtgttggactctaaagacaagacacagaaatccaacggagagaagaacgagaaatgcgaaactaaggaaaagggcgcgattacagcgaaggagctgtataccatgatgactgataaaaatatcagcctgatcattatggacgcacggcgaatgcaagactaccaggactcatgcatcctgcattccctatccgtcccggaggaagcaattagccccggggtgacagcatcatggatagaggcacatcttccggacgattctaaagacacctggaaaaagcggggtaacgtggaatatgtggtattactcgactggttctcatcggcaaaggatctgcagattggtacaacgttgaggagtctcaaggatgccctctttaaatgggaaagcaaaaccgtactcagaaatgaaccactggtccttgaaggtggttatgagaactggctcttatgctatccacagtacaccacgaacgcaaaagttacccctccccctcggcgccagaacgaggaggtatccatttcattagatttcacttatccctcactcgaggaatccatcccgtctaagcctgcagcacaaacaccacctgccagtatagaggtggacgaaaacatcgagttgatatccgggcagaatgagagaatgggcccacttaacatctctactccagtggagcctgtggcggcatccaagtctgatgtgagtcccatcatacagcccgtccctagtatcaaaaatgtgcctcaaatcgatcgtaccaagaagccggccgtcaaactgcctgaggagcatagaatcaagagcgagagtacgaaccacgagcagcagagcccccagtctggaaaggtgatccccgatagatccacaaaacccgtggtattcagtccaacactgatgcttacagatgaggagaaggccaggatacacgctgagacggcgcttttgatggaaaagaacaaacaagaaaaagagctgagggagaggcagcaggaggagcagaaggagaaactgcggaaggaagagcaggaacaaaaagccaagaaaaagcaggaggccgaagagaacgaaatcacagagaaacaacaaaaagcgaaagaggagatggagaaaaaagaatcagagcaggctaagaaggaggataaagagactagcgcaaagagaggcaaggaaattacaggcgtgaagagacagagcaaatccgagcatgaaacctctgacgcgaaaaagtcggtcgaagatagggggaagaggtgcccaaccccagaaattcagaagaaaagcactggcgacgtccctcatactagtgtcacaggagactcaggctcaggaaagcccttcaaaatcaagggccagcccgaatccggcatcctgaggacgggcactttccgcgaggatactgatgacacagaacggaacaaagctcaaagggaaccgttgactagggctagaagcgaagaaatgggaaggattgtgccggggctcccttcaggctgggctaaattcctggatcctatcacgggaacattccggtattatcattcccctaccaatactgtgcacatgtatccacccgaaatggcccctagtagtgctcccccgagcaccccacctactcataaggctaagccccagatccctgccgagcgggaccgcgagccttccaaactgaaacgcagttactcaagcccggacattacccaggcaattcaagaagaggaaaaacgcaaacctaccgtcacccccactgttaatcgagagaataaaccaacctgttatccaaaggcggaaatcagcagactctccgcatctcaaatcagaaatttaaatcccgtttttggaggctcgggccctgctttaactgggttacggaacctggggaacacttgctatatgaattctatcctgcaatgcctgtgcaacgccccccacttggcagactattttaatcgaaattgttatcaggatgacatcaaccgctctaacctgctgggccacaagggtgaggtagccgaggagtttggtattattatgaaagccctctggaccgggcagtaccgatacatctcgcccaaggattttaaaatcaccattggcaaaatcaatgaccagttcgctggttactcccagcaggattctcaggagctcttgctcttcctaatggatggcctccacgaagacctgaacaaggccgacaaccgcaaaagatacaaggaagagaataacgatcatctggacgacttcaaggccgcagaacacgcttggcagaaacacaagcagctgaatgagtccataattgtggctctgtttcagggccagttcaagagcacagtacagtgcctgacgtgtcacaaaaaatcccgcacgttcgaggccttcatgtatctgtcccttccgctcgcttccacctcaaagtgtaccttgcaggattgcctgagactgttctccaaggaagagaagcttactgacaacaatcggttctattgtagccactgtagggccagacgcgattcattaaaaaagatcgaaatttggaaactgccacccgttctgctggtccatctgaagcggttcagttacgatggacggtggaagcaaaagctccagactagcgtcgacttccccctggaaaacctggatctgagtcagtatgtgatcgggcctaagaacaatttgaaaaaatataacctcttctcagtttccaatcattacgggggactcgacggcgggcattacaccgcttattgtaaaaacgctgcacgtcagagatggtttaaatttgacgaccacgaggtgtccgatatttcggtgtccagcgtgaagtcgtctgccgcctatattctgttttatacttctttgggaccacgggttaccgacgttgcaacctag

SEQ ID NO: 46414 - DNA, 3357 bp, Artificial Sequence
  derived and/or modified sequence
atgcccgcagttgcgtccgtacctaaagagctctatttgtcttcaagcctgaaggatctgaataagaaaaccgaggtgaaaccagagaagatttctactaaaagctacgtgcactccgctctgaagatcttcaagacagctgaggaatgccgtctggaccgggacgaggaacgcgcttatgttctctacatgaaatacgtgacagtttacaacctgatcaaaaagagacctgacttcaagcagcagcaggactatttccatagtattttaggccctggtaacatcaaaaaagctgtagaagaggccgaacgcctgagtgaatcactcaagctcagatacgaggaggccgaggtgcggaagaagctggaggaaaaagaccggcaggaagaagcacagaggttgcagcagaaaagacaagagacaggcagggaggatggcggaactcttgccaaaggatctttggagaacgtactggatagtaaagacaaaacacagaaatcaaacggcgaaaaaaatgagaaatgtgaaacaaaggaaaagggagccattacagccaaggagctatacacaatgatgactgataagaacatcagcctcataattatggacgccaggcggatgcaggactatcaagactcctgtatattgcactcactttctgtgcccgaggaggccatatcccctggcgtgaccgcatcatggatcgaagcccaccttccagacgattcgaaagacacgtggaaaaagcggggtaatgtggaatacgttgtgctccttgattggttctcatcagcaaaggatctgcagatcggaaccacactcaggtccctaaaagacgccttgtttaagtgggagagcaaaacggtactgcgcaatgagccattagtattagagggtggttatgaaaattggctgctgtgctatccacagtatactaccaatgccaaagttactccacctccaagacgccagaatgaagaggttagcatcagtctggacttcacttatccaagtttagaagaaagcatcccaagcaagcctgccgctcagacccctccggcttctattgaggtcgacgagaacattgagctgatctcaggccagaacgaacggatgggcccacttaacattagcacccccgtggagccagtcgccgctagcaagtctgacgtgtccccaatcatacagcccgtgcccagcatcaagaacgtcccgcagatcgataggacaaagaagcctgccgtgaagctccccgaggagcaccggatcaaatccgagagtaccaatcatgaacaacagtccccacagagcgggaaggttattcctgatcggtccaccaagcctgtcgtgttctccccaacactcatgctgacggacgaggaaaaggctcggattcatgctgagacggccctgctcatggaaaaaaataaacaagagaaggaactcagagaaagacagcaggaagaacagaaggagaaactgagaaaagaggagcaggagcaaaaggccaaaaagaaacaggaggccgaagagaatgaaattactgaaaagcagcagaaagcaaaggaggagatggaaaaaaaagagtccgaacaggccaagaaagaggacaaagaaacaagcgcaaagaggggcaaggagataacgggagtcaaaaggcagagtaaatcagagcatgagacaagcgatgccaagaagtcggtagaggaccgcggtaagcgctgcccaacccctgaaatccagaagaagagcacaggcgacgtgcctcatacttctgttactggggactccggctccggaaaaccgtttaaaatcaaagggcagccagaaagtggtattttgaggactgggaccttccgggaggataccgatgacaccgagaggaataaagcacagcgggagcctctcactcgtgcacggagcgaagaaatggggagaattgtccctggtctccctagtggatgggctaagttcttagatccgattaccgggactttccgctactatcatagtccaacaaatactgtgcatatgtacccacccgaaatggcaccaagttctgccccaccatctacccccccaacccataaggctaagccccagatacccgctgagagagacagagaaccaagtaagctcaagagatcgtattcctctcctgacatcactcaggcaattcaggaggaggagaagcgcaaacctactgtgacccccacggttaaccgagaaaacaaacccacctgctatcctaaagctgaaatctcccgcctatccgcctcccaaattagaaatctgaaccctgtgttcggtggatcggggccagccctcaccggcttgcgaaacctggggaatacctgttacatgaattcgattctgcagtgtctctgtaatgcgcctcacctagcagactactttaataggaattgttatcaggacgacatcaacaggtcaaatttgctggggcataagggtgaggtcgccgaggaatttggtattatcatgaaggctctctggacaggtcagtatcgctatatatccccaaaagatttcaaaatcacgataggaaaaataaatgaccagtttgccggatattctcaacaagactcccaggaactccttctgttcctgatggacgggctacatgaggatctaaataaggccgacaaccgaaaacgctacaaggaggagaacaacgaccatctggacgacttcaaggccgctgaacatgcttggcaaaaacataagcagctcaacgagagcatcatcgtggcactgttccagggtcaattcaaaagtaccgtccagtgcctcacctgtcataagaaatccagaaccttcgaggcttttatgtatttgagtctgcccctggctagcacctccaagtgtactttacaagactgcctgaggctcttttcgaaggaagagaaactgactgacaacaatcggttctattgttcccactgtcgtgccagacgagattctttgaagaagattgaaatatggaaactgccgcctgtcctcctagtacatctcaagagattctcctacgatggacggtggaagcagaagctgcagactagcgtcgatttcccactagagaacctcgacctgagccaatacgtcatcgggcctaaaaataatctcaagaaatacaacctgttttcagtgagcaaccattacggaggattagacggcggacattacaccgcctattgcaaaaacgctgcaagacagcgatggtttaagttcgacgaccacgaggtttccgatatttccgtgagctcggtgaaatcctcagctgcctacatcctgttttacacatcattggggccacgcgtgactgacgtcgccacatag

SEQ ID NO: 46415 - DNA, 3357 bp, Artificial Sequence
  derived and/or modified sequence
atgcccgcagtggcctccgtcccaaaggagctgtacctttcaagcagtctgaaggacctgaataaaaagactgaggttaagcccgagaaaattagtacaaagtcatacgtacattccgcgctgaagatcttcaagaccgctgaggaatgtcgtttggatcgggacgaagagcgggcatacgtcctatacatgaaatatgtgacagtttacaacctcattaagaaaagacccgactttaaacaacagcaggattattttcacagcatccttggtcctggaaatatcaagaaggcggtcgaggaggctgagcggctgagtgaaagcctgaagctgcgttatgaggaggcagaggtccgtaagaaacttgaagaaaaggaccggcaagaggaggctcagcgtttacagcagaagcgtcaggagaccggccgtgaggatgggggtactctagcaaagggttccctggaaaacgtcctcgacagcaaagataagactcagaaatccaatggcgagaaaaatgaaaagtgtgagacaaaggagaagggagcaatcaccgcgaaggagctatacacaatgatgacggataaaaatatttccctgatcattatggatgctagaaggatgcaagattatcaggactcgtgtattctccattctctttcagtgccggaagaggctatctctccgggagtgacagctagttggatcgaagcacatctgcccgatgacagtaaagatacttggaagaagagggggaacgtggagtatgtcgtcttgcttgattggttttccagcgccaaggatctgcagattgggaccaccctgaggagcctgaaggacgccctgttcaagtgggagtcaaagacagtgctgaggaacgaaccattggtactggagggcggatatgaaaactggctgctctgttatcctcagtatacgacaaatgcaaaggtcacccctcctcccagacggcaaaacgaggaagtgagtatttcactggacttcacatatccaagccttgaagaatccattcctagtaaaccagccgcacagacccctcctgctagcatcgaggtcgatgaaaatattgagctgatcagtgggcagaacgagcgaatgggcccactgaacatctcgactccggtggaacccgtggccgcttcaaaaagtgacgtatcacctataatccagcctgtgccgagtattaagaacgttcctcagatagataggaccaagaagccagctgtaaagctgccagaggaacaccggatcaagagtgaaagtaccaatcatgagcagcagtcccctcaatccgggaaggtcatccccgatagaagcactaagccggtggtgttcagtcctaccttaatgctcactgacgaggaaaaggcacggatacatgccgagaccgcgctactgatggaaaaaaacaagcaggagaaagagctcagagaaaggcagcaggaggaacaaaaagaaaaattaaggaaggaagagcaagaacagaaggcaaaaaaaaaacaggaagcagaggagaacgaaatcaccgaaaagcagcaaaaggcaaaggaagagatggaaaagaaggagagtgaacaggcaaagaaagaagacaaggaaacgagtgctaaaaggggcaaagagattactggtgtgaagcggcagtcgaagtcagaacatgaaacatccgatgctaaaaaatctgtggaagacaggggaaaacgttgcccgactcccgaaatccagaaaaaatccacgggcgacgtgcctcatacatccgtgaccggcgatagtggatcagggaagccattcaagattaagggccaacctgagtctggtatcttgcgtacgggtactttccgggaggatactgatgataccgagcgtaacaaagcacagcgggaacctctcaccagagccaggtcagaagagatggggagaatcgtcccagggttgcctagcgggtgggcaaaatttctcgatccaatcactgggacattccgctattatcatagtcccactaatacagtccacatgtatccgccagaaatggccccatcttccgcccctccttcaaccccccctacccataaagccaagccacagatacctgccgaaagagaccgagaacccagtaagctgaagcgttcctatagctctcctgatattacacaggcaatccaggaggaagaaaaacgcaagcccaccgtcacgccaactgtgaatcgagagaataagccgacgtgctatcctaaagccgaaataagcaggttgtcagccagccaaataagaaatcttaaccctgtgttcggaggctctggacccgcacttaccggcctgaggaatttggggaacacttgttatatgaactctattctgcagtgcttgtgcaacgcaccccaccttgcagactacttcaatcgcaattgttatcaagatgatattaaccgcagcaacttgctcgggcataaaggtgaggtcgcagaggagtttggcattatcatgaaggctctgtggaccggtcagtatcgctacatttcgccaaaggatttcaaaattaccatcggcaaaatcaatgatcagtttgctggctattcccagcaggacagtcaggaactgctgctatttctgatggacggcctccatgaagatctgaataaggccgacaataggaagcgttacaaagaggagaataacgaccaccttgacgattttaaagccgcagagcatgcctggcagaaacataagcagcttaatgagagtatcatcgtcgcactgtttcagggtcagtttaaaagcacagtacagtgcctcacatgccacaaaaagtctcgcacgtttgaggctttcatgtacctgagcctgcccctagcctcaacctccaagtgtacgctccaagactgcctaaggctcttcagtaaagaagagaaattgactgataacaacagattttactgcagccactgtagggcgaggcgcgactctctcaagaagattgaaatctggaaattgcctcccgttctgctcgtccatctgaagcgtttttcttacgacgggagatggaaacagaagctccagactagcgtggatttccctctggagaatctcgatttgtcccagtatgtgataggacccaagaataacctgaagaagtacaacctttttagtgtaagtaatcactacggcggtcttgatggtggacattacactgcttactgtaagaatgcagcaagacaaaggtggtttaagttcgacgaccatgaagtgagcgacatctcggtatcatcggtgaaaagttcagcggcatacatcctgttttacacctccctgggcccaagagtgaccgatgtggcgacctag

SEQ ID NO: 46416 - DNA, 3357 bp, Artificial Sequence
  derived and/or modified sequence
atgcccgctgttgcttctgtgccaaaggaactttacctctcatcgtcgctgaaggatctgaataaaaagacagaggtgaaacctgagaaaatcagtactaaatcatatgttcactccgctttgaagattttcaagactgctgaggaatgccggctggacagagacgaggagcgggcatatgtgctgtatatgaaatatgtcacagtctacaacctgataaaaaagcgccctgactttaaacaacaacaggactattttcatagcatcttgggccctggcaacatcaagaaggcagtggaggaggccgaaagactctcagaatccctgaaattgcggtatgaagaggctgaggttcgaaagaaattggaggaaaaagatagacaggaggaagcacagagactgcagcaaaaacgccaggaaaccggcagagaggacggagggaccctagccaaaggatctctggagaacgtcctcgactcaaaagacaaaacacagaagtccaacggagagaagaacgagaagtgtgagaccaaggagaaaggcgctatcacggctaaggagctttacaccatgatgacagataaaaatatttccctgatcataatggacgctagacgcatgcaggactatcaggattcctgcattctgcatagtctttccgttccagaagaggccatctccccaggggtcactgccagttggattgaagcccaccttccagatgacagcaaggatacatggaaaaaaagagggaatgtggaatatgttgtattactggactggttcagttctgccaaggatctccagatagggaccaccctgaggtcacttaaggatgccctgttcaagtgggaaagcaaaactgtactgcggaatgaacctctggtgctcgaagggggatacgagaattggctgctgtgttacccccagtacacaactaatgcaaaagttaccccaccgcctaggcgtcagaacgaggaggtaagcattagtttagactttacttatcccagcctggaggagtcaattccttccaaacctgcagcacagacacccccagcgtccatcgaggttgacgagaatattgagctgatatcaggccagaatgagagaatgggccctctgaatatttcaacccccgtggagccagtggccgcttctaagtctgatgtcagccccataatccaacctgtgcccagcattaaaaatgtcccacagatagatagaacgaaaaaaccggcagtgaaactgccagaagagcatcgtatcaaatcggaaagcaccaatcacgagcaacaatcaccgcaatcgggcaaagtgatccctgaccgctcaacaaagcccgttgttttcagccccactctaatgctgacggacgaagagaaggcgagaatccatgctgagacagcactgctgatggagaaaaacaagcaagagaaagagctgcgggagagacagcaggaagagcagaaagaaaaactcagaaaagaagaacaggaacagaaagccaagaagaaacaagaggctgaagagaacgagatcaccgagaaacagcagaaagccaaggaggaaatggaaaaaaaagagagcgagcaggccaagaaagaggataaggaaacaagtgcaaagcgtgggaaggagatcaccggcgtcaaacgccagagcaaatccgaacacgagacctcagacgcgaaaaagtccgtcgaagatcgcggtaagcgttgccctacacccgagatccagaagaagtctacaggtgacgttccccacactagcgtcaccggcgacagtggcagcgggaagcccttcaagattaagggtcagccagaaagcggaatcctgagaacaggaaccttcagagaggacacggacgataccgagagaaataaagcccaacgggaacctttgactcgggcacgtagtgaagagatgggacgaattgtacctgggcttccctccggctgggctaagttcctggatcctatcactggcacattccggtattaccactcacccacaaacactgtgcacatgtaccctcctgagatggcaccaagtagcgcgccaccctctacacctcccacacataaggcaaagccacagatcccagcggaacgagatagagagccttctaagctgaagaggtcctactcctcccctgatattacacaggcaattcaagaggaagagaagcggaaacccaccgtgacgcctacggtgaatagggaaaacaaaccaacctgttatcccaaggctgagatcagcaggttatctgcttcccagatcaggaacctgaacccagtgttcggaggcagcggccctgccctcaccggacttcgaaatctcggcaacacatgttatatgaactctattctgcagtgtctgtgcaacgcacctcacctcgctgactacttcaaccggaattgttaccaggatgacattaatagaagtaacttactgggtcacaagggggaggtggccgaagagttcggaatcatcatgaaggccttatggactgggcagtacaggtacatctctcccaaggactttaaaatcaccataggcaaaattaatgaccagttcgctggatatagccagcaagatagccaggagcttctacttttcctcatggacggtctccacgaggatctgaacaaagctgacaatcgtaagcggtataaagaagaaaataacgaccacttggatgatttcaaggccgcagaacatgcttggcaaaaacataagcagctcaacgagtcaataatagttgcactattccagggccagttcaaatctaccgtgcagtgtctcacatgccacaaaaaatcacggacattcgaggccttcatgtatctcagtcttccccttgcctcaacttccaagtgcacgctgcaggactgcctgagactctttagcaaagaggagaagcttacagataataatcgcttctactgcagccactgtcgcgcaaggcgggatagtcttaaaaagatcgagatttggaaactgccaccggtcctgctcgtgcacctgaaacggttttcctacgacggccgatggaagcagaagctgcaaacgagcgtcgacttcccgctggaaaaccttgacctatcacagtacgtgattgggccaaagaataacttgaagaagtacaatctcttttccgtatctaatcattatggcggacttgacggcggacactataccgcttactgcaaaaatgccgcaaggcaacggtggtttaagttcgatgaccatgaggtctcagacatcagtgtctcctccgtgaagagttctgccgcttatattcttttttacactagcctgggccctcgggttacagacgtcgccacttag

SEQ ID NO: 46417 - DNA, 4243 bp, Artificial Sequence
  derived and/or modified sequence
aatgcaaatcgggaaaagggggtgagctgggctggcttccgtcctggtagccaaggctaattctccctcgagttcttgggagatgggcatttggcgagaaggctggcgttagtgaagcgcgcccggcgtcacggaaagaagcacttgtaaggaaatatagcatccattgtgaaagtggaaaagtaaagataattcatcatgcctgctgtggcttcagttcctaaagaactctacctcagttcttcactaaaagaccttaataagaagacagaagttaaaccagagaaaataagcactaagagttatgtgcacagtgccctgaagatctttaagacagcagaagaatgcagattagatcgtgatgaggaaagggcctatgtactatatatgaaatacgtgactgtttataatcttatcaaaaaaagacctgatttcaagcaacagcaggattatttccattcaatacttggacctggaaacatcaaaaaagctgtcgaagaagctgaaagactctctgaaagccttaaattaagatatgaagaagctgaagtccggaaaaaacttgaggaaaaagacaggcaggaggaagcacagcggctacaacaaaaaaggcaggaaacaggaagagaggatggtggcacattggctaaaggctctttggagaatgttttggattccaaagacaaaacccaaaagagcaatggtgaaaagaatgaaaaatgtgagaccaaagagaaaggagcaatcacagcaaaggaactatacacaatgatgacggataaaaacatcagcttgattataatggatgctcgaagaatgcaggattatcaggattcctgtattttacattctctcagtgttcctgaagaagccatcagtccaggagtcactgctagttggattgaagcacacctgccagatgattctaaagacacatggaagaagagggggaatgtggagtatgtggtacttcttgactggtttagttctgccaaagatttacagattggaacaactctccggagtctgaaagatgcacttttcaagtgggaaagtaaaactgtcctgcgcaatgagcctttggttttagagggaggctatgaaaactggctcctttgttatccccagtatacaacaaatgctaaggtcactccacccccacgacgccagaatgaagaggtgtctatctcattggattttacttatccctcattggaagaatcaattccttctaaacctgctgcccagacgccacctgcatctatagaagtagatgaaaatatagaattgataagtggtcaaaatgagagaatgggaccactgaatatatcaactccagttgaaccagttgctgcttctaaatctgatgtttcacccataattcagccagtgcctagtataaagaatgttccacagattgatcgtactaaaaaaccagcagtcaaattgcctgaagagcatagaataaaatctgaaagtacaaaccatgagcagcaatctcctcagagtggaaaagttattcctgatcgttccaccaagccagtagttttttctccaactctcatgttaacagatgaagaaaaggctcgtattcatgcagaaactgctcttctaatggaaaaaaacaaacaagaaaaagaacttcgggaaaggcagcaagaggaacagaaagagaaactgaggaaggaagaacaagaacaaaaagccaaaaagaaacaagaagctgaagaaaatgaaattacagagaagcaacaaaaagcaaaagaagaaatggagaagaaagaaagtgaacaggccaagaaagaagataaagaaacctcagcaaagaggggcaaagaaataacaggagtaaaaagacaaagtaaaagtgaacatgaaacttctgatgccaagaaatctgtagaagatagggggaaaaggtgtccaaccccagaaatacagaaaaagtcaacaggagatgtgccccatacatctgtgacaggggattcaggttcaggcaagccatttaagattaaaggacaaccagaaagtggaattctaaggacaggaacttttagagaggatacagacgataccgaaagaaataaagctcaacgagaacctttgacaagagcacgaagtgaagaaatggggaggatcgtaccaggactgccttcaggctgggccaagtttcttgacccaatcactggaacctttcgttattatcattcacccaccaacactgttcatatgtacccaccggaaatggctccttcatctgcacctccttccacccctccaactcataaagccaagccacagattcctgctgagcgggatagggaaccttccaaactgaagcgctcctactcctccccagatataacccaggctattcaagaggaagagaagaggaagccaacagtaactccaacagttaatcgggaaaacaagccaacatgttatcctaaagctgagatctcaaggctttctgcttctcagattcggaacctcaatcctgtttttggaggttctggaccagctcttactggacttcgtaacttaggaaatacttgttatatgaactcaatattgcagtgcctatgtaacgctccacatttggctgattatttcaaccgaaactgttatcaggatgatattaacaggtcaaatttgttggggcataaaggtgaagtggcagaagaatttggtataatcatgaaagccctgtggacaggacagtatagatatatcagtccaaaggactttaaaatcaccattgggaagatcaatgaccagtttgcaggatacagtcagcaagattcacaagaattgcttctgttcctaatggatggtctccatgaagatctaaataaagctgataatcggaagagatataaagaagaaaataatgatcatctcgatgactttaaagctgcagaacatgcctggcagaaacacaagcagctcaatgagtctattattgttgcactttttcagggtcaattcaaatctacagtacagtgcctcacatgtcacaaaaagtctaggacatttgaggccttcatgtatttgtctctaccactagcatccacaagtaaatgtacattacaggattgccttagattattttccaaagaagaaaaactcacagataacaacagattttactgcagtcattgcagagctcgacgggattctctaaaaaagatagaaatctggaagttaccacctgtgcttttagtgcatctgaaacgtttttcctacgatggcaggtggaaacaaaaattacagacatctgtggacttcccgttagaaaatcttgacttgtcacagtatgttattggtccaaagaacaatttgaagaaatataatttgttttctgtttcaaatcactacggtgggctggatggaggccactacacagcctattgtaaaaatgcagcaagacaacggtggtttaagtttgatgatcatgaagtttctgatatctccgtttcttctgtgaaatcttcagcagcttatatcctcttttatacttcattgggaccacgagtaactgatgtagccacataaggagacataggttataaactagttatcttttaaaaggctcagcaacacaactcttgaaatgcttatcaggataatggtagctatagctggccatttagaggaattctaggacagtgggagctgtgttactagcactatataattccggtcagtgctgacaaataacatttaacaagtattgcagtaatcatcacttacaggtaccatttatttcaaaacaacttttttagtctgctccaaagttaaaataattaactagctaagcattattattcgactggtctaaaaactattgttatcttttttttttccttttcactgttatggccttttcacatttctaaatcccatcttgatatactatgaatactctagaatgatgtaaagcagataggaatgtatgtgtacatatttattgcatacttgcacatcaaatcgatgtacatagtttaacacgtggtccttttgtgaaacctagaactcagaggattgctttttttctttcagcctattttgagttaacttcagtgctttcttagggaaatgacagggcaaagcaatttttctgttggctttgggctgtatttgtgcactaaatctttattctaaaaaaaaaaatggaaactttaatttttttaaaacgagaatttcatttacagctacattaaaatcttaatgagaaaaataa

SEQ ID NO: 46418 - DNA, 5690 bp, Artificial Sequence
  derived and/or modified sequence
aatgcaaatcgggaaaagggggtgagctgggctggcttccgtcctggtagccaaggctaattctccctcgagttcttgggagatgggcatttggcgagaaggctggcgttagtgaagcgcgcccggcgtcacggtgagtgcgggtcttgggccctagcacctgttctctgggaagtcgtccgctgtgaacgatgaacgcctttccttccaccagctgctggttaccccggagacaagctctgtccgcggagaggagtgggacaactcctaaaggaaagaagcacttgtaaggaaatatagcatccattgtgaaagtggaaaagtaaagataattcatcatgcctgctgtggcttcagttcctaaagaactctacctcagttcttcactaaaagaccttaataagaagacagaagttaaaccagagaaaataagcactaagagttatgtgcacagtgccctgaagatctttaagacagcagaagaatgcagattagatcgtgatgaggaaagggcctatgtactatatatgaaatacgtgactgtttataatcttatcaaaaaaagacctgatttcaagcaacagcaggattatttccattcaatacttggacctggaaacatcaaaaaagctgtcgaagaagctgaaagactctctgaaagccttaaattaagatatgaagaagctgaagtccggaaaaaacttgaggaaaaagacaggcaggaggaagcacagcggctacaacaaaaaaggcaggaaacaggaagagaggatggtggcacattggctaaaggctctttggagaatgttttggattccaaagacaaaacccaaaagagcaatggtgaaaagaatgaaaaatgtgagaccaaagagaaaggagcaatcacagcaaaggaactatacacaatgatgacggataaaaacatcagcttgattataatggatgctcgaagaatgcaggattatcaggattcctgtattttacattctctcagtgttcctgaagaagccatcagtccaggagtcactgctagttggattgaagcacacctgccagatgattctaaagacacatggaagaagagggggaatgtggagtatgtggtacttcttgactggtttagttctgccaaagatttacagattggaacaactctccggagtctgaaagatgcacttttcaagtgggaaagtaaaactgtcctgcgcaatgagcctttggttttagagggaggctatgaaaactggctcctttgttatccccagtatacaacaaatgctaaggtcactccacccccacgacgccagaatgaagaggtgtctatctcattggattttacttatccctcattggaagaatcaattccttctaaacctgctgcccagacgccacctgcatctatagaagtagatgaaaatatagaattgataagtggtcaaaatgagagaatgggaccactgaatatatcaactccagttgaaccagttgctgcttctaaatctgatgtttcacccataattcagccagtgcctagtataaagaatgttccacagattgatcgtactaaaaaaccagcagtcaaattgcctgaagagcatagaataaaatctgaaagtacaaaccatgagcagcaatctcctcagagtggaaaagttattcctgatcgttccaccaagccagtagttttttctccaactctcatgttaacagatgaagaaaaggctcgtattcatgcagaaactgctcttctaatggaaaaaaacaaacaagaaaaagaacttcgggaaaggcagcaagaggaacagaaagagaaactgaggaaggaagaacaagaacaaaaagccaaaaagaaacaagaagctgaagaaaatgaaattacagagaagcaacaaaaagcaaaagaagaaatggagaagaaagaaagtgaacaggccaagaaagaagataaagaaacctcagcaaagaggggcaaagaaataacaggagtaaaaagacaaagtaaaagtgaacatgaaacttctgatgccaagaaatctgtagaagatagggggaaaaggtgtccaaccccagaaatacagaaaaagtcaacaggagatgtgccccatacatctgtgacaggggattcaggttcaggcaagccatttaagattaaaggacaaccagaaagtggaattctaaggacaggaacttttagagaggatacagacgataccgaaagaaataaagctcaacgagaacctttgacaagagcacgaagtgaagaaatggggaggatcgtaccaggactgccttcaggctgggccaagtttcttgacccaatcactggaacctttcgttattatcattcacccaccaacactgttcatatgtacccaccggaaatggctccttcatctgcacctccttccacccctccaactcataaagccaagccacagattcctgctgagcgggatagggaaccttccaaactgaagcgctcctactcctccccagatataacccaggctattcaagaggaagagaagaggaagccaacagtaactccaacagttaatcgggaaaacaagccaacatgttatcctaaagctgagatctcaaggctttctgcttctcagattcggaacctcaatcctgtttttggaggttctggaccagctcttactggacttcgtaacttaggaaatacttgttatatgaactcaatattgcagtgcctatgtaacgctccacatttggctgattatttcaaccgaaactgttatcaggatgatattaacaggtcaaatttgttggggcataaaggtgaagtggcagaagaatttggtataatcatgaaagccctgtggacaggacagtatagatatatcagtccaaaggactttaaaatcaccattgggaagatcaatgaccagtttgcaggatacagtcagcaagattcacaagaattgcttctgttcctaatggatggtctccatgaagatctaaataaagctgataatcggaagagatataaagaagaaaataatgatcatctcgatgactttaaagctgcagaacatgcctggcagaaacacaagcagctcaatgagtctattattgttgcactttttcagggtcaattcaaatctacagtacagtgcctcacatgtcacaaaaagtctaggacatttgaggccttcatgtatttgtctctaccactagcatccacaagtaaatgtacattacaggattgccttagattattttccaaagaagaaaaactcacagataacaacagattttactgcagtcattgcagagctcgacgggattctctaaaaaagatagaaatctggaagttaccacctgtgcttttagtgcatctgaaacgtttttcctacgatggcaggtggaaacaaaaattacagacatctgtggacttcccgttagaaaatcttgacttgtcacagtatgttattggtccaaagaacaatttgaagaaatataatttgttttctgtttcaaatcactacggtgggctggatggaggccactacacagcctattgtaaaaatgcagcaagacaacggtggtttaagtttgatgatcatgaagtttctgatatctccgtttcttctgtgaaatcttcagcagcttatatcctcttttatacttcattgggaccacgagtaactgatgtagccacataaggagacataggttataaactagttatcttttaaaaggctcagcaacacaactcttgaaatgcttatcaggataatggtagctatagctggccatttagaggaattctaggacagtgggagctgtgttactagcactatataattccggtcagtgctgacaaataacatttaacaagtattgcagtaatcatcacttacaggtaccatttatttcaaaacaacttttttagtctgctccaaagttaaaataattaactagctaagcattattattcgactggtctaaaaactattgttatcttttttttttccttttcactgttatggccttttcacatttctaaatcccatcttgatatactatgaatactctagaatgatgtaaagcagataggaatgtatgtgtacatatttattgcatacttgcacatcaaatcgatgtacatagtttaacacgtggtccttttgtgaaacctagaactcagaggattgctttttttctttcagcctattttgagttaacttcagtgctttcttagggaaatgacagggcaaagcaatttttctgttggctttgggctgtatttgtgcactaaatctttattctaaaaaaaaaaatggaaactttaatttttttaaaacgagaatttcatttacagctacattaaaatcttaatgagaaaaataatttataaccctgtgggtgttctgtctttaatattgtattatcaaatataggacagtaaaaccatagattttatatacacacgtgctatataataacacccagagtcattctttcaagactagtattctcacatattgagaatattcattctaaatattaaagtaaaaatgccgggagtcaggcatgattgcaaagtgaactgcattataaactacatctttacagagtgatgtattaagagggttaaaggagcttataatttatttaaccgagggactcagttgctatatatatagtcagtaaaacactccatataaaaataagattctaaaagtgcttcagaaagagaccaccattagcaggctctcagggagaagatgaaaggatggggttcaaattgtgaagctgacaacttttcatgttttacaattagtctaagagaccacttcttggctaaattattatatcaaatatattcaaatcatattcttaaactcatcgagccatttgaacaaaaattatttttgtttagcttcatgagtatctttggaaaataatttgttgaatatatatgattatgagatattttctgataaacactgaattttgaaacctgaactcactatataattgcagtgttttgaaggcctgcatccattagcattgcattatattcacactgccttttttagtgaaccaagacccatcttctggacgacagatttatcttaagatgaaaggttgtataacatgcccacaaggcataaaaatgttaatgatgcaagtaagttctaagagtttaatgaccaagcaaaactctaccaccagatgctgactgcttgttttgcagtgttcaggaaacaccattttcctggctcttaacgcttttgtattggtatggaaaagggctggcagctatagaacaggagatccatagcattttgaacagaagtatctggaatctcactgactcgtgtgttatcaaagctatatcaggcctgggtgactgaattcttgcagaaagcagtgtagtggccaccatccaaatcaccaaaatggttctatgggagaaaggaatgtcaaacttagtattcacatatgaacactaactactggaacagaaatgatagggccaagagatgctttttaaattgtcccttattctaaattaaaaggaagtgataattttgttgttaaatcatgcatatagcctgactgctatattgcttctcatttcattgtaactacttatatgttgtgcccattgactatcatctgtgaataaagaaagacaatatttagcagca

SEQ ID NO: 46419 - DNA, 5848 bp, Artificial Sequence
  derived and/or modified sequence
aatgcaaatcgggaaaagggggtgagctgggctggcttccgtcctggtagccaaggctaattctccctcgagttcttgggagatgggcatttggcgagaaggctggcgttagtgaagcgcgcccggcgtcacggtgagtgcgggtcttgggccctagcacctgttctctgggaagtcgtccgctgtgaacgatgaacgcctttccttccaccagctgctggttaccccggagacaagctctgtccgcggagaggagtgggacaactcctaaaggcaacaacaatactcaacataaatatctgttcttgaactcctgggctcaagcagtcctcccacctcagtctcccagagtgttgggattacagctgtgaggcaccacgcccagtcagtgcactgctttttgcatggagaaagtcttgctgctactttaaaaaggaaagaagcacttgtaaggaaatatagcatccattgtgaaagtggaaaagtaaagataattcatcatgcctgctgtggcttcagttcctaaagaactctacctcagttcttcactaaaagaccttaataagaagacagaagttaaaccagagaaaataagcactaagagttatgtgcacagtgccctgaagatctttaagacagcagaagaatgcagattagatcgtgatgaggaaagggcctatgtactatatatgaaatacgtgactgtttataatcttatcaaaaaaagacctgatttcaagcaacagcaggattatttccattcaatacttggacctggaaacatcaaaaaagctgtcgaagaagctgaaagactctctgaaagccttaaattaagatatgaagaagctgaagtccggaaaaaacttgaggaaaaagacaggcaggaggaagcacagcggctacaacaaaaaaggcaggaaacaggaagagaggatggtggcacattggctaaaggctctttggagaatgttttggattccaaagacaaaacccaaaagagcaatggtgaaaagaatgaaaaatgtgagaccaaagagaaaggagcaatcacagcaaaggaactatacacaatgatgacggataaaaacatcagcttgattataatggatgctcgaagaatgcaggattatcaggattcctgtattttacattctctcagtgttcctgaagaagccatcagtccaggagtcactgctagttggattgaagcacacctgccagatgattctaaagacacatggaagaagagggggaatgtggagtatgtggtacttcttgactggtttagttctgccaaagatttacagattggaacaactctccggagtctgaaagatgcacttttcaagtgggaaagtaaaactgtcctgcgcaatgagcctttggttttagagggaggctatgaaaactggctcctttgttatccccagtatacaacaaatgctaaggtcactccacccccacgacgccagaatgaagaggtgtctatctcattggattttacttatccctcattggaagaatcaattccttctaaacctgctgcccagacgccacctgcatctatagaagtagatgaaaatatagaattgataagtggtcaaaatgagagaatgggaccactgaatatatcaactccagttgaaccagttgctgcttctaaatctgatgtttcacccataattcagccagtgcctagtataaagaatgttccacagattgatcgtactaaaaaaccagcagtcaaattgcctgaagagcatagaataaaatctgaaagtacaaaccatgagcagcaatctcctcagagtggaaaagttattcctgatcgttccaccaagccagtagttttttctccaactctcatgttaacagatgaagaaaaggctcgtattcatgcagaaactgctcttctaatggaaaaaaacaaacaagaaaaagaacttcgggaaaggcagcaagaggaacagaaagagaaactgaggaaggaagaacaagaacaaaaagccaaaaagaaacaagaagctgaagaaaatgaaattacagagaagcaacaaaaagcaaaagaagaaatggagaagaaagaaagtgaacaggccaagaaagaagataaagaaacctcagcaaagaggggcaaagaaataacaggagtaaaaagacaaagtaaaagtgaacatgaaacttctgatgccaagaaatctgtagaagatagggggaaaaggtgtccaaccccagaaatacagaaaaagtcaacaggagatgtgccccatacatctgtgacaggggattcaggttcaggcaagccatttaagattaaaggacaaccagaaagtggaattctaaggacaggaacttttagagaggatacagacgataccgaaagaaataaagctcaacgagaacctttgacaagagcacgaagtgaagaaatggggaggatcgtaccaggactgccttcaggctgggccaagtttcttgacccaatcactggaacctttcgttattatcattcacccaccaacactgttcatatgtacccaccggaaatggctccttcatctgcacctccttccacccctccaactcataaagccaagccacagattcctgctgagcgggatagggaaccttccaaactgaagcgctcctactcctccccagatataacccaggctattcaagaggaagagaagaggaagccaacagtaactccaacagttaatcgggaaaacaagccaacatgttatcctaaagctgagatctcaaggctttctgcttctcagattcggaacctcaatcctgtttttggaggttctggaccagctcttactggacttcgtaacttaggaaatacttgttatatgaactcaatattgcagtgcctatgtaacgctccacatttggctgattatttcaaccgaaactgttatcaggatgatattaacaggtcaaatttgttggggcataaaggtgaagtggcagaagaatttggtataatcatgaaagccctgtggacaggacagtatagatatatcagtccaaaggactttaaaatcaccattgggaagatcaatgaccagtttgcaggatacagtcagcaagattcacaagaattgcttctgttcctaatggatggtctccatgaagatctaaataaagctgataatcggaagagatataaagaagaaaataatgatcatctcgatgactttaaagctgcagaacatgcctggcagaaacacaagcagctcaatgagtctattattgttgcactttttcagggtcaattcaaatctacagtacagtgcctcacatgtcacaaaaagtctaggacatttgaggccttcatgtatttgtctctaccactagcatccacaagtaaatgtacattacaggattgccttagattattttccaaagaagaaaaactcacagataacaacagattttactgcagtcattgcagagctcgacgggattctctaaaaaagatagaaatctggaagttaccacctgtgcttttagtgcatctgaaacgtttttcctacgatggcaggtggaaacaaaaattacagacatctgtggacttcccgttagaaaatcttgacttgtcacagtatgttattggtccaaagaacaatttgaagaaatataatttgttttctgtttcaaatcactacggtgggctggatggaggccactacacagcctattgtaaaaatgcagcaagacaacggtggtttaagtttgatgatcatgaagtttctgatatctccgtttcttctgtgaaatcttcagcagcttatatcctcttttatacttcattgggaccacgagtaactgatgtagccacataaggagacataggttataaactagttatcttttaaaaggctcagcaacacaactcttgaaatgcttatcaggataatggtagctatagctggccatttagaggaattctaggacagtgggagctgtgttactagcactatataattccggtcagtgctgacaaataacatttaacaagtattgcagtaatcatcacttacaggtaccatttatttcaaaacaacttttttagtctgctccaaagttaaaataattaactagctaagcattattattcgactggtctaaaaactattgttatcttttttttttccttttcactgttatggccttttcacatttctaaatcccatcttgatatactatgaatactctagaatgatgtaaagcagataggaatgtatgtgtacatatttattgcatacttgcacatcaaatcgatgtacatagtttaacacgtggtccttttgtgaaacctagaactcagaggattgctttttttctttcagcctattttgagttaacttcagtgctttcttagggaaatgacagggcaaagcaatttttctgttggctttgggctgtatttgtgcactaaatctttattctaaaaaaaaaaatggaaactttaatttttttaaaacgagaatttcatttacagctacattaaaatcttaatgagaaaaataatttataaccctgtgggtgttctgtctttaatattgtattatcaaatataggacagtaaaaccatagattttatatacacacgtgctatataataacacccagagtcattctttcaagactagtattctcacatattgagaatattcattctaaatattaaagtaaaaatgccgggagtcaggcatgattgcaaagtgaactgcattataaactacatctttacagagtgatgtattaagagggttaaaggagcttataatttatttaaccgagggactcagttgctatatatatagtcagtaaaacactccatataaaaataagattctaaaagtgcttcagaaagagaccaccattagcaggctctcagggagaagatgaaaggatggggttcaaattgtgaagctgacaacttttcatgttttacaattagtctaagagaccacttcttggctaaattattatatcaaatatattcaaatcatattcttaaactcatcgagccatttgaacaaaaattatttttgtttagcttcatgagtatctttggaaaataatttgttgaatatatatgattatgagatattttctgataaacactgaattttgaaacctgaactcactatataattgcagtgttttgaaggcctgcatccattagcattgcattatattcacactgccttttttagtgaaccaagacccatcttctggacgacagatttatcttaagatgaaaggttgtataacatgcccacaaggcataaaaatgttaatgatgcaagtaagttctaagagtttaatgaccaagcaaaactctaccaccagatgctgactgcttgttttgcagtgttcaggaaacaccattttcctggctcttaacgcttttgtattggtatggaaaagggctggcagctatagaacaggagatccatagcattttgaacagaagtatctggaatctcactgactcgtgtgttatcaaagctatatcaggcctgggtgactgaattcttgcagaaagcagtgtagtggccaccatccaaatcaccaaaatggttctatgggagaaaggaatgtcaaacttagtattcacatatgaacactaactactggaacagaaatgatagggccaagagatgctttttaaattgtcccttattctaaattaaaaggaagtgataattttgttgttaaatcatgcatatagcctgactgctatattgcttctcatttcattgtaactacttatatgttgtgcccattgactatcatctgtgaataaagaaagacaatatttagc

SEQ ID NO: 46420 - protein, 558 aa, Artificial Sequence
  derived and/or modified sequence
MDSSTAMNQCSCRGMEENKERPKRQRQNNFPMFPSPKAWNFRGRKRKQSTQDEDAVSLCSLDISEPSNKRVKPLSRVTSLANLIPPVKATPLKRFSQTLQRSISFRSESRPDILAPRPWSRNAAPSSTKRRDSKLWSETFDVCVNQMLTSKEIKRQEAIFELSQGEEDLIEDLKLAKKAYHDPMLKLSIMTEQELNQIFGTLDSLIPLHEELLSQLRDVRKPDGSTEHVGPILVGWLPCLSSYDSYCSNQVAAKALLDHKKQDHRVQDFLQRCLESPFSRKLDLWNFLDIPRSRLVKYPLLLREILRHTPNDNPDQQHLEEAINIIQGIVAEINTKTGESECRYYKERLLYLEEGQKDSLIDSSRVLCCHGELKNNRGVKLHVFLFQEVLVITRAVTHNEQLCYQLYRQPIPVKDLLLEDLQDGEVRLGGSLRGAFSNNERIKNFFRVSFKNGSQSQTHSLQANDTFNKQQWLNCIRQAKETVLCAAGQAGVLDSEGSFLNPTTGSRELQGETKLEQMDQSDSESDCSMDTSEVSLDCERMEQTDSSCGNSRHGESNV

SEQ ID NO: 46421 - DNA, 1677 bp, Artificial Sequence
  derived and/or modified sequence
atggactcatctaccgcaatgaatcagtgctcctgccgcggcatggaagaaaataaggaacgccccaagcggcaaagacagaacaacttcccgatgtttccctccccaaaagcatggaacttccgcgggagaaagagaaagcaatccacacaggacgaggacgccgtcagcctatgtagcctcgatatttcggaaccttccaacaaacgagttaagccgcttagccgagtgacttcattggcaaacctcattccaccagtgaaggcaacaccacttaagcggttttcacagacgctccaaagatcaatctcatttcggtccgaatctagacccgatatcctggccccacgaccttggtcaagaaacgctgcaccatcatctaccaagcgcagggattccaagctgtggagtgaaacatttgatgtatgcgttaaccagatgctgacttcgaaggaaatcaaacggcaggaggcaatcttcgaactgtcccagggagaggaggacctaatcgaagaccttaagctggccaagaaggcttaccacgatcccatgttaaagctctcaattatgaccgagcaggagttgaaccagatatttggtactctcgacagcttgatccctttgcacgaggaactcctgtcccagttaagagatgtgaggaaaccagacggctcgaccgagcacgtgggtccaatcttggtaggctggctgccgtgtctcagttcctacgacagctattgctctaaccaggtcgctgccaaggcccttttggatcataaaaaacaggaccaccgggtccaggatttcttgcagcgctgtctagaatcccctttttctcggaaattggacctctggaattttctagacattcccagaagccggttggtaaagtaccctctgctgctgcgtgagatactcaggcataccccaaacgataaccctgaccagcagcacctggaggaagcaattaacatcatccagggcattgtcgcggagatcaacactaaaaccggtgaaagtgagtgtagatattataaagagcgcctgttgtatctggaagaagggcagaaagacagtcttatcgactcatcaagagtgctctgttgccatggcgagttgaaaaataataggggtgttaaactgcatgtatttctttttcaggaggtcctggtcataactcgagcagttacccacaacgaacagttgtgctaccagctgtacaggcagcctattcccgtaaaggacctactgctggaggacctgcaggatggagaggtgagactggggggctccctcagaggggccttcagtaataacgagcggatcaagaatttcttccgggtgtcttttaagaatggttctcaatcccagacgcactccctgcaggcgaatgatacattcaacaaacagcagtggttaaactgcataaggcaggcgaaggagacagtcctgtgcgccgcaggccaggccggcgtgctcgacagcgagggcagctttttaaatccgaccaccggcagccgtgagttgcagggtgagaccaagctcgaacaaatggatcagtctgatagcgaatccgattgctcaatggacactagcgaggtttcactggactgtgagcggatggagcagacagacagctcatgcgggaatagccggcacggagaatcaaatgtgtag

SEQ ID NO: 46422 - DNA, 1677 bp, Artificial Sequence
  derived and/or modified sequence
atggacagcagcacagccatgaaccagtgcagctgccggggcatggaggagaacaaggagcggcccaagaggcagaggcagaacaacttccccatgttccccagccccaaggcctggaacttccggggcaggaagaggaagcagagcacccaggatgaagatgctgtgtccctgtgcagcctggacatcagcgagcccagcaacaagagggtgaagcccctgagccgggtgaccagcctggccaacctgatcccccctgtgaaggccacccccctgaagcgcttcagccagaccctgcagaggagcatctccttccgctctgagagcaggccagacatcctggccccccggccctggagcagaaatgctgcccccagcagcaccaagaggcgggacagcaagctgtggagcgagacctttgatgtgtgtgtgaaccagatgctgaccagcaaggagatcaagaggcaggaggccatctttgagctgagccagggcgaggaggacctgattgaggacctgaagctggccaagaaggcctaccatgaccccatgctgaagctgagcatcatgacagagcaggagctgaaccagatcttcggcaccctggacagcctcatccccctgcacgaggagctgctgagccagctgagagatgtgaggaagccagatggcagcacagagcacgtgggccccatcctggtgggctggctgccctgcctgagcagctatgacagctactgcagcaaccaggtggccgccaaggccctgctggaccacaagaagcaggaccaccgggtgcaggacttcctgcagcgctgcctggagagccccttcagcaggaagctggacctgtggaacttcctggacatccccaggagccggctggtgaagtaccccctgctgctgcgggagatcctgcggcacaccccaaatgacaacccagaccagcagcacctggaggaggccatcaacatcatccagggcatcgtggccgagatcaacaccaagacaggagagagtgaatgtcgctactacaaggagcggctgctgtacctggaggagggccagaaggacagcctgattgacagcagccgggtgctgtgctgccacggggagctgaagaacaacagaggagtgaagctgcacgtgttcctgttccaggaggtgctggtgatcaccagggctgtgacccacaatgagcagctgtgctaccagctgtaccggcagcccatccctgtgaaggacctgctgctggaggacctgcaggatggagaggtgcggctgggcggcagcctgcggggggccttcagcaacaatgaaagaatcaagaacttcttccgggtgtccttcaagaatggcagccagagccagacccacagcctgcaggccaatgacaccttcaacaagcagcagtggctgaactgcatccggcaggccaaggagaccgtgctgtgtgccgccggccaggccggcgtgctggacagcgagggcagcttcctgaaccccaccaccggcagccgggagctgcagggcgagaccaagctggagcagatggaccagagcgacagcgagagtgactgcagcatggacaccagcgaggtgtccctggactgtgagaggatggagcagacagacagcagctgtggcaacagcagacatggagagagcaatgtgtag

SEQ ID NO: 46423 - DNA, 1677 bp, Artificial Sequence
  derived and/or modified sequence
atggacagcagcaccgccatgaaccagtgcagctgccggggcatggaggaaaacaaggagaggcctaagcggcagcggcagaacaacttcccaatgttcccttctccgaaggcatggaacttcagagggcggaagcggaaacaatcgacccaggacgaggatgcagttagtctgtgcagcctggatatttccgagccaagcaataaaagggttaagcccctgtctcgggtcacaagtttggccaatctgatcccccccgtcaaagccacgcctctgaagcgcttttcacagactctgcaacgcagtatatcgtttcgatcagaatctaggccggatatactggcacctcgcccctggagtaggaacgccgccccgagcagtacaaagcgtcgcgattcgaagttgtggagcgagacatttgatgtctgcgttaaccagatgcttacctctaaagagataaaaagacaagaggccatttttgaactgtctcagggtgaggaagacctgatagaggacttaaaactggccaagaaggcgtatcatgacccaatgctgaagctcagcattatgaccgaacaggagctgaatcaaatctttgggaccttggacagtctgatccctctgcatgaggagcttctctctcagctacgggacgtcagaaaacccgacggatccaccgaacatgtgggaccaatactggtggggtggctgccttgcctgagtagttacgactcttactgctccaaccaggtcgcagccaaggccctgctggatcataagaaacaggatcatagagtccaggacttcctgcagcgctgtctggaaagtcctttttccagaaagctggatctatggaactttcttgacatccccaggagccgtctggtgaagtacccattgctgcttagggaaattctccggcataccccaaatgacaatccagatcagcaacatcttgaggaggccattaacatcatccaggggatcgtggcggagatcaatactaaaaccggagagtccgagtgtcgctactacaaagaaagactattgtacctggaagagggacagaaagacagcttgattgatagcagccgtgtcctgtgctgccacggtgagctgaagaataatcgtggggtcaagctgcatgtattcctcttccaggaagtcctcgtgatcacacgagctgttacacataacgagcagttgtgttatcagctgtataggcagcccataccagtaaaggacctgcttctagaggacctccaggacggagaagttagactgggcggttctcttcgaggcgccttttctaacaatgaacgtataaagaacttcttcagggtttcttttaagaacggtagtcagtctcagacgcacagtctccaggccaacgacaccttcaataaacaacaatggctgaattgcatcagacaagcaaaggagaccgtcctgtgtgccgcaggacaggctggcgtcctcgatagcgaaggatctttcctgaatccgaccacaggaagccgggagctgcaaggcgaaacaaagcttgaacaaatggaccagagtgacagtgagtcggactgctccatggacacaagtgaggttagtctggactgtgaaaggatggagcagactgattcgtcatgtggaaactctagacacggggagtctaatgtgtag

SEQ ID NO: 46424 - DNA, 1677 bp, Artificial Sequence
  derived and/or modified sequence
atggatagctctaccgcaatgaaccagtgctcctgtagggggatggaagagaataaagagaggcctaagaggcagcgtcagaacaactttcctatgttcccctctcccaaagcttggaacttcaggggacggaagcgtaagcaatccacccaagacgaggacgccgtgtcgctgtgctccttggatatctctgagccgtcaaacaaaagggtcaaacctttatcccgcgtcacctccctggcaaatcttatacctccagtcaaagcaactcccctgaaaaggttttcacagaccctgcagcggagtatttctttccggagcgaaagtcgcccagatatactggcgccacgcccttggagccgcaacgcggcaccaagctccacaaagcggcgtgattctaaactctggtcagagactttcgacgtatgcgtcaaccagatgctcacatctaaggagatcaagaggcaggaagctatctttgagctcagccagggggaggaggacctgatcgaggatttaaaactggctaaaaaggcctatcatgatcccatgctcaaactgtcaataatgacagagcaggagttgaatcaaatctttggtaccctggattctctcatacccctgcatgaagaactgctttcccaactgcgcgacgttaggaagcctgacggcagtacggagcacgtgggtcccattttggtgggctggctgccctgtttgagctcctatgactcctactgttctaatcaggtggctgccaaagcgctcttggaccacaagaagcaagatcatagggttcaggactttctgcagcgatgtctcgaatctcctttctctagaaagctggacctctggaactttctcgatattcccagaagcaggctcgtgaagtatcctttgttactgcgtgagatcctgagacataccccaaacgacaacccagaccagcagcacctggaagaagctatcaatatcattcagggaatcgtggcggaaataaataccaaaacgggcgagagcgaatgtaggtactacaaagagagactcctctacttggaggaagggcagaaggattcacttatcgattcttcaagagtgttgtgttgtcacggagagctgaaaaacaaccggggagtcaaactacacgtgtttctgttccaagaagttctggtcattacccgggcagtcacacacaacgagcagctttgctatcagttgtatcgccagcccattccagtcaaggatctcctgctcgaggatctgcaagatggagaggtgagactaggcggttccctgcgaggagctttctccaacaatgaacgaattaaaaattttttccgagtgagctttaagaatggctctcagagccaaacacactccttgcaggccaatgatactttcaacaagcagcagtggttaaactgtattcggcaggccaaggaaacagtgctttgtgccgctggacaggcaggggttctcgactccgaaggcagcttcttaaacccaaccaccggcagccgagagcttcagggagagaccaagctggagcagatggaccagtcagactcagagagcgactgcagtatggatacaagtgaagtgagcctggattgcgagagaatggagcagacggacagctcctgcgggaacagtcgccacggagaatccaacgtatag

SEQ ID NO: 46425 - DNA, 3639 bp, Artificial Sequence
  derived and/or modified sequence
agcccaggggagccgccgccgcagccgccgccgccgcggtgagttttccagcctggagaggccgaaccagcgcgggggtcgaggagacctgagcctgccatactgagtctatggacagttccacagcaatgaatcaatgcagctgtagaggaatggaagaaaacaaggaaaggcctaaacggcagcggcaaaacaactttcccatgtttccctctcctaaagcctggaatttcagagggcgaaaacggaaacagagcacccaagatgaagatgctgttagcctttgcagtctcgacataagtgagcctagtaataaacgggtcaaacccctttcccgagtcacgtcgctagcaaacctcatcccgcccgtgaaggccacgccattaaagcgcttcagtcaaaccctgcagcgctccattagcttccgcagtgagagccgccctgacatcctcgccccccgaccctggtccagaaatgccgccccctcgagcacgaaacggagagatagcaagctgtggagtgagaccttcgatgtgtgcgtcaatcagatgcttacatccaaggaaatcaaacgtcaggaggcgatctttgagctttcccaaggagaagaagacttgatagaagacttgaaattagcaaaaaaggcctatcatgaccccatgctgaaactctccataatgacagaacaagagttgaatcaaatttttggaacactggactctctaattcctctacatgaagagctccttagtcagcttcgagatgttaggaagcctgatggctcgactgaacatgttggtcccatcctcgtgggctggctcccttgcctcagctcctatgatagctactgcagcaatcaagtagccgccaaagctctgctggaccacaaaaagcaagatcaccgagtccaggatttcctacagcgatgtttagaatccccctttagccgcaaactagatctctggaatttcctcgatattccaagaagccgcctggtaaaataccctctgcttctccgagaaatcttgaggcacacaccaaatgataatccagatcagcagcacttggaagaagctataaatatcattcagggaattgtggcagaaatcaacaccaagactggtgaatctgaatgccgctattataaagagcggcttctttacttggaagaaggccagaaagactccctgatcgacagctctcgagtcttgtgttgtcatggtgaactgaagaacaatcggggcgtgaaactgcatgttttcctgttccaagaagtgcttgtgatcactcgagccgtcacccacaatgagcagctttgctaccagctgtaccgtcagccaatccccgtgaaagacctcctgctggaagacctccaggatggagaagtgaggctgggtggctccctgcgaggggcattcagcaacaatgagagaattaaaaacttcttcagagtcagtttcaaaaatggatcccaaagtcagacccactcgctacaagccaatgacactttcaacaaacagcagtggcttaactgtattcgtcaagccaaagaaacagttttgtgtgctgccgggcaagctggggtgcttgactccgagggatcgttcctaaatcccaccaccgggagcagagagctacagggagaaacaaaacttgagcagatggaccaatcggacagtgagtcagactgtagtatggacacgagtgaggtcagcctcgactgtgagcgcatggaacagacagactcttcctgtggaaacagcaggcacggtgaaagtaacgtctgacagaagcatgtgcacttcgggaagcaggcctgcatcttacctgtacagtatttgcattccacagatggaacggtttggagaagcactttttcatacttttgtgaaagtatacatgttggcccagtctctcgtatctgtacctttgtccctagtactgtaactgccaatctgtctgtgtaagctggaatctgtggcaactattaccctgtgttgtatttcccaagtgtctggatggatggagaggtactcaaacaagttactttcagttgtcctgctggattttaaaaaaatagaaaaagaatctcaaaactactgttttacatagattgtttgaagagtccttcctcttgtgcttctgtaccactttcccagctcttagatgtggtagctaaaggcacggaatttagacggccttgtaaatagggcatgaggaactcatctgtgtattgggatggtattagagagagaatcaggaaagaccaactcatgaagtgaacttggtttgatcttactcaactagaaagcttgaaaacatccctggggattctgaaggcttaattttgcaaaggaggatgcattgtctgaactttgcaacttcatccagtgcaagtttgatgcaagaatgtattaggacataaaatagaggctgaccttaaaagggccaggacagaagcggctgccagctctgaatctttaactgaaatgcacatggcaccaggaggtgtctctcatagttggttgctagcctaaaacatcagaatagaacccaaagggcttaggaaggcctgccaggataacaagaaggccctgtattcattgtgtttcatctgcctaggcctactcattattttagagaatgaatgaagcaacaaggaagagagaccatgactctatcgatgacactgtttatagaaacacaggagaggaagaatttggaatgaaaagcacttcgtcagaaccttctgtgggagccattgagagaaaagcatggtccagtgccttctgagaaaggccagagctttgggctttcctgctctgcttttgggtcgtcaatttgccatctctggttctgtgctataatcagaattgtaattatgttctccagaggccaatttcattaactctgattaattagaatcagctagccagattagtaacctctttgtccagccttgatttacagtgcagggtaaagtgcagaccttaaaaacagctaagtacctagaagagctccctgcaagtgtaaatattaaggatgacctgtgcaaaattatacccacaccagcactagtggtaattattctaaattattgccaaaaagttttttttaatctgtctttcaagtttacagaaaagaaagcagtaaatgcattgatgtcattttattatgtacatatatcatgtgcattcaagctgtgtgacaagatatatcaatataaaaacaaggtatatactttattattttttgaaaacaaggatattgtgatcaattttaccctgtaaaacatatttctgtatttataggtcttaaacatgatgaattttttctattacaagtttatttaaaactgctttctcaagtcgttattgatacagcaagtgaacctgctgcagacagaagcagaggaaagccaagaacagcctttattggtgaagaaaagaatgaatgattctttgtaggcgccatcagccacttttagaagccatcagccagtgtgttgggaaaagaggtttgtcaagtgttggcctatgggaaggtggtcaatgaatgttttgatgaaatgaatgtttttgtataatggccttaaacttttctggaagtatttcaaataaattacattattaagtcatc

SEQ ID NO: 46426 - DNA, 1677 bp, Artificial Sequence
  derived and/or modified sequence
atggacagcagcaccgccatgaaccagtgcagctgcagaggcatggaggagaacaaggagagacccaagagacagagacagaacaacttccccatgttccccagccccaaggcctggaacttcagaggcagaaagagaaagcagagcacccaggacgaggacgccgtgagcctgtgcagcctggacatcagcgagcccagcaacaagagagtgaagcccctgagcagagtgaccagcctggccaacctgatcccccccgtgaaggccacccccctgaagagattcagccagaccctgcagagaagcatcagcttcagaagcgagagcagacccgacatcctggcccccagaccctggagcagaaacgccgcccccagcagcaccaagagaagagacagcaagctgtggagcgagaccttcgacgtgtgcgtgaaccagatgctgaccagcaaggagatcaagagacaggaggccatcttcgagctgagccagggcgaggaggacctgatcgaggacctgaagctggccaagaaggcctaccacgaccccatgctgaagctgagcatcatgaccgagcaggagctgaaccagatcttcggcaccctggacagcctgatccccctgcacgaggagctgctgagccagctgagagacgtgagaaagcccgacggcagcaccgagcacgtgggccccatcctggtgggctggctgccctgcctgagcagctacgacagctactgcagcaaccaggtggccgccaaggccctgctggaccacaagaagcaggaccacagagtgcaggacttcctgcagagatgcctggagagccccttcagcagaaagctggacctgtggaacttcctggacatccccagaagcagactggtgaagtaccccctgctgctgagagagatcctgagacacacccccaacgacaaccccgaccagcagcacctggaggaggccatcaacatcatccagggcatcgtggccgagatcaacaccaagaccggcgagagcgagtgcagatactacaaggagagactgctgtacctggaggagggccagaaggacagcctgatcgacagcagcagagtgctgtgctgccacggcgagctgaagaacaacagaggcgtgaagctgcacgtgttcctgttccaggaggtgctggtgatcaccagagccgtgacccacaacgagcagctgtgctaccagctgtacagacagcccatccccgtgaaggacctgctgctggaggacctgcaggacggcgaggtgagactgggcggcagcctgagaggcgccttcagcaacaacgagagaatcaagaacttcttcagagtgagcttcaagaacggcagccagagccagacccacagcctgcaggccaacgacaccttcaacaagcagcagtggctgaactgcatcagacaggccaaggagaccgtgctgtgcgccgccggccaggccggcgtgctggacagcgagggcagcttcctgaaccccaccaccggcagcagagagctgcagggcgagaccaagctggagcagatggaccagagcgacagcgagagcgactgcagcatggacaccagcgaggtgagcctggactgcgagagaatggagcagaccgacagcagctgcggcaacagcagacacggcgagagcaacgtgtag

SEQ ID NO: 46427 - protein, 532 aa, Artificial Sequence
  derived and/or modified sequence
MIEVCHHNWLLWLCPSKFGIFMCCLASTTGQMELRRTREPSNKRVKPLSRVTSLANLIPPVKATPLKRFSQTLQRSISFRSESRPDILAPRPWSRNAAPSSTKRRDSKLWSETFDVCVNQMLTSKEIKRQEAIFELSQGEEDLIEDLKLAKKAYHDPMLKLSIMTEQELNQIFGTLDSLIPLHEELLSQLRDVRKPDGSTEHVGPILVGWLPCLSSYDSYCSNQVAAKALLDHKKQDHRVQDFLQRCLESPFSRKLDLWNFLDIPRSRLVKYPLLLREILRHTPNDNPDQQHLEEAINIIQGIVAEINTKTGESECRYYKERLLYLEEGQKDSLIDSSRVLCCHGELKNNRGVKLHVFLFQEVLVITRAVTHNEQLCYQLYRQPIPVKDLLLEDLQDGEVRLGGSLRGAFSNNERIKNFFRVSFKNGSQSQTHSLQANDTFNKQQWLNCIRQAKETVLCAAGQAGVLDSEGSFLNPTTGSRELQGETKLEQMDQSDSESDCSMDTSEVSLDCERMEQTDSSCGNSRHGESNV

SEQ ID NO: 46428 - DNA, 1599 bp, Artificial Sequence
  derived and/or modified sequence
atgatcgaggtgtgccaccacaattggctactgtggctctgtcccagtaagttcggaatcttcatgtgctgtctagccagcaccactgggcagatggaactgcggcgtacgagggaaccatctaacaagcgggtgaagcccttaagcagagttaccagtctggcgaatctgatcccgcccgttaaggccacgcccttaaagcgctttagtcaaacactgcagaggtccatctctttccgcagtgaaagtcgccctgacatccttgcaccacggccatggagcagaaatgcagctccgtcttccacaaaacggcgcgatagtaagctctggtccgagactttcgacgtgtgcgtcaaccagatgttgacatccaaggaaatcaagcgccaggaggctatttttgaactttctcagggcgaggaagatttgattgaagacctcaaactggctaaaaaggcctatcacgacccaatgctcaagttgtctataatgacggagcaagagctgaaccagatttttggaactctagattcactaattcctctgcatgaggagctgctgtcacagcttagggacgtccggaagcccgatgggtctacagagcatgtaggtcctatcctcgtgggttggcttccttgtctcagcagttacgattcttactgcagcaaccaggtggccgcgaaagccctgcttgaccacaagaaacaggaccaccgagtgcaggacttcctccaaagatgcctcgagtccccttttagccggaagcttgatctctggaactttctggacatccccaggtctcggttggtgaaatatcccctgctgctgcgcgaaattctcagacacacgcctaacgacaatcccgatcaacagcacctcgaggaggccatcaacattattcagggtattgtggcagaaatcaataccaaaaccggagagtccgagtgtcgatattacaaggaacgtcttctctatctggaagagggtcaaaaggattccctgattgatagctctcgggttctgtgctgtcacggcgaactaaaaaacaaccgcggcgttaaattacacgtgttcctcttccaagaggtcctggtcattactcgcgcggtgacacacaacgaacagctgtgttatcagctgtaccgtcaaccaatcccggtgaaggatctcttgctggaggatctgcaagacggagaggtgagattggggggcagcttgcgcggagctttctcaaataatgagaggatcaagaacttctttcgtgtatcatttaagaacggaagtcagagccagactcactctctacaggccaacgatacattcaacaaacagcagtggctgaattgtatcagacaggctaaagagacggtgctctgcgctgccggccaagctggcgtcctggattccgagggatcctttctaaacccaacgaccggaagtcgtgagctgcaaggagagaccaaactggaacagatggatcagtcagacagtgagtcggattgctcaatggatacaagcgaggttagccttgactgtgagcgaatggagcagaccgattcatcctgtggcaactcacggcacggcgagagtaatgtgtag

SEQ ID NO: 46429 - DNA, 1599 bp, Artificial Sequence
  derived and/or modified sequence
atgattgaggtgtgccaccacaactggctgctgtggctgtgccccagcaagtttggcatcttcatgtgctgcctggccagcaccaccggccagatggagctgcggaggacccgggagcccagcaacaagagggtgaagcccctgagccgggtgaccagcctggccaacctgatcccccctgtgaaggccacccccctgaagcgcttcagccagaccctgcagaggagcatctccttccgctctgagagcaggccagacatcctggccccccggccctggagcagaaatgctgcccccagcagcaccaagaggcgggacagcaagctgtggagcgagacctttgatgtgtgtgtgaaccagatgctgaccagcaaggagatcaagaggcaggaggccatctttgagctgagccagggcgaggaggacctgattgaggacctgaagctggccaagaaggcctaccatgaccccatgctgaagctgagcatcatgacagagcaggagctgaaccagatcttcggcaccctggacagcctcatccccctgcacgaggagctgctgagccagctgagagatgtgaggaagccagatggcagcacagagcacgtgggccccatcctggtgggctggctgccctgcctgagcagctatgacagctactgcagcaaccaggtggccgccaaggccctgctggaccacaagaagcaggaccaccgggtgcaggacttcctgcagcgctgcctggagagccccttcagcaggaagctggacctgtggaacttcctggacatccccaggagccggctggtgaagtaccccctgctgctgcgggagatcctgcggcacaccccaaatgacaacccagaccagcagcacctggaggaggccatcaacatcatccagggcatcgtggccgagatcaacaccaagacaggagagagtgaatgtcgctactacaaggagcggctgctgtacctggaggagggccagaaggacagcctgattgacagcagccgggtgctgtgctgccacggggagctgaagaacaacagaggagtgaagctgcacgtgttcctgttccaggaggtgctggtgatcaccagggctgtgacccacaatgagcagctgtgctaccagctgtaccggcagcccatccctgtgaaggacctgctgctggaggacctgcaggatggagaggtgcggctgggcggcagcctgcggggggccttcagcaacaatgaaagaatcaagaacttcttccgggtgtccttcaagaatggcagccagagccagacccacagcctgcaggccaatgacaccttcaacaagcagcagtggctgaactgcatccggcaggccaaggagaccgtgctgtgtgccgccggccaggccggcgtgctggacagcgagggcagcttcctgaaccccaccaccggcagccgggagctgcagggcgagaccaagctggagcagatggaccagagcgacagcgagagtgactgcagcatggacaccagcgaggtgtccctggactgtgagaggatggagcagacagacagcagctgtggcaacagcagacatggagagagcaatgtgtag

SEQ ID NO: 46430 - DNA, 1599 bp, Artificial Sequence
  derived and/or modified sequence
atgatcgaggtgtgccaccacaactggctgctgtggctgtgccccagtaaattcggtatcttcatgtgctgtctggcatccactaccggccaaatggagctgcgccgtaccagggagcccagcaataaacgcgtgaagccgctgtctcgagtgacgtctctggccaatcttataccccctgtaaaggctacccctctcaagcggttctcgcagacactgcagcggtcaatctctttccgcagcgagagtaggcctgatattctcgcccccagaccctggtcgcgcaatgcagccccaagctcgactaaaagacgcgacagcaagctgtggagcgagacctttgacgtgtgcgtgaatcagatgcttaccagtaaagagatcaaacgtcaggaggccattttcgagttgtcgcagggcgaggaagatttgatagaagacttgaagctggctaaaaaagcgtaccatgatcctatgctaaagttgtcaataatgacagagcaagagctgaaccagatttttggaactttagatagcctgattccactccatgaggagcttttgtctcaactccgtgacgtgcgcaaaccggatgggagcactgagcatgtcggacccatcctggtaggttggttgccctgtctgtcatcatacgattcatactgtagtaatcaggtagccgccaaggcattactggaccacaagaagcaggaccaccgcgtgcaagactttttgcagcggtgcctcgaaagtcccttttcacgaaaacttgatttgtggaactttctcgacatcccaagatcaaggctggtgaaataccctctgcttctgagagagatcctgagacacacacctaacgacaatcccgaccagcagcacctggaagaagcgattaatatcatccaggggattgttgctgaaatcaatactaagacgggcgagagcgagtgcaggtactataaggagcgtctcctctatctcgaggagggccaaaaagactctcttattgactcttcccgcgtactatgctgccacggcgagttgaaaaacaaccgaggcgttaagctgcacgtctttttgttccaggaggtgttggtgatcacacgcgcagttacccacaatgaacagctttgttatcagctttatcgccagcctatcccagtgaaggaccttctgctggaggatctgcaggacggtgaggttcggcttggcggtagcctgcgaggcgcattctcaaacaacgagaggatcaaaaacttctttagagtctcttttaagaacggaagccagtcccagacccattccctacaggctaatgatacctttaacaaacagcagtggcttaactgtattaggcaggctaaggagacagttctctgcgcagctggtcaggctggcgtcctcgactccgaggggtcgtttctcaatcctacaaccggctcccgggagcttcaaggtgagacaaagctcgagcagatggatcagtcagactcagagtccgactgcagcatggatacatcagaggtgtccctcgattgcgaacggatggagcagaccgacagtagctgcggaaactcaagacatggagagagcaatgtgtag

SEQ ID NO: 46431 - DNA, 1599 bp, Artificial Sequence
  derived and/or modified sequence
atgattgaagtgtgccaccataattggctcctttggctctgtccatctaagttcggcatctttatgtgctgtctcgcaagcacgaccgggcaaatggagttaagacgaaccagggagccttcaaataagcgcgttaagcccttgagtcgggtaacatctctggctaacttgatccccccagtcaaagccactcctttgaaaaggttctctcagaccttgcagagatcaatttcttttaggtccgaatctcgaccagacatcctggccccaaggccttggtctcgcaatgccgctccctctagtacaaagcggagagactccaagctctggtctgagacttttgacgtctgcgtgaatcagatgcttacatcaaaagagatcaagcgacaagaggcaatcttcgaattgagtcagggagaggaggatctgattgaggatttgaaactggctaagaaagcctatcatgaccccatgctgaaactgtccatcatgactgagcaggagctgaatcagatttttgggactctggacagcctcatccctttacatgaggaactgctgagccagctccgcgacgtaagaaagccggacggcagcaccgagcacgtgggccctattcttgtgggatggctgccttgcctgagttcatatgattcgtattgcagcaatcaggtagccgctaaggcactgttggaccacaaaaaacaggatcatagagtgcaggatttcctccagcgttgtctcgaatcccccttcagcaggaaacttgacctgtggaatttcctggatatcccaagaagcaggctcgtgaaatatcccctcttgttgcgggaaattctgcgccacacgccaaacgacaaccccgaccaacagcatctcgaagaagccattaacattattcagggaatcgtcgccgaaatcaacaccaaaacaggtgaaagcgaatgccgttactataaagaacgtcttctttacctcgaggaaggacagaaagacagcttgatcgactcctctcgcgttctttgctgtcatggcgaactaaaaaataatagaggggttaagctgcacgtcttcctctttcaggaagttctggtcatcacccgtgcggtcactcataatgaacagctgtgttatcaactgtatcggcagccgattcctgttaaggacctgctgcttgaagacctccaggacggggaagtgagattaggtggcagcctccggggagcattttcgaataacgagagaatcaagaatttcttcagagtatccttcaagaatggcagtcagtcgcagactcattccctgcaggccaacgacacattcaataaacaacaatggctaaactgtattcggcaggcaaaagagacggttctttgtgccgcaggacaggctggggtcctcgattctgagggctcttttctcaatcccaccacaggatccagggagctccagggagaaactaagctcgagcagatggatcagtcagacagcgaaagtgattgtagcatggacacgtccgaagtaagcctggactgtgaacggatggagcagacagactcttcgtgtggcaattcaaggcatggcgagtctaatgtgtag

SEQ ID NO: 46432 - DNA, 3992 bp, Artificial Sequence
  derived and/or modified sequence
gcagaagagctgtcagatctttcccttcagcacttaaatcattgtcacgcaatggctttcatcttgggagattcatcctctgcattttggaactgagccttcctagtgttctgagagttttctgctgtctgttcagcttagcacgctaagaagctggagaggtacccagcagcctggttgcattctccgtcttggaaaagtatttaactgctttgagaaatcatggaatcgtttctggccacattgtgagattgtattgaattttctttttaagtttttaaatttttatatgcaaatgctggaaagcttggagacagtctatttcaaagaaggctgttgatttctgagactggcaggggcataaaatgacatgagagtgtctcagcaggattccaaattcacgaaagatttttccaggcacctactatgttcagaacggggatgcagaaatatcctggagaatctgaagttctgccttaaccctcgaaactttgaaagcaatggctgaaaaggaaagatgaatacctagaggctccctctggaaatgattgaggtttgccaccacaattggctactttggctttgcccatcaaaatttggtatcttcatgtgctgtctagcatctactacaggtcagatggagcttaggaggacaagggagcctagtaataaacgggtcaaacccctttcccgagtcacgtcgctagcaaacctcatcccgcccgtgaaggccacgccattaaagcgcttcagtcaaaccctgcagcgctccattagcttccgcagtgagagccgccctgacatcctcgccccccgaccctggtccagaaatgccgccccctcgagcacgaaacggagagatagcaagctgtggagtgagaccttcgatgtgtgcgtcaatcagatgcttacatccaaggaaatcaaacgtcaggaggcgatctttgagctttcccaaggagaagaagacttgatagaagacttgaaattagcaaaaaaggcctatcatgaccccatgctgaaactctccataatgacagaacaagagttgaatcaaatttttggaacactggactctctaattcctctacatgaagagctccttagtcagcttcgagatgttaggaagcctgatggctcgactgaacatgttggtcccatcctcgtgggctggctcccttgcctcagctcctatgatagctactgcagcaatcaagtagccgccaaagctctgctggaccacaaaaagcaagatcaccgagtccaggatttcctacagcgatgtttagaatccccctttagccgcaaactagatctctggaatttcctcgatattccaagaagccgcctggtaaaataccctctgcttctccgagaaatcttgaggcacacaccaaatgataatccagatcagcagcacttggaagaagctataaatatcattcagggaattgtggcagaaatcaacaccaagactggtgaatctgaatgccgctattataaagagcggcttctttacttggaagaaggccagaaagactccctgatcgacagctctcgagtcttgtgttgtcatggtgaactgaagaacaatcggggcgtgaaactgcatgttttcctgttccaagaagtgcttgtgatcactcgagccgtcacccacaatgagcagctttgctaccagctgtaccgtcagccaatccccgtgaaagacctcctgctggaagacctccaggatggagaagtgaggctgggtggctccctgcgaggggcattcagcaacaatgagagaattaaaaacttcttcagagtcagtttcaaaaatggatcccaaagtcagacccactcgctacaagccaatgacactttcaacaaacagcagtggcttaactgtattcgtcaagccaaagaaacagttttgtgtgctgccgggcaagctggggtgcttgactccgagggatcgttcctaaatcccaccaccgggagcagagagctacagggagaaacaaaacttgagcagatggaccaatcggacagtgagtcagactgtagtatggacacgagtgaggtcagcctcgactgtgagcgcatggaacagacagactcttcctgtggaaacagcaggcacggtgaaagtaacgtctgacagaagcatgtgcacttcgggaagcaggcctgcatcttacctgtacagtatttgcattccacagatggaacggtttggagaagcactttttcatacttttgtgaaagtatacatgttggcccagtctctcgtatctgtacctttgtccctagtactgtaactgccaatctgtctgtgtaagctggaatctgtggcaactattaccctgtgttgtatttcccaagtgtctggatggatggagaggtactcaaacaagttactttcagttgtcctgctggattttaaaaaaatagaaaaagaatctcaaaactactgttttacatagattgtttgaagagtccttcctcttgtgcttctgtaccactttcccagctcttagatgtggtagctaaaggcacggaatttagacggccttgtaaatagggcatgaggaactcatctgtgtattgggatggtattagagagagaatcaggaaagaccaactcatgaagtgaacttggtttgatcttactcaactagaaagcttgaaaacatccctggggattctgaaggcttaattttgcaaaggaggatgcattgtctgaactttgcaacttcatccagtgcaagtttgatgcaagaatgtattaggacataaaatagaggctgaccttaaaagggccaggacagaagcggctgccagctctgaatctttaactgaaatgcacatggcaccaggaggtgtctctcatagttggttgctagcctaaaacatcagaatagaacccaaagggcttaggaaggcctgccaggataacaagaaggccctgtattcattgtgtttcatctgcctaggcctactcattattttagagaatgaatgaagcaacaaggaagagagaccatgactctatcgatgacactgtttatagaaacacaggagaggaagaatttggaatgaaaagcacttcgtcagaaccttctgtgggagccattgagagaaaagcatggtccagtgccttctgagaaaggccagagctttgggctttcctgctctgcttttgggtcgtcaatttgccatctctggttctgtgctataatcagaattgtaattatgttctccagaggccaatttcattaactctgattaattagaatcagctagccagattagtaacctctttgtccagccttgatttacagtgcagggtaaagtgcagaccttaaaaacagctaagtacctagaagagctccctgcaagtgtaaatattaaggatgacctgtgcaaaattatacccacaccagcactagtggtaattattctaaattattgccaaaaagttttttttaatctgtctttcaagtttacagaaaagaaagcagtaaatgcattgatgtcattttattatgtacatatatcatgtgcattcaagctgtgtgacaagatatatcaatataaaaacaaggtatatactttattattttttgaaaacaaggatattgtgatcaattttaccctgtaaaacatatttctgtatttataggtcttaaacatgatgaattttttctattacaagtttatttaaaactgctttctcaagtcgttattgatacagcaagtgaacctgctgcagacagaagcagaggaaagccaagaacagcctttattggtgaagaaaagaatgaatgattctttgtaggcgccatcagccacttttagaagccatcagccagtgtgttgggaaaagaggtttgtcaagtgttggcctatgggaaggtggtcaatgaatgttttgatgaaatgaatgtttttgtataatggccttaaacttttctggaagtatttcaaataaattacattattaagtc

SEQ ID NO: 46433 - DNA, 1599 bp, Artificial Sequence
  derived and/or modified sequence
atgatcgaggtgtgccaccacaactggctgctgtggctgtgccccagcaagttcggcatcttcatgtgctgcctggccagcaccaccggccagatggagctgagaagaaccagagagcccagcaacaagagagtgaagcccctgagcagagtgaccagcctggccaacctgatcccccccgtgaaggccacccccctgaagagattcagccagaccctgcagagaagcatcagcttcagaagcgagagcagacccgacatcctggcccccagaccctggagcagaaacgccgcccccagcagcaccaagagaagagacagcaagctgtggagcgagaccttcgacgtgtgcgtgaaccagatgctgaccagcaaggagatcaagagacaggaggccatcttcgagctgagccagggcgaggaggacctgatcgaggacctgaagctggccaagaaggcctaccacgaccccatgctgaagctgagcatcatgaccgagcaggagctgaaccagatcttcggcaccctggacagcctgatccccctgcacgaggagctgctgagccagctgagagacgtgagaaagcccgacggcagcaccgagcacgtgggccccatcctggtgggctggctgccctgcctgagcagctacgacagctactgcagcaaccaggtggccgccaaggccctgctggaccacaagaagcaggaccacagagtgcaggacttcctgcagagatgcctggagagccccttcagcagaaagctggacctgtggaacttcctggacatccccagaagcagactggtgaagtaccccctgctgctgagagagatcctgagacacacccccaacgacaaccccgaccagcagcacctggaggaggccatcaacatcatccagggcatcgtggccgagatcaacaccaagaccggcgagagcgagtgcagatactacaaggagagactgctgtacctggaggagggccagaaggacagcctgatcgacagcagcagagtgctgtgctgccacggcgagctgaagaacaacagaggcgtgaagctgcacgtgttcctgttccaggaggtgctggtgatcaccagagccgtgacccacaacgagcagctgtgctaccagctgtacagacagcccatccccgtgaaggacctgctgctggaggacctgcaggacggcgaggtgagactgggcggcagcctgagaggcgccttcagcaacaacgagagaatcaagaacttcttcagagtgagcttcaagaacggcagccagagccagacccacagcctgcaggccaacgacaccttcaacaagcagcagtggctgaactgcatcagacaggccaaggagaccgtgctgtgcgccgccggccaggccggcgtgctggacagcgagggcagcttcctgaaccccaccaccggcagcagagagctgcagggcgagaccaagctggagcagatggaccagagcgacagcgagagcgactgcagcatggacaccagcgaggtgagcctggactgcgagagaatggagcagaccgacagcagctgcggcaacagcagacacggcgagagcaacgtgtag

SEQ ID NO: 46434 - protein, 769 aa, Artificial Sequence
  derived and/or modified sequence
MEGLTLSDAEQKYYSDLFSYCDIESTKKVVVNGRVLELFRAAQLPNDVVLQIMELCGATRLGYFGRSQFYIALKLVAVAQSGFPLRVESINTVKDLPLPRFVASKNEQESRHAASYSSDSENQGSYSGVIPPPPGRGQVKKGSVSHDTVQPRTSADAQEPASPVVSPQQSPPTSPHTWRKHSRHPSGGNSERPLAGPGPFWSPFGEAQSGSSAGDAVWSGHSPPPPQENWVSFADTPPTSTLLTMHPASVQDQTTVRTVASATTAIEIRRQSSSYDDPWKITDEQRQYYVNQFKTIQPDLNGFIPGSAAKEFFTKSKLPILELSHIWELSDFDKDGALTLDEFCAAFHLVVARKNGYDLPEKLPESLMPKLIDLEDSADVGDQPGEVGYSGSPAEAPPSKSPSMPSLNQTWPELNQSSEDTAIVHPVPIRMTPSKIHMQEMELKRTGSDHTNPTSPLLVKPSDLLEENKINSSVKFASGNTVADGYSSSDSFTSDPEQIGSNVTRQRSHSGTSPDNTAPPPPPPRPQPSHSRSSSLDMNRTFTVTTGQQQAGVVAHPPAVPPRPQPSQAPGPAVHRPVDADGLITHTSTSPQQIPEQPNFADFSQFEVFAASNVNDEQDDEAEKHPEVLPAEKASDPASSLRVAKTDSKTEEKTAASAPANVSKGTTPLAPPPKPVRRRLKSEDELRPEVDEHTQKTGVLAAVLASQPSIPRSVGKDKKAIQASIRRNKETNTVLARLNSELQQQLKDVLEERISLEVQLEQLRPFSHL

SEQ ID NO: 46435 - DNA, 2310 bp, Artificial Sequence
  derived and/or modified sequence
atggagggcctgaccctgagcgacgccgagcagaagtactacagcgacctgttcagctactgcgacatcgagagcaccaagaaggtggtggtgaacggcagagtgctggagctgttcagagccgcccagctgcccaacgacgtggtgctgcagatcatggagctgtgcggcgccaccagactgggctacttcggcagaagccagttctacatcgccctgaagctggtggccgtggcccagagcggcttccccctgagagtggagagcatcaacaccgtgaaggacctgcccctgcccagattcgtggccagcaagaacgagcaggagagcagacacgccgccagctacagcagcgacagcgagaaccagggcagctacagcggcgtgatcccccccccccccggcagaggccaggtgaagaagggcagcgtgagccacgacaccgtgcagcccagaaccagcgccgacgcccaggagcccgccagccccgtggtgagcccccagcagagcccccccaccagcccccacacctggagaaagcacagcagacaccccagcggcggcaacagcgagagacccctggccggccccggccccttctggagccccttcggcgaggcccagagcggcagcagcgccggcgacgccgtgtggagcggccacagccccccccccccccaggagaactgggtgagcttcgccgacaccccccccaccagcaccctgctgaccatgcaccccgccagcgtgcaggaccagaccaccgtgagaaccgtggccagcgccaccaccgccatcgagatcagaagacagagcagcagctacgacgacccctggaagatcaccgacgagcagagacagtactacgtgaaccagttcaagaccatccagcccgacctgaacggcttcatccccggcagcgccgccaaggagttcttcaccaagagcaagctgcccatcctggagctgagccacatctgggagctgagcgacttcgacaaggacggcgccctgaccctggacgagttctgcgccgccttccacctggtggtggccagaaagaacggctacgacctgcccgagaagctgcccgagagcctgatgcccaagctgatcgacctggaggacagcgccgacgtgggcgaccagcccggcgaggtgggctacagcggcagccccgccgaggccccccccagcaagagccccagcatgcccagcctgaaccagacctggcccgagctgaaccagagcagcgaggacaccgccatcgtgcaccccgtgcccatcagaatgacccccagcaagatccacatgcaggagatggagctgaagagaaccggcagcgaccacaccaaccccaccagccccctgctggtgaagcccagcgacctgctggaggagaacaagatcaacagcagcgtgaagttcgccagcggcaacaccgtggccgacggctacagcagcagcgacagcttcaccagcgaccccgagcagatcggcagcaacgtgaccagacagagaagccacagcggcaccagccccgacaacaccgccccccccccccccccccccagaccccagcccagccacagcagaagcagcagcctggacatgaacagaaccttcaccgtgaccaccggccagcagcaggccggcgtggtggcccacccccccgccgtgccccccagaccccagcccagccaggcccccggccccgccgtgcacagacccgtggacgccgacggcctgatcacccacaccagcaccagcccccagcagatccccgagcagcccaacttcgccgacttcagccagttcgaggtgttcgccgccagcaacgtgaacgacgagcaggacgacgaggccgagaagcaccccgaggtgctgcccgccgagaaggccagcgaccccgccagcagcctgagagtggccaagaccgacagcaagaccgaggagaagaccgccgccagcgcccccgccaacgtgagcaagggcaccacccccctggcccccccccccaagcccgtgagaagaagactgaagagcgaggacgagctgagacccgaggtggacgagcacacccagaagaccggcgtgctggccgccgtgctggccagccagcccagcatccccagaagcgtgggcaaggacaagaaggccatccaggccagcatcagaagaaacaaggagaccaacaccgtgctggccagactgaacagcgagctgcagcagcagctgaaggacgtgctggaggagagaatcagcctggaggtgcagctggagcagctgagacccttcagccacctgtag

SEQ ID NO: 46436 - DNA, 2310 bp, Artificial Sequence
  derived and/or modified sequence
atggaaggactcaccttaagcgatgctgagcagaagtattattccgatctgttttcgtactgtgatattgagagcaccaagaaggtggttgtcaatggccgggttctggagctctttcgtgctgctcagctgcccaacgatgtggtgctgcagatcatggagttatgtggcgctacgcggttagggtactttggccggtcacagttctatatcgcactgaagttggtcgccgttgctcagtccggcttcccactacgtgtagagtctatcaacacagttaaagatctgccactgcccagatttgtggcatctaaaaacgaacaggagagtaggcacgcggcgagctattctagtgactccgagaatcaggggtcttacagcggtgtgatccctccacctcctggcaggggtcaagtgaagaaaggctccgtttcccacgatactgtccaaccaaggacaagcgcagacgcgcaagaaccagccagccctgtggtgtcaccgcaacagagcccacccacatcaccccacacctggcggaaacacagtcggcacccaagcggcggcaactcggagcggcctttagcaggtccgggaccgttctggtctccgtttggggaggcccagtctgggtcttcagccggcgacgctgtctggtctggccacagtccccctcccccacaggagaactgggtgtccttcgccgacaccccccctacctccaccctactcactatgcacccagcttctgtgcaggatcagaccaccgtcaggaccgtggcgagcgcaactaccgcaatcgaaatccgaaggcagagttctagctatgacgacccgtggaagattacagatgagcagaggcaatactatgttaatcagtttaaaacgattcagcctgatctgaacgggtttataccgggctcagccgcaaaagagttctttacaaaaagcaagcttcccatacttgagttgtcccatatctgggagctcagtgacttcgacaaggacggcgccctcacactagacgagttttgtgccgctttccatctggtggtggcgagaaaaaatgggtatgacttgccggagaaattaccagagtctcttatgcccaaattgattgatctggaggatagtgcagacgtcggcgaccagcctggtgaagtcggctattcgggcagtcctgcggaggcccccccctctaagtcgccttccatgccatcattgaaccagacatggcccgagttgaatcaatcctctgaggacaccgcaattgtccatcctgttcctatcaggatgacacccagcaagatccatatgcaggaaatggagctgaagcgaacggggtctgatcacactaacccgaccagtccgcttctggtgaagccctcggatttgctggaggagaataagatcaacagtagcgtgaagtttgcctctggaaataccgtggctgacggttattcttcgtctgactcctttacgtcggacccggagcaaatcggatccaacgttacccgacaacgaagccacagcggtacctctcccgacaacacggcccctcctcccccaccgcccaggccacagccatcccactccagatcttcctctttggacatgaataggacattcacagttacaacggggcagcagcaggccggagtagttgcccacccccccgcggtcccccctaggccccagccgtcgcaagcacctggccctgctgttcataggccagtggacgccgacggcctcattacccatacctctacctccccacaacagatccctgagcagcccaacttcgccgacttctctcaatttgaagtgttcgccgctagcaatgttaacgatgagcaagatgacgaagcagaaaagcatccagaagttctgcccgctgagaaagcgagtgaccctgccagcagtctccgggtggcaaaaaccgactcaaagacggaggagaaaaccgctgcgagtgctccggccaacgtgagcaagggcaccacgcccttggcccctccacctaaacccgtgagacgcaggctgaaatccgaagacgagctgaggccagaagtagacgaacacacccagaaaaccggagtgttggcagccgttcttgcctcccagccttctatcccgcggtccgtcggcaaagataaaaaggcaattcaggcctctatccgccgcaataaggagacaaacacagtgctggctaggttgaacagcgaactccaacagcagctcaaggatgtcctggaggagagaatcagccttgaggtgcagctggaacaactcaggcccttttcacatttgtag

SEQ ID NO: 46437 - DNA, 2310 bp, Artificial Sequence
  derived and/or modified sequence
atggagggcctgaccctgagtgatgctgagcagaagtactacagcgacctcttctcctactgtgacatcgagagcaccaagaaggtggtggtgaatggccgggtgctggagctgttccgggccgcccagctgcccaatgatgtggtgctgcagatcatggagctgtgtggggccacccggctgggctacttcggccgcagccagttctacatcgccctgaagctggtggccgtggcccagagcggcttccccctgcgggtggagagcatcaacacagtgaaggacctgcccctgcccaggtttgtggccagcaagaatgagcaggagagcagacatgctgccagctacagcagtgacagcgagaaccagggcagctacagcggggtcatccccccacctcctggccggggccaggtgaagaagggctctgtgtcccatgacacagtgcagcccaggaccagcgcagatgcccaggagcccgccagccctgtggtgagcccccagcagagcccccccaccagcccccacacctggaggaagcacagccgccaccccagcggcggcaacagcgagcggcccctggccggccctggccccttctggagcccctttggagaggcccagagcggcagcagcgctggagatgctgtgtggagcggccacagccccccaccaccccaggagaactgggtgtcctttgctgacaccccacccaccagcaccctgctgaccatgcacccagcctctgtgcaggaccagaccaccgtgaggacagtggccagcgccaccacagccatcgagatccggcggcagagcagcagctatgatgacccctggaagatcacagatgagcagaggcagtactacgtgaaccagttcaagaccatccagcctgacctgaatggcttcatccctggcagcgctgccaaggagttcttcaccaagagcaagctgcccatcctggagctgagccacatctgggagctgagtgactttgacaaggatggagccctgaccctggatgagttctgtgccgccttccacctggtggtggccaggaagaatggctatgacctgcctgagaagctgcctgagagcctgatgcccaagctgattgacctggaggacagcgcagatgtgggggaccagcccggggaggtgggctacagcggcagccctgctgaggccccacccagcaagagccccagcatgcccagcctgaaccagacctggccagagctgaaccagagcagcgaggacacagccatcgtgcaccctgtgcccatccgcatgacccccagcaagatccacatgcaggagatggagctgaagaggacaggcagtgaccacaccaaccccaccagccccctgctggtgaagcccagcgacctgctggaggagaacaagatcaacagctctgtgaagtttgccagcggcaacacagtggctgatggctacagcagcagtgacagcttcaccagtgaccctgagcagatcggcagcaatgtgacccggcagaggagccacagcggcaccagcccagacaacacagcccctcctcctcctccaccccggccccagcccagccacagccgcagcagcagcctggacatgaacagaaccttcaccgtgaccaccggccagcagcaggccggcgtggtggcccaccccccagctgtgcccccccggccccagcccagccaggcccctggccctgctgtgcacaggcctgtggatgctgatggcctcatcacccacaccagcaccagcccccagcagatccctgagcagcccaactttgctgacttcagccagtttgaggtgtttgctgccagcaatgtgaatgatgagcaggatgatgaggccgagaagcaccctgaggtgctgcctgctgagaaggccagtgaccctgccagcagcctgcgggtggccaagacagacagcaagacagaggagaagacagctgccagcgccccagccaacgtgtccaagggcaccacccccctggcccccccacccaagcctgtgagaagaaggctgaagtcagaagatgagctgcggcctgaggtggatgagcacacccagaagacaggagtgctggccgctgtgctggccagccagcccagcatccccaggtctgtgggcaaggacaagaaggccatccaggccagcatcagaagaaacaaggagaccaacacagtgctggcccggctgaacagcgagctgcagcagcagctgaaggatgtgctggaggagcgcatcagcctggaggtgcagctggagcagctgcggcccttcagccacctgtag

SEQ ID NO: 46438 - DNA, 2310 bp, Artificial Sequence
  derived and/or modified sequence
atggagggcctgaccctgagcgacgccgagcagaagtactacagcgacttgtttagttactgtgatattgagtctacaaaaaaggtcgtggtgaacggtcgagttctggagctgtttcgggcagctcagctgcctaacgatgtggtgctgcagattatggagctttgcggggccactaggcttgggtactttggacgctcacaattctacatagctttgaagctggtcgctgtggcccagagtggattccctctaagggtggaatcaatcaataccgtgaaggacctgcccttaccccgcttcgtcgccagcaagaatgagcaagagagtcggcatgcagcatcttattcaagcgactccgaaaatcaagggagctattccggtgtcatcccccctcctccagggcgtggacaggttaagaaaggttcggtgtctcacgataccgtgcagccgcggacttccgccgacgcacaggaacctgccagccccgtagtgtcacctcagcagtctccccctacctccccacacacatggaggaagcatagtagacacccctctggaggcaattccgagcgccccttggctggccctggaccgttctggtccccatttggtgaagcgcagagcggatcgtccgcaggtgacgcggtgtggtctggacactccccccctcctcctcaagaaaattgggtgagttttgcagatacacctccaacatcaactcttctcaccatgcaccctgcctcggttcaggatcaaacaacagtaaggacagttgcatccgcaacaaccgcaattgaaatacgtaggcagtcttcctcctatgacgatccgtggaaaataacagacgagcagcggcaatattatgtgaaccagttcaagactattcagccggacctgaatggatttatccctgggagtgctgctaaggagttcttcaccaaatccaagcttcccatcctcgaactgtctcacatctgggagctctctgattttgacaaagacggggctctgactctggatgagttctgcgctgccttccacctcgtggttgcccgtaagaatgggtatgacctacccgaaaaactgcctgagagcttaatgccgaagctgattgatctagaggatagcgcggacgtcggagaccagcctggagaggtgggctactccggttcccctgctgaggcccccccatccaaaagcccgagcatgccttctttgaatcagacttggccagaactaaatcagtcctctgaggacaccgccatcgttcaccccgtcccgatacgtatgacaccatccaagatccacatgcaggagatggaacttaagcggactggctcagaccatactaatccaaccagccccctcctggttaagccgagcgacctgctggaggaaaacaaaattaattccagtgttaagttcgccagcggcaatacagtggctgatggttactccagttcagacagctttactagcgacccagaacagatcggctcaaatgtgacaagacagcggtcacacagcgggacatcacctgacaataccgctcccccacctccaccacctagaccgcaaccaagccattcacggtccagttcactggacatgaaccggacctttacagtaacaacggggcaacagcaggcaggagtggttgctcaccccccagctgtgccaccccgacctcagcctagccaggcccccgggcctgctgtgcacaggcccgtggatgcagacggcctgatcactcatacttcaaccagtccacagcagattcctgaacagcccaattttgcggacttcagccaatttgaggtcttcgccgcctcaaacgtcaatgatgaacaggacgatgaggccgaaaaacaccctgaagtcctgcccgcagagaaggcatccgatccggcctcaagcttgagggtggccaagacagactctaagaccgaagaaaaaactgcggcaagcgctcccgcaaacgtgagcaagggaaccacacccttggcccccccaccaaagcctgtcagacggagattgaaatccgaagacgagctgcgccctgaggtggacgagcacactcagaaaacaggagtcctggcagcagttctcgcatcccagccttcgattccaagaagcgtgggaaaggacaagaaggctattcaagcctccatacggcggaacaaagagactaataccgtgctagcccgccttaactctgagttacagcaacagctcaaggacgtgttggaggaaagaattagcctggaggtgcagctggaacagctcaggcctttcagtcacctgtag

SEQ ID NO: 46439 - DNA, 2310 bp, Artificial Sequence
  derived and/or modified sequence
atggaaggactcaccctgtcagatgccgaacagaaatattacagcgatcttttttcttactgtgacatagaaagtaccaagaaggtcgtcgtgaacgggagggtgctggagttattccgagcagcccagctgcccaacgatgtcgtgcttcagataatggaactgtgcggggcaaccaggcttggatacttcggcaggagccagttctacatcgcactgaagctggttgccgttgcgcaaagcgggttcccgctgcgagttgagagcatcaacaccgttaaagaccttccgttgcccagattcgtggcgtcgaagaatgagcaggagtcacgtcatgcggcttcatacagttcagacagtgagaatcagggaagttactcaggcgtgattcctcctcctcctgggaggggtcaagtcaaaaaagggtctgtgtctcatgacaccgtgcagccgagaacgtcggctgatgctcaggagcccgctagtccagtggtctccccccagcagagtccaccgacatccccacacacatggcgtaagcacagccggcatcctagtggtggtaacagcgagaggcctctggctgggccagggcctttctggtcaccttttggcgaggcccagtcgggaagctccgcaggcgacgctgtttggtctgggcattccccgccaccgcctcaggagaactgggttagcttcgccgatacaccacccacaagtacactcctgaccatgcatcccgcttccgttcaagatcagacaaccgtaaggaccgtggccagtgccacaaccgccatagaaatcaggcgtcagagcagctcatatgacgatccatggaagattactgacgaacagcggcagtattatgtgaatcaatttaagaccatccaacccgatctgaatgggttcattccaggcagcgctgctaaagaattcttcacaaaaagtaagctgccgatcctggagcttagtcatatctgggaactgagcgactttgacaaggatggagctctcacactagacgaattctgtgcagcctttcacctcgtggttgcccgtaaaaatggctacgacctgcccgagaaactccctgaatccttaatgcctaagctcatcgacctggaggactcagccgatgtaggcgaccaacccggtgaggtcggctatagtggatcacccgcagaggcgcctcctagtaagagtccctccatgccttccctcaatcagacttggccggaattaaaccaatcaagcgaagacaccgccatcgtacatcccgtcccgattagaatgacaccgtctaaaattcacatgcaggagatggagcttaaaagaaccggctccgatcacacaaatccgacgtctccgttgttggtgaaaccgagtgatctgctggaagagaataagattaatagctccgtcaagttcgcaagcggcaatacagttgcagatggctacagctccagcgattcgtttacttctgatcccgagcagatcgggagcaatgttactcgacagcgctcgcattctggtacctctcccgacaacaccgcgccaccaccccctcctcctagacctcagccgtctcactcacgaagctcctctttggacatgaatagaacatttactgttaccacagggcaacagcaggcaggagtcgtcgcgcacccaccggcagtgcctcctaggcctcagccctcccaggcccctggcccagcagttcaccggcctgtagacgcggacggcctgatcacacacacgtctacatcaccccagcagatccccgagcagcccaactttgctgatttctcacagttcgaggtttttgctgcttctaacgtgaatgatgagcaagacgacgaggcagagaaacatcccgaggtactgcccgcagagaaggcctccgacccagctagctccctgcgcgtggctaaaaccgatagtaagaccgaggagaagaccgccgctagcgcgcctgctaacgtttctaagggcactaccccgctcgcaccgcctcctaagccggtccgcagacggctcaagtcagaagatgaactgagacctgaggtggatgaacatactcagaagactggggtgctggccgcagtcctcgcttcccagccctccattccccgtagtgttgggaaagataaaaaggccatccaggcaagtattcgaaggaacaaggaaaccaacacggtgctggcccgtctcaatagtgaacttcaacagcagctgaaagacgtgctggaggagcgtatcagtttagaggtgcagctggaacagctgcggccattctcacacctttag

SEQ ID NO: 46440 - DNA, 2607 bp, Artificial Sequence
  derived and/or modified sequence
ccgggccacgcgcagcccctgccggcccaggttcctggggccgggccccgagtagtgcatgcggggcggggcggccgtgagccggaggcgaagatggaaggcttaacgctgagcgatgcggagcagaaatactattcagatctcttctcctactgcgacattgagagcaccaagaaggtggtggtcaacgggcgggtgctggagctgttccgggccgcgcagctgccgaacgacgtggtcctacagatcatggagctttgtggtgcaacaagacttggttattttggaagaagtcagttctacattgctttgaaacttgtagctgttgcccagtctggtttccctttaagagtggaaagtataaatacagtaaaggaccttcctctgccaagatttgttgcttcaaagaatgaacaggaatctcgccatgcagcctcatattcttcagattctgaaaatcaagggtcgtattctggtgtaattcccccaccacctggcagggggcaagtgaaaaagggatccgtaagccatgatacggttcagcctcgtacatctgcagatgcacaggaacctgcatccccagtagtttcaccacagcaatccccaccaacttctccacacacatggaggaagcacagccgtcatcccagcggtgggaatagtgagaggcctctcgcgggacctgggccattttggtctccctttggtgaagcacaatcaggttcttctgctggtgatgcagtgtggtcagggcattccccacctccacctcaagaaaactgggtcagttttgcagatactccaccaaccagtactcttttaaccatgcatcctgcttctgtccaggaccagacaacagtacgaactgtagcatcagctacaactgccattgaaattcgtaggcaatccagtagttatgatgatccctggaaaataacagatgaacaaagacagtattatgtaaatcagtttaaaaccattcagcctgatctaaacggatttattccaggatctgcagctaaagagttttttacaaaatcaaaacttcctattcttgaactttctcatatttgggaactctcagactttgataaagatggtgcattgacactggatgagttttgtgctgcttttcatctggtggttgctaggaagaatggctatgatttaccagaaaaacttcctgaaagcttaatgcccaaactgattgatttggaagattcagcagatgttggggatcagccaggtgaggtaggttattcaggctctcctgctgaagctcctccaagcaagtcaccatcgatgccatcactaaaccagacatggcctgagctgaatcagagcagtgaggatactgctattgttcatccagttcccattcgtatgactccaagcaaaatccacatgcaggaaatggaacttaaaagaactggcagcgatcatacaaatcccactagcccattacttgtgaaaccatctgaccttttagaagaaaataagataaattcatcggtgaaattcgcttctggtaatactgtagcagatggttacagtagttcagactcttttacttctgacccagaacagatcgggagcaatgtaactcgtcaaaggtctcattcaggaacgtcgcctgataacactgcaccaccacctccccctccaaggccacagccctctcattctagatcatcatctttagatatgaatcggacctttacagtcaccacaggacaacaacaggctggagttgttgcccatcctcctgcagtgcctccaagaccacagccctcacaggctcctggtcctgctgtgcatcgcccagtggatgccgatggcctcataactcacactagtacctcacctcagcagataccagagcaaccaaattttgcagatttcagtcagtttgaagtatttgctgcatcaaatgtaaacgacgaacaagatgatgaagccgagaaacatccagaagtcctgccggctgaaaaagcttctgatcctgcaagttctcttcgagttgccaaaacagatagtaaaactgaagaaaagacagctgctagtgctcctgccaatgtgagcaaaggcacaacaccacttgctccaccacctaaacctgttcgaagaagattaaaatcagaagatgaattaaggccagaagttgatgaacatacacaaaagacgggtgtcttagctgctgttcttgcatcacaaccttctattcccagatctgttgggaaagataagaaagctattcaggcatcaattagacgtaataaggaaaccaacaccgttttggccagattgaatagcgaattgcagcaacaattaaaggatgttcttgaggagagaatttccctggaagttcaactggaacaacttcgaccattctctcacctataagccaattgccgttaactgtgaacatacttgtttttaagtggttttgggttcaaagccaatttggagacctagacattcagctcactgcttaactcaacattaaattttatgattctgttttgccctatatgttcaccgttgtatttaagtatcttttattttttaatttcgacaataaaaaggtcaggatggcgttttctggag

SEQ ID NO: 46441 - DNA, 1673 bp, Artificial Sequence
  derived and/or modified sequence
gcaacacaaaacttaaaacacagtattatttagcattcggatgtacatgaactaggatacttatgagaaacccaactgcgtcaaaagtatgacattgtggaaaaaatgaactcaaatatatcaaaatgcacaaagcactagtcttcctccattaccgcttagaaagatatgattgtttctccatttacaaaatagaatcaggacaatttaaattttttatattttgcatgcaaaacactgcaattgcttatttatgtaggagggcactctcaccagcttcttctatacacaattgagtatacaatattgcatggaagaaaacagcagctcaactgaaatattagaaaaaaaaatcaaacagatacatacagatttaaaatccagtacttgggaaaagatatcaatgaataaaaggcctacttgtttgcagcttccacacactgcacctacctactacctctcttccatgcttaactgggtttagaaaggtgagctatgcgtagaagaactacttgggatattcaagtgctgtatttgaacgataagcctatagataacagtctgaagctgcaagggagactttgttagtacactactataaacaggtaaactacctgtttgtacttgatatagtgcatatgaaatgactgatttaatacaaaactacagaacatgcaaaattttttctgagatgttaagtattacttcagtggagaacaaaacttacttaacctttcgctaatgcatgtagtaccagaaagcaaacatggttttagcttcctttactcaaaatatgaacattaagtgttgtgaatttgtctgccaagtggttcagaaatacattataaataacctagttaaaaaaagaaactgtgaaccatcttggtcagtctattctattctatgtttatatgttattttctcaagcaatcgcttcataattatagggtttacaaaaaggtcgagaaagaaaagcgaaggcgaaatagcctctactgcattacaagcaacatcaggataaactgtacaaagaatcacatggtttccataccatgaatgtagaaagcagaccaggtttaggaatgataggacaatgcactctctgcaatagccaactacaacaaaacactttgaaagtaaaggtgaaaattatataaagggaaaaattcaagcctttaaatagcattatgtcaagaggtgaaaacaaaggtatcaaaacaccctgttgcactacgttgatagttatagactgatagagtgccctccattttcaatgaggatgtctccatattttagttcagtgatgtaataaagtactgattactgatttttaacccaactcttaataggctgcattaagacagcaaaattagccaaatacaacaaagtatttaaaccactactttgtgattgttttcttggatgtaggaaaattacagggttaggctagttgtaagtgaaaaagccacaggattaaaaaaaggactcatggggaaaaatacacacacacacccacacacacctatacacccacacacccacatgccaaccaaccaaccaaccagcaactgatcagtaaaacttgttattaaccagggtgactgttcttgataatagattaaccctgctgtagaatgctatgttgcctttaaaaaccaattcaattattatcc

SEQ ID NO: 46442 - protein, 1545 aa, Artificial Sequence
  derived and/or modified sequence
MQREREAEIRQLLRWKEAEQRQLQQLLHRERDGVVRQARELQRQLAEELVNRGHCSRPGASEVSAAQCRCRLQEVLAQLRWQTDGEQAARIRYLQAALEVERQLFLKYILAHFRGHPALSGSPDPQAVHSLEEPLPQTSSGSCHAPKPACQLGSLDSLSAEVGVRSRSLGLVSSACSSSPDGLLSTHASSLDCFAPACSRSLDSTRSLPKASKSEERPSSPDTSTPGSRRLSPPPSPLPPPPPPSAHRKLSNPRGGEGSESQPCEVLTPSPPGLGHHELIKLNWLLAKALWVLARRCYTLQEENKQLRRAGCPYQADEKVKRLKVKRAELTGLARRLADRARELQETNLRAVSAPIPGESCAGLELCQVFARQRARDLSEQASAPLAKDKQIEELRQECHLLQARVASGPCSDLHTGRGGPCTQWLNVRDLDRLQRESQREVLRLQRQLMLQQGNGGAWPEAGGQSATCEEVRRQMLALERELDQRRRECQELGTQAAPARRRGEEAETQLQAALLKNAWLAEENGRLQAKTDWVRKVEAENSEVRGHLGRACQERDASGLIAEQLLQQAARGQDRQQQLQRDPQKALCDLHPSWKEIQALQCRPGHPPEQPWETSQMPESQVKGSRRPKFHARPEDYAVSQPNRDIQEKREASLEESPVALGESASVPQVSETVPASQPLSKKTSSQSNSSSEGSMWATVPSSPTLDRDTASEVDDLEPDSVSLALEMGGSAAPAAPKLKIFMAQYNYNPFEGPNDHPEGELPLTAGDYIYIFGDMDEDGFYEGELDDGRRGLVPSNFVEQIPDSYIPGCLPAKSPDLGPSQLPAGQDEALEEDSLLSGKAQGMVDRGLCQMVRVGSKTEVATEILDTKTEACQLGLLQSMGKQGLSRPLLGTKGVLRMAPMQLHLQNVTATSANITWVYSSHRHPHVVYLDDREHALTPAGVSCYTFQGLCPGTHYRVRVEVRLPWDLLQVYWGTMSSTVTFDTLLAGPPYPPLDVLVERHASPGVLVVSWLPVTIDSAGSSNGVQVTGYAVYADGLKVCEVADATAGSTVLEFSQLQVPLTWQKVSVRTMSLCGESLDSVPAQIPEDFFMCHRWPETPPFSYTCGDPSTYRVTFPVCPQKLSLAPPSAKASPHNPGSCGEPQAKFLEAFFEEPPRRQSPVSNLGSEGECPSSGAGSQAQELAEAWEGCRKDLLFQKSPQNHRPPSVSDQPGEKENCYQHMGTSKSPAPGFIHLRTECGPRKEPCQEKAALERVLRQKQDAQGFTPPQLGASQQYASDFHNVLKEEQEALCLDLRGTERREERREPEPHSRQGQALGVKRGCQLHEPSSALCPAPSAKVIKMPRGGPQQLGTGANTPARVFVALSDYNPLVMSANLKAAEEELVFQKRQLLRVWGSQDTHDFYLSECNRQVGNIPGRLVAEMEVGTEQTDRRWRSPAQGHLPSVAHLEDFQGLIIPQGSSLVLQGNSKRLPLWTPKIMIAALDYDPGDGQMGGQGKGRLALRAGDVVMVYGPMDDQGFYYGELGGHRGLVPAHLLDHMSLHGH

SEQ ID NO: 46443 - protein, 1639 aa, Artificial Sequence
  derived and/or modified sequence
MAKDSPSPLGASPKKPGCSSPAAAVLENQRRELEKLRAELEAERAGWRAERRRFAARERQLREEAERERRQLADRLRSKWEAQRSRELRQLQEEMQREREAEIRQLLRWKEAEQRQLQQLLHRERDGVVRQARELQRQLAEELVNRGHCSRPGASEVSAAQCRCRLQEVLAQLRWQTDGEQAARIRYLQAALEVERQLFLKYILAHFRGHPALSGSPDPQAVHSLEEPLPQTSSGSCHAPKPACQLGSLDSLSAEVGVRSRSLGLVSSACSSSPDGLLSTHASSLDCFAPACSRSLDSTRSLPKASKSEERPSSPDTSTPGSRRLSPPPSPLPPPPPPSAHRKLSNPRGGEGSESQPCEVLTPSPPGLGHHELIKLNWLLAKALWVLARRCYTLQEENKQLRRAGCPYQADEKVKRLKVKRAELTGLARRLADRARELQETNLRAVSAPIPGESCAGLELCQVFARQRARDLSEQASAPLAKDKQIEELRQECHLLQARVASGPCSDLHTGRGGPCTQWLNVRDLDRLQRESQREVLRLQRQLMLQQGNGGAWPEAGGQSATCEEVRRQMLALERELDQRRRECQELGTQAAPARRRGEEAETQLQAALLKNAWLAEENGRLQAKTDWVRKVEAENSEVRGHLGRACQERDASGLIAEQLLQQAARGQDRQQQLQRDPQKALCDLHPSWKEIQALQCRPGHPPEQPWETSQMPESQVKGSRRPKFHARPEDYAVSQPNRDIQEKREASLEESPVALGESASVPQVSETVPASQPLSKKTSSQSNSSSEGSMWATVPSSPTLDRDTASEVDDLEPDSVSLALEMGGSAAPAAPKLKIFMAQYNYNPFEGPNDHPEGELPLTAGDYIYIFGDMDEDGFYEGELDDGRRGLVPSNFVEQIPDSYIPGCLPAKSPDLGPSQLPAGQDEALEEDSLLSGKAQGMVDRGLCQMVRVGSKTEVATEILDTKTEACQLGLLQSMGKQGLSRPLLGTKGVLRMAPMQLHLQNVTATSANITWVYSSHRHPHVVYLDDREHALTPAGVSCYTFQGLCPGTHYRVRVEVRLPWDLLQVYWGTMSSTVTFDTLLAGPPYPPLDVLVERHASPGVLVVSWLPVTIDSAGSSNGVQVTGYAVYADGLKVCEVADATAGSTVLEFSQLQVPLTWQKVSVRTMSLCGESLDSVPAQIPEDFFMCHRWPETPPFSYTCGDPSTYRVTFPVCPQKLSLAPPSAKASPHNPGSCGEPQAKFLEAFFEEPPRRQSPVSNLGSEGECPSSGAGSQAQELAEAWEGCRKDLLFQKSPQNHRPPSVSDQPGEKENCYQHMGTSKSPAPGFIHLRTECGPRKEPCQEKAALERVLRQKQDAQGFTPPQLGASQQYASDFHNVLKEEQEALCLDLRGTERREERREPEPHSRQGQALGVKRGCQLHEPSSALCPAPSAKVIKMPRGGPQQLGTGANTPARVFVALSDYNPLVMSANLKAAEEELVFQKRQLLRVWGSQDTHDFYLSECNRQVGNIPGRLVAEMEVGTEQTDRRWRSPAQGHLPSVAHLEDFQGLIIPQGSSLVLQGNSKRLPLWTPKIMIAALDYDPGDGQMGGQGKGRLALRAGDVVMVYGPMDDQGFYYGELGGHRGLVPAHLLDHMSLHGH

SEQ ID NO: 46444 - DNA, 273 bp, Artificial Sequence
  derived and/or modified sequence
atgagccactacggcagctactacggcggcctgggctacagctgcgggggcttcggcggcttgggctatggttatggctgtggctgtggctccttttgtcgcagaggtagcggatgtggctacggaggctatggatacggaagtgggtttggtagctatggatacggatcgggctttggtggttacgggtatggatccgggtttggtggctatggatatggctgctgtagacccagctataatggtgggtacggcttcagcggtttttattag

SEQ ID NO: 46445 - DNA, 387 bp, Artificial Sequence
  derived and/or modified sequence
atgtcctgccatcaatcaccactggtgtttgatgttgggcagtgccgccaacacgacctggccggacagattttgatttaccactcgctgacaccggctggcccactaggacgccctcctgacgtcccacatagtccccacctggccagtccaaccgggagtcggcagcggaccgtaggcggtacatgtgatactgcactctttctgtgttcttgcttctcatcatcttttttcagtttgctggtgacactcttctttttcaccctctcgccgcataagactagaaattttgtgattctgctgatctttctgtacagcgtttgcctgcacacagatggctatctgagagcatctgagctctccttgcccccttccatcatctcctag

SEQ ID NO: 46446 - DNA, 4638 bp, Artificial Sequence
  derived and/or modified sequence
atgcagcgcgagagggaagcagagattcgccagctccttaggtggaaggaggcagaacaacgacagttgcagcaattgctgcatagagaaagagatggagtggtccggcaggcacgcgagctgcagcgccaactggcagaagaacttgtcaacagggggcactgtagcagacccggtgcctccgaagtttcagccgctcagtgtagatgtagactgcaggaagtactggcccagctgaggtggcaaacagacggggagcaggctgcgagaattaggtatcttcaggccgccctggaggtggagaggcagttgtttctaaagtacatcttagctcacttccgcggccatccagccctgtccgggtcgccagatccccaggccgtgcactcactggaggaaccattgcctcagacaagcagcgggagttgccatgcgcctaagcctgcctgtcagctcggtagcctagatagtctgagcgccgaagtgggcgtacgaagccggtcgctggggcttgtgagcagcgcttgcagttcatcaccagacggattgctttccacgcacgcctccagcctggactgttttgctcctgcctgcagccggagtctggattcaacccgctccctgccaaaggcttccaaatccgaagaaagaccctcctccccagacacatctacaccaggctcaagacgcctctcccctcctccttcccccctgccacctcccccaccacctagcgcacatcggaagctgagcaacccacgtggaggagagggctccgagagccaaccgtgtgaagtcctgacacccagcccaccaggtctggggcaccacgaattgataaagcttaactggctgctggcgaaagccttatgggtgctggctagaaggtgctataccctccaggaagaaaacaaacagctccgccgagccggctgcccgtatcaggctgacgaaaaggtgaagagactcaaagtgaaaagggccgaactaactggccttgcgaggagactggccgaccgagcccgcgagttacaagagacaaatctgagggcagtaagtgctcctatccctggagagtcatgtgcagggctggagttatgccaggtgtttgcccggcagcgagcaagagacctgtcagagcaggcatccgcccccctggctaaagataaacagatcgaggagctcagacaagaatgtcatctgcttcaggccagggtggcgtcagggccctgctctgatctccacacagggcgcggaggtccttgtactcagtggttgaacgtgagagatctcgaccgcctgcagcgtgaatcacaaagagaagtgctccggctgcagagacagctcatgctgcaacagggtaacggaggtgcttggcctgaagctggcgggcagtcagccacatgcgaggaggtccggagacagatgttggccctggaacgggaactggaccagcggcgtcgggagtgtcaagagctgggcacccaggctgccccagcacgaaggaggggagaagaggccgaaacacagctacaggcggccttgctcaaaaatgcttggctagccgaagagaacggtaggctccaagcaaaaaccgactgggtccgaaaggtggaggccgagaactctgaagttagggggcacctgggccgcgcatgtcaagaaagggacgcctctgggctgatagctgagcaactcttgcagcaagcagcaagaggccaggacagacaacagcagctgcagagggatcctcagaaggcgctttgcgacctgcaccctagttggaaagaaattcaggcactacagtgtcgacccggtcatcctcccgaacagccctgggagacgagtcagatgccagagtctcaagtgaaaggcagccggcggccaaaatttcacgctcgaccggaagattacgctgtttcccagcctaaccgggatattcaagaaaagagagaggcttcactcgaagagagtccggtggctttgggcgagagcgcctcggtcccccaagttagcgagactgtgcccgccagtcaaccactgtccaagaagacgtcttctcagtcaaacagctcctccgaggggtccatgtgggcgacagtcccctcctctcctacgctagaccgcgacaccgcgagcgaggtcgacgaccttgagccggatagtgtgagccttgcactggaaatggggggttcggccgcaccagccgccccaaagttgaagatttttatggcccagtataattataatccatttgaggggcctaatgaccacccagagggagagctgcctttgactgcgggtgactatatatatatattcggtgacatggacgaggacggcttctacgaaggcgaactggatgacggcaggcgcggattggtgccgtccaatttcgttgagcaaatcccagacagttacatacccggatgtctgcccgcaaagtcaccagacctcggcccctctcagttgcccgccggacaggacgaagccctggaagaggactccctcctttccggtaaagctcaggggatggtggataggggcctgtgtcagatggtccgcgtggggtccaagacagaagtggctaccgagatcctggacaccaagaccgaggcatgtcaactcgggctcttgcagtctatgggcaagcagggactgagtagaccactccttggtactaaaggcgtgctgcgaatggcacctatgcagctccaccttcaaaatgtcacggctacatccgctaatattacatgggtctacagctcccacagacacccccatgtcgtgtacctcgatgatagagagcatgccctgaccccggcgggcgtttcctgttatacttttcaaggcctgtgtcctggaactcattaccgtgtccgggtcgaagtgcgattgccatgggatctgttgcaggtctattgggggaccatgtcctctactgtgactttcgacactctcctggcggggcctccgtatccacccttggatgtgctggtagagagacacgcgtcaccaggtgtcctagtggtgtcatggctaccagttaccatagactccgcagggtccagtaatggcgtgcaggtgaccggatacgcagtctatgcggacggcctcaaggtgtgcgaagtggccgacgctaccgccgggagcactgtcttagaattctctcagcttcaggtgcccctgacctggcagaaggttagtgttcgaacaatgtctctttgcggggagtcactggattccgtgccagcacagattcccgaggatttcttcatgtgtcatcgctggcccgagaccccgccgttcagttacacgtgcggagatccctccacatatcgcgtgaccttccctgtgtgtccccagaaactgagcctcgctccacccagcgccaaggccagtccacacaatcctgggtcttgtggtgagccgcaggcaaagttcctggaagctttctttgaagaaccaccacggcggcagagcccagtgtcaaacctggggtctgaaggggaatgccccagtagcggagcaggcagccaggcccaagagttggccgaggcctgggaaggctgccgtaaagacctcctgtttcagaaaagtcctcagaaccatcgccccccctctgtgtccgatcaacctggcgagaaagaaaattgttatcagcatatgggaacttctaagtcccctgcccctggtttcatccatctcaggaccgaatgcggacctcggaaagagccatgtcaggaaaaggctgcacttgaaagggtattgcgccagaagcaggatgctcaggggttcactcctccacaactgggcgcttctcagcagtatgctagcgatttccacaacgtactgaaagaggaacaagaagccctctgccttgatttaaggggtacagaacggagggaggaacgacgcgagccagaaccacatagccgccagggccaagccctgggagttaaacgagggtgtcagctgcatgaacctagcagcgccctgtgccccgccccatccgcaaaggttatcaaaatgcctcgcggaggaccacagcagctgggtaccggcgccaacactcccgctagggttttcgtggccctgagcgattacaatccccttgtcatgtcagctaaccttaaagcagcagaagaagagttagtttttcaaaagagacagttacttcgcgtgtggggaagccaagatacccacgacttctatctgtctgagtgtaatagacaggtgggaaacattcctgggaggttggtcgccgagatggaggtggggacggaacaaacagaccggaggtggcgcagtccggcacagggacaccttccgtccgtggcccacttggaagactttcaggggctgattattccccagggaagcagcctcgtgcttcagggaaacagcaagcgcttaccattgtggaccccgaaaattatgatcgccgccctggattacgacccaggggacggccagatgggggggcagggaaagggccggctcgctctgagggcaggtgacgtggtgatggtctacgggcccatggacgaccaggggttctattatggagagctcggaggtcaccgcggcctggtcccagcccacctgctggatcacatgagtcttcatggacactag

SEQ ID NO: 46447 - DNA, 4920 bp, Artificial Sequence
  derived and/or modified sequence
atggctaaagactcgccatctcctctgggggcttcccctaagaaacctggttgttccagccccgcagctgccgtcctggagaatcagcggcgggagctggagaagctgagagcagagctcgaagccgaacgggccggctggcgcgcagaacgccgtcggttcgccgctcgcgagaggcagctgagagaggaggcagagagagagagacggcagctcgcagaccgcctgaggagcaaatgggaagcacagagaagcagagaactcaggcagctccaggaggaaatgcaacgcgagagagaagcagagatacggcagttactccgttggaaggaagctgaacagcgtcagctccagcagctcctgcacagagaaagagacggcgtagttagacaggcgcgagagctccagagacagttggcagaagagttagtcaaccgagggcattgctctagacccggagcttccgaggtgtcagcagcccagtgtaggtgcaggctgcaggaggtccttgcacagctgcgctggcagactgatggtgagcaagccgcacgcattcgctatcttcaggctgccctggaggtagaaaggcagttgtttcttaagtatattctcgcccacttccggggccaccccgccctaagcggatcaccagatccccaggcagtgcacagtctcgaggagccactaccccaaacttcctcagggagctgccacgcaccaaagccggcatgtcagctgggctctcttgattccctgtctgctgaggttggagtgcgcagccgttctctgggcctggtaagctcagcttgctcttctagtcctgatgggctgctctctacccacgcttccagcctggactgctttgcgcctgcttgttctcgatcgctggatagtacccggagtctccctaaggcctccaaatctgaagaaaggcccagcagcccggacacctctaccccaggttccaggcgcctgagtcctcccccatctcccctgcccccacccccacccccttctgcccacagaaaattgtctaatccaaggggtggagagggatcagagtctcagccatgtgaggtgttaactccaagccctccagggctcggccatcacgagctaattaaacttaattggctcctggctaaagccctttgggtgctggctcgtagatgctacacattgcaagaagagaacaagcagctgcggagggctgggtgtccttaccaagccgatgagaaggtgaaacgcctgaaagtgaagagggctgaactgacagggctcgctaggcgcttggctgaccgggcgcgtgagctgcaagagaccaacctgagggctgtgagcgctcccatccctggcgagagctgcgccgggttggaattatgccaggtgttcgcccgccaaagagcaagggacttgtccgagcaggcgtctgccccactggccaaagataagcagatcgaagaactccgccaagagtgccatttgctccaagcgagggtcgctagtggcccttgtagtgacctccacaccggccgaggaggcccatgtactcagtggcttaatgtaagagatttagatagactgcagagggagtcacagcgggaggtactgcgccttcaacggcagctgatgctgcagcagggcaacgggggggcctggccagaggcgggagggcagagtgcaacttgcgaggaggtccggcggcagatgttggcactggagcgggaactggaccagcggcgtagggagtgtcaagagctgggtacccaggccgcacccgcccgccggcgcggggaggaggctgagactcagctacaggcagctctgctgaagaacgcttggctcgcggaggagaatgggagattgcaggccaagacggactgggtgcgcaaggttgaggccgaaaattccgaggtgagaggccatctagggcgagcttgtcaggagagggacgcctctggacttatagctgaacagctcctgcagcaggcggccagagggcaggatcgccaacagcaactgcagagagaccctcaaaaagctctgtgtgatcttcacccatcttggaaggagatccaggccttgcagtgtagaccaggccacccgcccgagcagccatgggaaacttctcagatgcctgagtcccaagtgaaaggaagccgccgtccaaagttccacgcgaggccagaggattacgccgtgtctcagcccaatagggacattcaggaaaaaagagaggcttctctcgaagagtctccagtcgccttaggggagtccgcttccgtgccccaagtcagcgagactgtccccgcctctcagccactgtctaagaaaacatcttcccagagcaacagctcatctgagggctctatgtgggccacagtaccttcttcgcccactctcgatcgagatacagcctccgaagttgacgacctggagcccgacagcgtcagcctggctttggagatgggaggtagcgctgcacctgctgcccccaaactgaagatcttcatggctcagtataactataatccctttgagggtccaaacgaccacccagaaggggagctgcctctgactgctggagactacatctatattttcggagatatggatgaggacggcttctacgaaggcgaattggatgacggaaggagaggcctggttccaagtaatttcgtggaacagattcccgatagctacatcccgggttgtttgccggctaaaagcccagacctggggcccagccaactcccagccggacaggatgaagccttagaagaagactccctcctgtctgggaaagcccagggcatggttgatcgcggactgtgccagatggtacgagtgggctctaaaacggaagttgctactgagatcctggacactaagacagaggcctgccaattaggactcctccagtccatgggcaagcagggcctcagccgcccgctgctgggcacaaagggcgttttaagaatggccccaatgcaattgcacctacagaacgtgacggctacctccgctaacatcacttgggtgtactcatcacaccggcaccctcatgttgtgtacttggatgaccgcgaacacgccctgacccccgctggcgtctcatgctatacatttcaggggctttgtcctggaacacactatcgggtgcgtgtcgaagtgcggctgccctgggatctgctgcaggtctactgggggaccatgagtagcaccgtgacttttgacaccctgctcgctggccctccttacccgccactcgatgttctggtcgagcgccatgctagccctggggtactagtggttagctggctgcctgtgaccatagattcggcggggtcctctaatggagttcaggtcaccggctacgccgtttatgctgatggcctcaaagtgtgcgaagtggcagacgccactgctggttccaccgttctagagttctcacaattgcaagtcccattaacctggcagaaggtttccgttaggaccatgtctctatgtggagagagcctagactccgtgccagctcaaatcccggaggatttttttatgtgccataggtggccagagacaccacccttttcctacacatgcggagatccttccacctaccgggtaacctttccagtctgcccccaaaaattgagtctggcacccccaagcgcaaaagcatccccacataaccccgggtcctgcggggaaccccaggcaaagttcctagaagccttcttcgaggagcctcccagacgtcaaagccctgtcagcaatttgggcagcgagggcgaatgtccttccagtggagctggaagtcaggcccaggagttggcagaggcgtgggagggctgccgaaaggatctgctgttccagaagtctccacagaatcacagacctccttctgtgagcgatcagcctggcgagaaggagaactgctatcagcacatggggacatcaaagtcacctgcccctggcttcattcacctgcgcactgaatgcgggccacgtaaggaaccttgtcaggaaaaagctgccctcgagagagtcttgagacaaaagcaggacgcgcagggtttcactccccctcagcttggggcttcccagcagtatgcttcagactttcacaacgttctgaaagaagagcaggaagcactgtgcctggatttgcggggaacggagaggagggaagagagacgggaaccagaaccacactcccgccagggccaggcactcggggtcaagcgaggctgccagctgcacgaaccgagtagcgcgctctgcccggcgccaagcgccaaggtcattaaaatgccaaggggcgggccacaacaacttggtaccggagctaatacaccggcccgcgtcttcgttgctctatccgattacaaccccctggtcatgagcgccaaccttaaggcggcagaggaagagctggttttccaaaaaaggcagcttcttcgcgtttggggaagtcaagatacacacgatttctatttgagcgagtgcaaccgccaggtggggaacatcccagggcgcttggttgccgagatggaggtcggtaccgaacagacagacagacggtggcggtccccagcccaaggccacctccccagtgtggcacatttggaagattttcagggactgattatccctcaaggtagcagtctggtcctccaggggaattcaaagaggcttcctctctggacacccaaaataatgatagcagccctggattatgatccgggagacggacagatgggcggccaagggaaaggccgtctcgccctgcgcgcgggagacgtagtgatggtgtacgggccgatggacgaccaggggttttactatggcgagctgggaggccatagaggactggtgccagcccatctgctggatcatatgtctcttcacggacactag

SEQ ID NO: 46448 - DNA, 4638 bp, Artificial Sequence
  derived and/or modified sequence
atgcagcgggagcgggaggccgagatccggcagctgctgcgctggaaggaggccgagcagaggcagctgcagcagctgctgcaccgggagagagatggagtggtgcggcaggcccgggagctgcagaggcagctggccgaggagctggtgaacagaggccactgcagcaggcctggggccagcgaggtgtctgctgcccagtgccgctgccgcctgcaggaggtgctggcccagctgcgctggcagacagatggagagcaggccgcccgcatccgctacctgcaggccgccctggaggtggagcggcagctgttcctgaagtacatcctggcccacttccggggccacccagccctgagcggcagcccagacccccaggccgtgcacagcctggaggagcccctgccccagaccagcagcggcagctgccacgcccccaagccagcctgccagctgggcagcctggacagcctgtctgctgaggtgggcgtgcgcagccgcagcctgggcctggtgagcagcgcctgcagcagcagcccagatggcctgctgagcacccacgccagcagcctggactgctttgccccagcctgcagccgcagcctggacagcaccaggagcctgcccaaggccagcaagtctgaggagcggcccagcagcccagacaccagcaccccaggcagccggcggctgagccccccacccagccccctgcccccacctcctcctccttctgcccacaggaagctgagcaacccccggggcggggagggcagcgagagccagccctgtgaggtgctgacccccagccccccaggcctgggccaccacgagctgatcaagctgaactggctgctggccaaggccctgtgggtgctggcccggcgctgctacaccctgcaggaggagaacaagcagctgcggcgggccggctgcccctaccaggctgatgagaaggtgaagaggctgaaggtgaagagagctgagctgaccggcctggcccggcggctggccgaccgggcccgggagctgcaggagaccaacctgcgggctgtgtctgcccccatccctggagagagctgtgccggcctggagctgtgccaggtgtttgcccggcagagggcccgggacctgtctgagcaggccagcgcccccctggccaaggacaagcagatcgaggagctgcggcaggagtgccacctgctgcaggcccgggtggccagcggcccctgcagcgacctgcacacaggccggggcggcccctgcacccagtggctgaatgtgcgggacctggaccggctgcagcgggagagccagcgggaggtgctgcggctgcagaggcagctgatgctgcagcagggcaatggaggagcctggccagaggccggcggccagagcgccacctgtgaggaggtgcggcggcagatgctggccctggagcgggagctggaccagaggagaagagagtgccaggagctgggcacccaggccgccccagcccggcggcggggggaggaggccgagacccagctgcaggccgccctgctgaagaatgcctggctggccgaggagaatggccgcctgcaggccaagacagactgggtgaggaaggtggaggctgaaaattctgaggtgcggggccacctgggccgggcctgccaggagagagatgccagcggcctgattgctgagcagctgctgcagcaggccgcccggggccaggaccggcagcagcagctgcagagggacccccagaaggccctgtgtgacctgcaccccagctggaaggagatccaggccctgcagtgcaggcctggccaccccccagagcagccctgggagaccagccagatgcctgagagccaggtgaagggcagcagaagacccaagttccacgcccggcctgaggactatgctgtgtcccagcccaacagagacatccaggagaagcgggaggccagcctggaggagagccctgtggccctgggggagagcgcctctgtgccccaggtgtctgagaccgtgcctgccagccagcccctgagcaagaagaccagcagccagagcaacagcagcagcgagggctccatgtgggccaccgtgcccagcagccccaccctggaccgggacacagccagcgaggtggatgacctggagccagacagcgtgtccctggccctggagatgggcggcagcgctgccccagctgcccccaagctgaagatcttcatggcccagtacaactacaacccctttgagggccccaatgaccaccctgagggggagctgcccctgacagctggggactacatctacatctttggagacatggatgaagatggcttctatgaaggagagctggatgatggaagaagaggcctggtgcccagcaactttgtggagcagatcccagacagctacatccctggctgcctgcctgccaagagcccagacctgggccccagccagctgcctgctggccaggatgaggccctggaggaggacagcctgctgagcggcaaggcccagggcatggtggaccggggcctgtgccagatggtgcgggtgggcagcaagacagaggtggccacagagatcctggacaccaagacagaggcctgccagctgggcctgctgcagagcatgggcaagcagggcctgagccggcccctgctgggcaccaagggcgtgctgaggatggcccccatgcagctgcacctgcagaatgtgacagccaccagcgccaacatcacctgggtgtacagcagccaccgccacccccacgtggtgtacctggatgaccgggagcacgccctgaccccagctggggtgtcctgctacaccttccagggcctgtgccccggcacccactacagagtgcgggtggaggtgcggctgccctgggacctgctgcaggtgtactggggcaccatgagcagcacagtgacctttgacaccctgctggccggccccccctacccacccctggatgtgctggtggagagacatgccagccctggggtgctggtggtgtcctggctgcctgtgaccatcgacagcgctggcagcagcaatggagtgcaggtgacaggctatgctgtgtatgcagatggcctgaaggtgtgtgaggtggctgatgccacagctggcagcacagtgctggagttcagccagctgcaggtgcccctgacctggcagaaggtgtctgtgaggaccatgagcctgtgtggggagagcctggacagcgtgcctgcccagatccctgaggacttcttcatgtgccaccgctggccagagaccccacccttctcctacacctgtggggaccccagcacctacagagtgaccttccctgtgtgcccccagaagctgagcctggccccacccagcgccaaggccagcccccacaaccctggcagctgtggggagccccaggccaagttcctggaggccttctttgaggagcccccccggcggcagagccctgtgagcaacctgggctctgaaggagaatgtcccagcagtggagctggcagccaggcccaggagctggccgaggcctgggagggctgcaggaaggacctgctcttccagaagagcccccagaaccaccggccccccagcgtgtctgaccagcctggagagaaggagaactgctaccagcacatgggcaccagcaagagccctgcccctggcttcatccacctgaggacagaatgtggccccaggaaggagccctgccaggagaaggccgccctggagcgggtgctgcggcagaagcaggatgcccagggcttcaccccaccccagctgggcgccagccagcagtatgccagtgacttccacaacgtgctgaaggaggagcaggaggccctgtgcctggacctgcggggcacagaaagaagagaggagcggcgggagcctgagccccacagccggcagggccaggccctgggcgtgaagaggggctgccagctgcacgagcccagcagcgccctgtgcccagcccccagcgccaaggtgatcaagatgccccggggcggcccccagcagctgggcaccggggccaacaccccagcccgggtgtttgtggccctgagtgactacaaccccctggtgatgtctgccaacctgaaggctgctgaggaggagctggtgttccagaagaggcagctgctgcgggtgtggggcagccaggacacccatgacttctacctgtctgagtgcaaccggcaggtgggcaacatccctggccgcctggtggccgagatggaggtgggcacagagcagacagaccggcgctggaggagccctgcccagggccacctgcccagcgtggcccacctggaggacttccagggcctcatcatcccccagggcagcagcctggtgctgcagggcaacagcaagaggctgcccctgtggacccccaagatcatgattgctgccctggactatgaccctggagatggccagatgggcggccagggcaagggccgcctggccctgcgggctggagatgtggtgatggtgtatggccccatggatgaccagggcttctactacggggagctgggcggccaccggggcctggtgcctgcccacctgctggaccacatgagcctgcacggccactag

SEQ ID NO: 46449 - DNA, 4920 bp, Artificial Sequence
  derived and/or modified sequence
atggccaaggacagccccagccccctgggcgccagccccaagaagccaggctgcagcagccctgctgctgctgtgctggagaaccagaggcgggagctggagaagctgcgggcagagctggaggccgagagagctggctggagggctgagaggagaagatttgctgcccgggagcggcagctgcgggaggaggccgagcgggagcggcggcagctggccgaccggctgcggagcaagtgggaggcccagaggagccgggagctgcggcagctgcaggaggagatgcagcgggagcgggaggccgagatccggcagctgctgcgctggaaggaggccgagcagaggcagctgcagcagctgctgcaccgggagagagatggagtggtgcggcaggcccgggagctgcagaggcagctggccgaggagctggtgaacagaggccactgcagcaggcctggggccagcgaggtgtctgctgcccagtgccgctgccgcctgcaggaggtgctggcccagctgcgctggcagacagatggagagcaggccgcccgcatccgctacctgcaggccgccctggaggtggagcggcagctgttcctgaagtacatcctggcccacttccggggccacccagccctgagcggcagcccagacccccaggccgtgcacagcctggaggagcccctgccccagaccagcagcggcagctgccacgcccccaagccagcctgccagctgggcagcctggacagcctgtctgctgaggtgggcgtgcgcagccgcagcctgggcctggtgagcagcgcctgcagcagcagcccagatggcctgctgagcacccacgccagcagcctggactgctttgccccagcctgcagccgcagcctggacagcaccaggagcctgcccaaggccagcaagtctgaggagcggcccagcagcccagacaccagcaccccaggcagccggcggctgagccccccacccagccccctgcccccacctcctcctccttctgcccacaggaagctgagcaacccccggggcggggagggcagcgagagccagccctgtgaggtgctgacccccagccccccaggcctgggccaccacgagctgatcaagctgaactggctgctggccaaggccctgtgggtgctggcccggcgctgctacaccctgcaggaggagaacaagcagctgcggcgggccggctgcccctaccaggctgatgagaaggtgaagaggctgaaggtgaagagagctgagctgaccggcctggcccggcggctggccgaccgggcccgggagctgcaggagaccaacctgcgggctgtgtctgcccccatccctggagagagctgtgccggcctggagctgtgccaggtgtttgcccggcagagggcccgggacctgtctgagcaggccagcgcccccctggccaaggacaagcagatcgaggagctgcggcaggagtgccacctgctgcaggcccgggtggccagcggcccctgcagcgacctgcacacaggccggggcggcccctgcacccagtggctgaatgtgcgggacctggaccggctgcagcgggagagccagcgggaggtgctgcggctgcagaggcagctgatgctgcagcagggcaatggaggagcctggccagaggccggcggccagagcgccacctgtgaggaggtgcggcggcagatgctggccctggagcgggagctggaccagaggagaagagagtgccaggagctgggcacccaggccgccccagcccggcggcggggggaggaggccgagacccagctgcaggccgccctgctgaagaatgcctggctggccgaggagaatggccgcctgcaggccaagacagactgggtgaggaaggtggaggctgaaaattctgaggtgcggggccacctgggccgggcctgccaggagagagatgccagcggcctgattgctgagcagctgctgcagcaggccgcccggggccaggaccggcagcagcagctgcagagggacccccagaaggccctgtgtgacctgcaccccagctggaaggagatccaggccctgcagtgcaggcctggccaccccccagagcagccctgggagaccagccagatgcctgagagccaggtgaagggcagcagaagacccaagttccacgcccggcctgaggactatgctgtgtcccagcccaacagagacatccaggagaagcgggaggccagcctggaggagagccctgtggccctgggggagagcgcctctgtgccccaggtgtctgagaccgtgcctgccagccagcccctgagcaagaagaccagcagccagagcaacagcagcagcgagggctccatgtgggccaccgtgcccagcagccccaccctggaccgggacacagccagcgaggtggatgacctggagccagacagcgtgtccctggccctggagatgggcggcagcgctgccccagctgcccccaagctgaagatcttcatggcccagtacaactacaacccctttgagggccccaatgaccaccctgagggggagctgcccctgacagctggggactacatctacatctttggagacatggatgaagatggcttctatgaaggagagctggatgatggaagaagaggcctggtgcccagcaactttgtggagcagatcccagacagctacatccctggctgcctgcctgccaagagcccagacctgggccccagccagctgcctgctggccaggatgaggccctggaggaggacagcctgctgagcggcaaggcccagggcatggtggaccggggcctgtgccagatggtgcgggtgggcagcaagacagaggtggccacagagatcctggacaccaagacagaggcctgccagctgggcctgctgcagagcatgggcaagcagggcctgagccggcccctgctgggcaccaagggcgtgctgaggatggcccccatgcagctgcacctgcagaatgtgacagccaccagcgccaacatcacctgggtgtacagcagccaccgccacccccacgtggtgtacctggatgaccgggagcacgccctgaccccagctggggtgtcctgctacaccttccagggcctgtgccccggcacccactacagagtgcgggtggaggtgcggctgccctgggacctgctgcaggtgtactggggcaccatgagcagcacagtgacctttgacaccctgctggccggccccccctacccacccctggatgtgctggtggagagacatgccagccctggggtgctggtggtgtcctggctgcctgtgaccatcgacagcgctggcagcagcaatggagtgcaggtgacaggctatgctgtgtatgcagatggcctgaaggtgtgtgaggtggctgatgccacagctggcagcacagtgctggagttcagccagctgcaggtgcccctgacctggcagaaggtgtctgtgaggaccatgagcctgtgtggggagagcctggacagcgtgcctgcccagatccctgaggacttcttcatgtgccaccgctggccagagaccccacccttctcctacacctgtggggaccccagcacctacagagtgaccttccctgtgtgcccccagaagctgagcctggccccacccagcgccaaggccagcccccacaaccctggcagctgtggggagccccaggccaagttcctggaggccttctttgaggagcccccccggcggcagagccctgtgagcaacctgggctctgaaggagaatgtcccagcagtggagctggcagccaggcccaggagctggccgaggcctgggagggctgcaggaaggacctgctcttccagaagagcccccagaaccaccggccccccagcgtgtctgaccagcctggagagaaggagaactgctaccagcacatgggcaccagcaagagccctgcccctggcttcatccacctgaggacagaatgtggccccaggaaggagccctgccaggagaaggccgccctggagcgggtgctgcggcagaagcaggatgcccagggcttcaccccaccccagctgggcgccagccagcagtatgccagtgacttccacaacgtgctgaaggaggagcaggaggccctgtgcctggacctgcggggcacagaaagaagagaggagcggcgggagcctgagccccacagccggcagggccaggccctgggcgtgaagaggggctgccagctgcacgagcccagcagcgccctgtgcccagcccccagcgccaaggtgatcaagatgccccggggcggcccccagcagctgggcaccggggccaacaccccagcccgggtgtttgtggccctgagtgactacaaccccctggtgatgtctgccaacctgaaggctgctgaggaggagctggtgttccagaagaggcagctgctgcgggtgtggggcagccaggacacccatgacttctacctgtctgagtgcaaccggcaggtgggcaacatccctggccgcctggtggccgagatggaggtgggcacagagcagacagaccggcgctggaggagccctgcccagggccacctgcccagcgtggcccacctggaggacttccagggcctcatcatcccccagggcagcagcctggtgctgcagggcaacagcaagaggctgcccctgtggacccccaagatcatgattgctgccctggactatgaccctggagatggccagatgggcggccagggcaagggccgcctggccctgcgggctggagatgtggtgatggtgtatggccccatggatgaccagggcttctactacggggagctgggcggccaccggggcctggtgcctgcccacctgctggaccacatgagcctgcacggccactag

SEQ ID NO: 46450 - DNA, 4638 bp, Artificial Sequence
  derived and/or modified sequence
atgcagcgggagcgggaggccgagatccggcagctgctgcggtggaaagaggctgagcagcgacagctgcagcagctactgcatcgcgaacgcgatggagtggtgcgtcaggcccgcgagttacagcgacagctggctgaagaactggttaaccgtgggcactgcagtcgccccggcgcttctgaagtatcagccgcacaatgccgctgcaggctgcaggaggtgcttgctcagttgaggtggcagaccgatggggagcaagctgcaagaattcgctatctgcaggctgcattggaggtggaacgccagctgttcctgaagtacatcctcgcacacttcaggggacaccccgcgttaagcggatctcctgatccacaggccgtacacagcctcgaggaaccactgccccagacaagctccggctcctgccacgctcctaaacccgcttgccagctcggctccctagactccttgtcagctgaggtcggggttcgatcccgttctctcgggctggtctctagcgcttgcagtagctcccctgacgggctcttgtcaacacatgcctccagcctcgattgcttcgcccctgcgtgctcaagatccctagatagcacccgatccctccccaaggcttctaagtctgaggaacgaccctcatctcctgacactagcacccctggcagtcggaggctgagccccccgccctctcctttgccacctccaccgccgccatctgcgcaccggaagctttccaatccccgcggaggtgaaggcagcgagtctcagccttgcgaggtgcttacgccttcaccgccaggactgggtcaccacgagcttataaaactgaattggttgctggcgaaggctctgtgggtgctagctcggcgctgctacactctgcaggaggaaaacaaacagctgcgcagagcgggctgtccttaccaggcggacgagaaagtgaaaagactaaaagtgaaacgtgccgagctcaccggcctggccaggcggcttgcagatcgggctcgcgagctgcaggagaccaaccttagggcagtgtctgctccaatacccggggagagttgcgccgggctcgaattgtgccaagtttttgcccgacagcgcgcccgggatctatccgagcaagcctcagctcccttggcaaaagataaacaaatcgaagagctgcggcaggagtgccatctgcttcaggctagggtggcttcagggccatgctctgatctgcacaccggcagaggaggaccctgtacccagtggctgaacgtgcgggacctcgacaggctccaaagggagagccagagagaggtattacgtctgcagcggcaactaatgctgcaacagggtaacggtggcgcctggcctgaggccggaggtcaatccgctacctgtgaagaggttcgtcgacagatgctcgcactggagagggaacttgaccagagaagaagagaatgccaggaactgggcacccaagccgcgcccgcgaggagaaggggcgaggaggctgagacccagctgcaggcagcattgctgaagaacgcttggctcgcagaagaaaatggaaggctgcaggctaaaaccgactgggttcggaaagttgaagccgaaaattccgaggtgcgaggccacctaggtcgtgcatgtcaggaacgagatgcctcagggctgattgcggagcagcttctgcagcaggcagcacgaggacaggatcggcagcagcaactgcagagagacccacagaaagccctttgcgacctacacccctcctggaaggagattcaggctctgcagtgcaggccaggccacccccccgaacagccatgggaaacctcacagatgcctgagtcccaggtgaaggggtcacggagacctaaatttcacgctagaccagaagactacgccgtttctcagcccaacagggatatccaggaaaagcgggaggcgagtctggaggagagtcctgtggccctgggtgagtctgcaagcgtgccccaggtttcggaaaccgttcccgcatcccagcctttgagcaagaagacctccagccagagcaattctagtagtgagggatccatgtgggccactgtcccctcaagtcccacactagatcgtgatactgcgagcgaagtggatgacctagaacctgactccgtctcgctagccctggaaatgggaggcagcgctgcgcccgccgcgcctaaattaaagatcttcatggcacagtataactacaatccattcgaaggtcccaacgaccatcccgagggggaacttcctctgacagcgggagattacatttacatcttcggagatatggacgaggacgggttttacgaaggcgagctcgatgacggcagacgaggccttgtgccctccaacttcgttgagcagattcctgattcatatatcccaggatgtcttccagcgaaaagccccgatctgggtcctagccagttgcctgccggtcaggacgaggccctggaggaagacagcttattatccggaaaggcccagggcatggtggaccgagggctttgccagatggttagagtcggcagtaagaccgaggttgcaactgagatcctggacacaaagaccgaggcgtgtcagctggggctgcttcagtcgatgggcaagcaaggactgtcccggccattactgggcaccaaaggggtcctcaggatggcgcctatgcagctgcacctgcagaatgtgacagcgaccagcgccaacataacctgggtttactcctcccaccgtcatcctcatgtggtttacctagatgacagagagcacgcactaacgccagcaggggtgtcatgctacactttccaaggcctttgccccggcactcattacagagtgcgtgtggaggtaagactgccttgggatctgcttcaagtatattgggggacaatgtcgtccacggtgacctttgatacgctgctcgccggtccgccatatcctcctctggacgtgctcgtcgaacgtcatgcctcccccggagtgttagttgtctcgtggctgcctgttaccattgacagcgcaggctcctcaaatggcgtgcaagtcacaggatacgctgtatatgcagatggccttaaggtctgtgaagtagctgatgctaccgccggaagtaccgtactggagttttcccagctccaggtacctttgacctggcagaaagtgtctgtcagaacaatgtccctttgcggagagagcctggactccgtgccagctcagattccagaggatttctttatgtgccaccgttggcctgagactccgcccttcagctatacctgtggcgatccaagcacttaccgagtaacctttccagtttgcccccagaaactgagcctggctccaccttccgccaaagcctccccccataatcccggctcttgcggtgagccacaggccaagttcctggaggcgttttttgaggaacctccccggagacagtctcctgtgagtaatttgggcagtgaaggagaatgtccatcgtcgggtgcaggctctcaggcccaggagctcgccgaggcttgggaagggtgtaggaaagatcttctgttccagaaatccccacagaatcataggcctccctcagtgagcgaccagcctggcgagaaggaaaattgttatcagcatatgggcacttcaaagagccccgctccaggatttatccacttacggacagaatgtggccctcggaaagaaccctgtcaggaaaaagctgcacttgaacgcgtgcttcgtcaaaagcaagacgctcagggcttcacccctccacagttaggtgcctctcagcagtatgcttccgacttccataacgtactgaaggaggaacaagaggctctttgcctcgatctgcgcggcaccgaacgccgcgaagagcgaagagaacctgagccccactctcgtcaggggcaagctcttggcgtcaagagaggatgtcagctgcatgagccatcgagtgcactttgccctgcacctagcgctaaggttatcaagatgccaagaggcgggccgcagcaactggggacaggcgccaatactcccgcacgcgtattcgtcgccctgagtgactacaatccactggtaatgagcgcaaacctgaaagcagcagaggaggaactcgtgttccagaaaaggcagctactgcgcgtgtggggctcacaggacacccacgatttctacctgagcgagtgtaacagacaggtgggaaacattccaggtagacttgtggctgagatggaggtggggacggaacagactgaccgtcgttggcggagcccggcccaaggccatctgccttctgtggcccacctcgaggacttccagggcctaattataccccaggggtcttcactagtgttacaaggcaacagtaagcggctcccactgtggaccccaaagattatgatcgccgccctggactatgatcctggagacggccagatgggaggtcaaggaaaaggaagactggctctccgggctggcgatgtcgtaatggtatacggtccaatggacgaccagggcttctactatggggaactgggtgggcatcgaggtctcgtgccggcgcaccttttggaccatatgagcctccatggccattag

SEQ ID NO: 46451 - DNA, 4920 bp, Artificial Sequence
  derived and/or modified sequence
atggccaaggacagccccagccccctgggcgccagccccaagaagcctggttgctcctctcccgcagctgccgtgctggagaatcagcggcgtgaactcgagaaattacgcgcagagctggaggcagaaagggcaggctggagggcagaacgccgccgctttgcggcacgggagcgccagctcagagaggaggccgagcgcgagagacgccagctggctgacagactaaggagtaaatgggaagctcaaaggtctagagagcttagacaactgcaggaggagatgcagcgagagagagaggccgagattagacagctgctccggtggaaagaggccgaacaacgtcagctgcagcagctgctacacagggagcgcgacggggttgtcagacaggcccgtgaattacagcgccagctcgccgaggagctggtcaacagaggccactgttcccgacctggagccagcgaggtatcagcagcacaatgccgatgtagattacaagaggtactcgcccaactacggtggcagaccgacggcgaacaggccgcaagaattcgctacctgcaggcagctctcgaggtggagcgtcaacttttcctgaagtacatcctcgctcactttaggggacaccctgccctgtcagggtctcccgacccacaggcagtccactcattagaagagcccttgcctcagacttcatctggcagctgtcatgctcccaagccagcttgtcagctcggaagtctcgattccctgagcgctgaggttggagtacgcagccgctcactgggccttgtcagcagcgcatgctctagtagtcccgacgggctcctctccacccacgcctcttctctcgactgttttgcaccggcctgcagccggagtctagattccactaggtctctccctaaggcctctaaatctgaggagcgtccatccagtcctgatacttcaactcccggatctaggcgcctgtctccacctcccagccctctgcctcccccaccgcctccaagtgcacatcgaaaactctccaatcctcgaggtggggaaggcagcgagagtcagccttgcgaggtgttaacaccatcaccccccggtctggggcatcatgaactgataaaactgaattggctcctggcgaaagctctatgggtgctagcccgtcgatgctatacactccaagaggaaaacaaacagctgagaagggcaggctgcccttatcaagccgacgaaaaagtgaaaagacttaaggtgaagagagcggagttgacaggcctggctcggcgtctggccgatagagcccgcgagttgcaggagactaacctgagagccgtgagtgctccgattccaggtgagtcatgtgctggccttgaactgtgtcaggtttttgcgagacaacgagcccgtgatctctccgagcaggccagcgcccctttagcgaaggacaagcaaattgaggagctgcgccaggaatgtcacttactgcaggctcgcgtggcctccggcccttgcagcgacttgcacaccggccgaggcgggccttgtacacaatggctgaacgtgagggacctggacagactgcaacgtgagtcccagagggaagtgctgcgcttgcagcggcagctcatgctgcagcaggggaacggcggggcttggccagaggccggaggccagtccgccacatgcgaagaagtcagacgccaaatgctcgctctggaaagagaactggatcagagacggcgggagtgccaagaactcggcacccaagccgctcctgcacgtcggcgcggggaagaagcagagacacaattgcaggctgccctgctgaagaatgcctggctggccgaggaaaacggcaggcttcaggcgaaaactgattgggtgcggaaagttgaggctgagaactcggaagtccgggggcacctcggacgcgcctgccaggagcgcgacgcatccggcctgatcgcagagcagttgctacaacaagccgccaggggccaggatcggcagcaacaattgcagagagatccccagaaggctctgtgtgatctccatcccagctggaaagagatacaggccctccaatgtcgtcctggacatcctcctgaacagccttgggaaacttcccagatgccagaatcccaagtcaaaggctccaggcggccaaaatttcacgcgcggcccgaagattatgcagtgtcccaacctaaccgggatatccaggaaaagagggaagcgtctctagaagagtctccagtcgcgctgggtgaatctgcttccgtgccacaggtgagcgagaccgttcccgctagccagcccctcagcaaaaagacatctagtcaatctaactcatcttcagaaggcagcatgtgggctacagtgccttccagtccaaccctggacagggacactgcatccgaagtggatgatcttgaacctgactccgtaagcctggccctcgagatgggaggaagcgccgctccagccgctcccaagctaaaaatttttatggcgcagtacaattataacccgttcgagggcccaaatgaccaccctgaaggtgagcttccactcactgctggtgattatatctacattttcggcgacatggacgaagatggattttatgaaggggagctcgacgacggcaggcggggactagtccccagcaacttcgtcgagcagatccctgattcctatattcctggctgcctgcccgcgaagtcacccgaccttggtccgtcacagttgcctgccggacaagacgaggcgttggaggaagacagcctgttatctggaaaggcacaggggatggtggacagaggattgtgccagatggtccgggtcgggagcaagacagaggtggccaccgagatcctggacactaaaaccgaagcgtgtcagctaggcttactgcagtccatggggaaacaaggacttagcagaccacttcttggcactaaaggcgtcttaaggatggcccccatgcagttacacctccagaatgttacagccactagcgctaatattacatgggtctattccagtcaccggcacccccacgttgtgtatctggatgaccgtgagcacgctttaacccctgccggagtgtcatgctacacctttcagggactctgtcccgggacgcactaccgtgtccgtgttgaagtccgattaccatgggatctcctccaagtgtactggggcacaatgtccagtacagttacattcgacaccctgcttgccgggcctccgtatccccctctggacgttctcgtggagaggcacgccagtccaggagtgcttgtggtttcctggttacccgtcaccatagacagtgctgggagtagtaatggcgtgcaggtcacgggctatgcagtctatgccgatggactgaaagtctgtgaggtagcggatgctaccgccgggtcaactgtcttagaattttctcagctgcaagtcccattgacgtggcagaaagtgtccgtgcggaccatgtcgttgtgtggcgagtctctcgactccgttcctgctcagatcccagaagactttttcatgtgtcacaggtggccagagaccccacccttctcttatacgtgcggtgaccccagtacctacagagtgacatttcccgtttgtccccagaagctcagcctggcccccccctccgccaaagcctccccccacaatcctggtagttgcggggagccccaggctaaatttcttgaagccttctttgaagaacctccacggcgccagtctcctgtgtcaaacctgggatccgagggtgaatgccctagctctggggccgggtcccaagcccaagagcttgccgaagcctgggaagggtgtcggaaagatttactctttcaaaaatctcctcaaaatcacaggcccccatcagtctccgaccagcctggggaaaaagaaaactgctatcagcatatggggactagcaaatcccctgctcctgggtttatccacctgcgcactgagtgcggtcctcgaaaggagccatgtcaggagaaggccgcactcgagagggtcctgaggcaaaaacaggatgcccagggattcactccaccacaactgggagcgtcccagcaatatgcctctgacttccacaacgtgctaaaagaggagcaggaggcgctttgtcttgatctcagaggcacggagcgacgggaagagagacgcgagccagagccccattcaagacagggccaagccctgggcgtgaaaagaggctgtcaactccacgagccatcgtccgcactgtgtcctgcaccgtctgccaaggtcataaagatgccacgcggcggaccacaacagctgggaaccggcgccaataccccagcgagggttttcgtggccctgagcgactacaatcctcttgttatgagcgccaacctgaaggctgctgaagaagaactggtattccagaaaaggcagctgctccgggtctggggctcccaggatacccacgacttctatctttctgaatgcaatcggcaagtgggcaacattcctggccgccttgttgctgaaatggaagtgggcacagaacagactgatagaagatggagatcccccgcccaggggcacttaccgtccgtggcccacttggaggatttccagggcctcatcatcccgcagggcagtagcctagtgcttcaagggaattccaagaggttgccattgtggacacccaaaattatgatcgcggctctggattacgacccaggtgatggccagatgggtggccaaggcaagggccggctggccctaagagcaggcgatgtggtgatggtctacggtcccatggacgaccaaggattctactacggagaactgggaggccacagaggcctggtgcctgcgcatcttttggatcacatgtcgctccacggccattag

SEQ ID NO: 46452 - DNA, 4638 bp, Artificial Sequence
  derived and/or modified sequence
atgcagcgtgaacgggaagccgaaattagacagctcctgaggtggaaagaagccgaacagcgccagctccagcagctgctgcaccgcgagagggatggcgtcgtccgccaggcgcgagaactccagagacaactggcagaagaactcgttaatcggggacactgtagtagacccggtgccagcgaggtatccgctgcccagtgccggtgtaggctgcaggaggttttagctcagcttcgctggcagactgacggcgaacaggccgcacggatccgctacctgcaggctgctttggaggtggagagacagctgtttctaaaatatatcttagctcacttcaggggccaccccgctctgtccggcagcccggacccacaggcagttcattcccttgaggagcccctgccccagacctcctctggatcttgtcacgcacccaaacccgcttgtcagctcggttccctggatagtctgagtgctgaggtgggtgtgcggtcacggagcctgggcctcgtgagctcagcctgtagttcttcaccagacggtcttctttcaacgcacgctagttcgctcgattgcttcgcccctgcttgttcacggagcctggacagtacaaggagcctgccaaaggcttccaaaagtgaagagagaccttcgtctccagatacatcaacacccggtagtcgtcggctcagcccccctccaagcccgctccctcctccgccacccccatcagcccaccgaaagctcagtaatcctcggggaggcgagggcagcgaaagccagccttgtgaggtgctgactccatcaccaccagggctggggcaccatgaattaatcaagctgaattggctgcttgctaaggcgctctgggtgcttgccagaagatgttacaccctccaggaggagaacaagcagttgcgcagggctggttgcccataccaggcagacgagaaggtaaaacggcttaaggtgaaacgggcagagctaacaggcctggcccgacgcctggcggatcgggcacgggagctgcaggagaccaacctgagggctgtgtcggcacccattcctggggaaagctgcgcgggtctggaactatgtcaggtgttcgctcgccagcgtgctcgcgatttatcagagcaagcatcagccccactggcgaaagacaagcagatcgaggaactgcgacaagaatgtcaccttctgcaggcccgagtggcctctggaccctgcagcgatttacatacaggaagaggcggaccctgtactcaatggttgaacgtgcgggatctggataggctccaacgagaatcccaaagagaagtcttgaggctccagcgccaattaatgctgcagcaggggaacggtggggcatggcccgaagccggtggccagtcagcaacatgcgaagaagtgagaaggcagatgctggccctggagagggaactcgatcagagacgacgggagtgccaggaactgggtacacaggccgcacctgctcggagacgtggggaggaagcagaaactcagcttcaggctgccctgctgaaaaatgcttggctggcggaagagaacggtcgccttcaggcgaagactgattgggttagaaaggtggaagccgagaacagcgaagtccgcggtcacttggggcgtgcctgtcaagaaagggacgctagtggcctaattgcagagcagttgctgcagcaggccgcaagaggccaggaccgccagcaacaactgcagagggacccccagaaggctctgtgcgatctgcatccctcttggaaggagatccaggccctccagtgccgtcccggacacccccctgaacagccgtgggaaactagccaaatgcccgagagccaggtgaagggctcacgaagaccaaaattccacgcacgccctgaggactacgccgtttcacagcccaaccgtgatatccaggagaaaagagaggcatccctggaagagagccctgtggcactgggtgagagcgcctccgtgcctcaggtcagcgaaacagttcccgcaagccaaccgttgtctaagaaaactagtagtcaatctaacagctcaagtgaggggagcatgtgggccaccgttcctagcagtcctaccctggatcgagacaccgcaagcgaggtcgacgacctggagccagactccgtatccctggcacttgagatgggcggatcggctgcaccggcagcaccgaaactgaagatatttatggcacagtataactataatccctttgagggccctaatgatcacccagaaggagaactaccgctcactgccggtgactacatctatattttcggtgatatggacgaggacggcttctacgagggcgagctggatgatggaagaaggggactggtaccctcaaatttcgtggagcagattccggattcctacatacctgggtgtctgcctgctaagtctcccgaccttggtcctagtcagcttccagcaggccaggatgaggcacttgaagaagactcactgctgagcgggaaggctcaaggcatggtggacaggggtctgtgccagatggtgcgggtcggctcaaagacagaagttgccacggagatccttgataccaaaactgaggcatgtcagctaggcctcctgcagagtatgggcaagcaaggtctgtctcgtccgctactcggtaccaaaggggtgctgagaatggcacccatgcaactgcatctgcagaatgtgacagctacctctgccaacatcacttgggtctactcatcccatcgccacccacacgtggtttatctcgatgatcgagaacatgccctcacacccgcaggcgtgagttgttacacattccaggggctgtgcccaggcacacactatcgtgtccgggtcgaagtcaggctgccctgggacctgctccaagtgtattgggggacgatgtccagcaccgtgacctttgataccttgctagcagggcctccatatccacctctcgatgtgttagtcgaacgccacgcctccccaggtgtgttggtcgtgagctggctccccgtcacaattgacagtgcgggaagtagcaacggcgtgcaagtgaccgggtacgctgtctatgctgacggtttgaaggtgtgcgaagtagcggacgccaccgccggttcgacggtgctggaatttagccaactgcaagtcccccttacgtggcagaaggtgtccgtgagaacgatgtccctctgcggagaaagcctggattccgtgcccgctcagattcctgaagacttctttatgtgccacagatggcccgaaacaccccctttctcatatacatgcggagatccttccacctatagggttaccttccctgtgtgtcctcaaaaactgagccttgcaccaccctctgcgaaagcatcaccccacaaccccggtagctgtggagagcctcaagccaaatttctcgaggcattctttgaggaaccaccccgacgtcaatctcccgtgtctaatctgggtagtgaaggtgaatgccccagttccggagccggtagccaggcacaagaactggctgaggcttgggaggggtgccgcaaggatctgctgttccaaaaatctccccagaatcatcggccaccttcagtttccgatcaacccggagagaaggaaaactgttatcagcatatgggaacttctaagtcccccgcacctggtttcatccaccttcgcaccgagtgcggtcccaggaaggagccctgtcaagagaaagccgctcttgaacgggtattaaggcagaagcaggatgcacagggtttcactcccccacagctgggagccagtcagcagtatgccagtgactttcacaatgtgcttaaggaggaacaggaagccctgtgcctcgatctgaggggaacggaacggagagaggagcggcgtgaaccagagccgcattcaagacagggacaggccctgggcgtcaagaggggttgtcagctccacgaaccttcctccgctctgtgccccgctccttccgctaaggtgatcaaaatgcctagaggtgggccacagcaactgggtactggggctaatacacccgcaagggtttttgtggccctgtccgattataaccctttagtcatgtccgccaatcttaaagctgccgaagaggaactggtctttcagaagaggcagctcctccgcgtgtggggctcccaggatacccacgatttttacctttctgagtgcaatagacaagtgggtaacatccccggtcgtctagttgcagagatggaagtgggaaccgaacaaactgatagaagatggcgaagtcctgcccagggccacttaccctccgtcgctcaccttgaagactttcaggggctaataattcctcagggatcgtcgctcgtgctccaagggaatagtaagcggcttcctttgtggactcctaagattatgattgccgctctcgactatgatcccggtgacgggcagatggggggtcaagggaaaggtaggttagctctgagagctggcgatgtggtgatggtgtacggccctatggatgaccaaggattctattatggggagctgggcggacatcgtgggctggtgcctgcccacctcctagaccatatgagtttacacggccactag

SEQ ID NO: 46453 - DNA, 4920 bp, Artificial Sequence
  derived and/or modified sequence
atggcgaaggactctcctagtccactgggcgcttcgcctaagaaaccagggtgtagtagtccggcagccgctgtgcttgaaaaccagaggcgggaattagaaaaacttcgagccgagttggaagccgagcgcgctggatggagggctgaaaggcggagattcgccgctcgcgagcggcagctgagagaggaggcagagagagaacgcagacagctggcagacagactccgcagtaagtgggaggctcaacggtcacgagagctgagacagctgcaggaggaaatgcagagggagcgggaagctgaaattagacagctgttaaggtggaaggaagccgagcagcgccagctgcaacagcttcttcacagagagcgggatggggtggttcgtcaagctcgcgaactgcaacggcagctggctgaggagttagtcaatcgtggacactgtagccggccaggcgcatccgaggtgtccgcagctcagtgcaggtgcaggctgcaggaagtccttgcccagctcagatggcagactgacggtgagcaggccgcacgcattcgttatctacaggcagccttggaagtcgaaagacagttgtttttgaaatatattttagcccatttccgtggacaccccgcactctccgggtcccccgaccctcaagctgtgcactccttagaagagccactgccacagacgagttccggtagttgtcacgcacctaaacccgcttgccaactgggtagtctggactcgctcagtgccgaggtcggagtccggagccgcagtcttggtctcgtaagcagcgcgtgcagttccagcccggacggtctcctaagcactcatgccagcagccttgattgctttgcacccgcatgttcccggagtctcgatagcactaggtcacttcctaaggcctctaagtccgaagaacgtcctagcagcccggatactagcacgcctggatcacgccgtctgtcgcctccaccaagccccctcccccctcctccaccgcctagcgcacatagaaagctctccaatccccgaggtggcgaaggctctgaaagtcagccgtgtgaggtgttgaccccaagccccccaggtctcggtcaccacgaactcattaaactgaattggttgctcgcaaaggccttatgggtgctggctagacggtgctacactcttcaggaggagaacaaacagctaaggcgagctggctgtccttatcaggcagatgaaaaggtaaagaggttgaaggtgaagagggctgagctgaccggcctggctagacggctggcagatcgagccagagagcttcaagagaccaatctgagagccgtctccgctcccatccctggtgaatcgtgcgccggtctcgaactgtgccaggtatttgccagacagagggctagagacttgagcgagcaggcttcagcaccgttagccaaggacaaacagattgaggaactgaggcaggaatgccatctgctgcaggctagggtcgcttcaggaccttgctccgatttgcatacaggcagagggggtccctgtacacagtggctaaacgtgagagatctggaccggctgcagagagaaagccagcgggaggtcttgaggctccaaagacagttaatgctgcaacaggggaatgggggagcttggcctgaggcagggggacagtctgctacatgtgaggaggtgcgtcgccaaatgttagcgttggagagggaactggatcagcggcgtagggaatgtcaagagctgggaacgcaggctgctcctgccaggcgtcggggagaggaggccgaaacccagcttcaggccgcactcttgaagaacgcctggctggcggaagaaaatgggaggctacaggccaagaccgattgggtgcgcaaggtggaggcggagaatagcgaggtcagggggcatctggggcgagcatgtcaggagagagacgctagcggcctaattgctgagcaattgcttcagcaagcagcccgagggcaagatcgtcagcagcagctgcaacgagatccgcaaaaggccctctgcgatctgcatcccagctggaaagagatccaggcgctgcagtgtcgacccggtcacccccctgaacagccctgggagaccagccagatgccagaatctcaagttaaggggtctcgcaggcctaagttccatgcacgcccagaagattacgccgtttcccagcccaacagggacatacaagagaagagagaagcttcattagaagagtctcctgtggcgctcggtgagagtgctagcgtgccacaggtgtcggagactgttcccgcttcccagcctttatcaaaaaaaacctcatcgcaatccaactctagcagcgaaggatccatgtgggccacggtgccaagttcacccacactggatcgcgacacagcttctgaagttgacgatctggaacctgacagcgtgagcctggccctggaaatggggggttctgcagcgcctgccgctcccaagctgaaaatatttatggcccagtacaattataatccctttgaagggcctaacgatcacccagagggtgaactacctctgacagcaggtgattatatctatattttcggtgatatggacgaagatggtttttacgagggcgagctcgatgatgggaggagagggcttgttccttctaactttgtggagcagatccctgatagctatataccgggttgtctccctgccaagtctcctgacctgggtccctctcagctgcccgctggccaggacgaggcccttgaggaggacagtctcctgtcagggaaggcacaaggaatggtagatcgtggcctgtgccagatggtgcgggtcggaagtaaaacagaggtagctacagagattctcgatactaagactgaggcctgccagctcggtcttcttcagtcaatgggcaagcagggactatccaggccccttctgggtacaaaaggggtgctccgaatggctccaatgcagctgcaccttcaaaacgtgactgctacctcggccaacatcacatgggtatatagttctcatcggcatccgcatgtggtctacctcgacgacagagagcacgcgctgacgcctgcgggtgtgtcctgctacacatttcaggggctgtgtccaggaacacactaccgggtccgcgtggaagttagacttccctgggacctgctgcaagtctactggggaactatgagcagtacagtcacgttcgacacactcctggccggtcccccatacccacccctggacgtcctggtggagagacacgcatccccaggtgtgctggtggtgtcatggctgcctgtaaccatcgactcagcgggtagttccaacggagtgcaagttacaggatacgctgtatatgccgacggcctgaaggtctgcgaggtcgcagacgcgacggccggttcaactgtgctggagttttcccaactgcaggtcccattgacatggcaaaaagtatctgtacggacgatgagcctttgcggcgagagcctcgactccgtgcccgcacagattccggaagattttttcatgtgtcaccgctggccggagaccccccctttttcctacacttgtggggatccctcaacctatagggtcacatttcccgtgtgtcctcagaaattgtcactcgcgcctccctccgcaaaagcgtctccccataatcctggaagctgcggcgagccccaggcaaaatttcttgaggccttctttgaagagcctcctcggagacagtcccctgtatccaacctcgggtcagaaggggagtgtccatcctcgggcgcagggtcccaggcccaagagctggctgaagcatgggaaggatgcaggaaggacctgttgttccaaaagagccctcagaaccataggcctcccagtgtgtccgatcaacctggcgagaaggaaaattgctaccaacatatgggcacttcgaaatctccagcccctggattcatccatctccgcacggagtgcggtccacgcaaggagccatgccaggaaaaagccgctttggagcgcgtactgaggcaaaagcaagacgcacagggttttactccaccccagctgggggcaagccagcagtacgcgagcgactttcataacgtcctcaaggaagagcaagaagctctgtgcctggacctaagagggactgaaagacgcgaagagcgccgtgaacctgagccacacagccggcagggccaggccctcggcgttaagcgcggatgccaacttcatgagcctagctctgcactgtgtccagccccatctgccaaggtgattaagatgcctagaggcggaccacagcagctgggtacaggagcaaatacacccgcacgcgtctttgtcgctctttcagactataacccactcgtaatgagtgcaaatcttaaggcagccgaggaggaactagtgttccaaaagcgtcaactgttgcgagtgtgggggtcccaggatacgcatgacttctacctgtccgaatgcaacagacaggtaggaaatatacccggacggttggtagccgagatggaggttggaactgaacagacggaccgacgatggcgctctcccgctcagggccatctgcccagcgtggcacacctcgaggactttcagggactaatcatcccacagggatcatccctagttctgcaaggcaattccaaacgactcccactgtggactcctaaaatcatgatcgccgcattggactatgatccaggggacggccagatgggtggccaggggaaggggcgactggccctcagagcaggcgatgtggtcatggtgtatgggcctatggatgatcagggtttttactatggggaactcgggggacaccgaggcttggtcccagcccacctgttggatcatatgtctcttcatggtcactag

SEQ ID NO: 46454 - DNA, 5475 bp, Artificial Sequence
  derived and/or modified sequence
cggaacggcggcgcttcgctgcccgggagcgccagctgcgtgaggaggccgagcgggagcggcggcagctggctgaccgtctgcgctccaagtgggaggcacagcgcagccgggagttgcggcagctgcaagaggagatgcagcgggaacgcgaggccgagatccggcagctgctgcgctggaaggaggccgagcagcggcagctgcagcagctgctgcaccgggagcgcgatggcgtggtgcgccaagcccgggagctgcagcgccagctggccgaggagctggtgaaccgcggccactgtagccgcccgggggcgtccgaggtttccgcggcgcagtgccgctgtcgcctgcaggaagtgttggcgcagcttcgctggcagactgacggcgagcaggcggcgcgcatccgctatctgcaggcggcgctggaggtggagcgccagctcttcctcaagtacatcctggcgcacttccgcgggcacccggctttgtcgggatcaccggacccccaagctgtgcattccttggaagaaccgctgccccagacctccagcggctcttgccacgcccccaaacccgcctgccaactcggatctctagacagcctgagtgctgaagtcggtgtgcgctcccgctcgctaggcctggtgtcctctgcgtgctccagctccccagacggcctgctctccacgcacgccagctcccttgattgcttcgcacctgcgtgttcccgctcgcttgacagcacccggagcctccccaaggcctccaaatccgaggagcggccctcctcaccagacacctccacccctggctcccggaggctctcgccgccaccatcgccactcccgccgccaccaccaccgtcagcccacaggaaactcagcaacccgcggggaggagaaggctctgagagccagccctgcgaagtcctgactccctcacccccgggcctgggccaccacgagctgataaagctgaactggctgctggccaaggcgttgtgggtgctggcgcgccgctgttataccctgcaagaggagaacaagcagctgcggcgtgcaggctgcccctaccaggcagacgagaaggtgaagcggctcaaggtaaagcgcgcggagctgaccgggctcgcgcggcgcctagctgaccgcgcccgcgagctgcaggagaccaacctccgggccgtgagcgcgcctatacccggcgagagttgcgccggcctggagctgtgccaagtctttgcccgccagcgcgctcgggacctgtcggagcaggcgagcgcgccgctggccaaggacaagcagatcgaagagctgcggcaggagtgccacctcctgcaggcgcgtgtcgcctcgggtccctgcagcgacctgcatactggaaggggcggcccctgcacccagtggctcaacgtcagagacttagaccgcctgcagcgcgagtcccagcgggaagtgctgcgcctgcagaggcagttgatgcttcagcagggcaacggtggcgcttggcccgaggcgggcggccagagcgcaacctgcgaggaggtgcgacggcagatgctggcgctggagcgcgagctggaccagcggcggcgcgagtgccaggagctgggcacgcaggcggccccggcgcggcgacgtggcgaggaggccgagacacagctgcaggcggcgctgctcaaaaacgcctggctggcggaggagaatgggcggctgcaggccaagaccgactgggtgcggaaggtggaggctgagaatagcgaagtgcgcggccacctgggccgcgcgtgtcaagagcgcgatgcctccggcttgatcgccgaacagctgctgcagcaggcggcgcgcgggcaggacaggcagcagcagctgcaacgcgacccgcagaaggccctgtgtgacctccatccttcctggaaggagatacaggcgctccagtgtcggcctggtcaccctcctgaacagccctgggagaccagtcaaatgccggagtcccaagttaaaggtagcagaaggcccaagttccacgcacggcctgaagactacgcagtgtcacagcccaacagagacatacaggagaaaagggaagcctccctcgaggagagcccagttgcccttggggagtcagccagtgtcccccaagtttcagagacagtccctgccagccaacctctgtccaagaaaaccagctcccagtcaaactcctcctctgaggggtcgatgtgggccaccgtgccgtcctcccctactctggacagggacacagccagtgaggtggatgacctggagcctgacagcgtgtccctggccctggaaatggggggctcggcggctcctgctgcccccaagctcaagatcttcatggctcagtataactacaacccatttgaggggcccaatgatcaccctgagggtgagctgcccctcacagctggggactacatatatatcttcggggacatggatgaggatggcttctatgagggggagcttgacgatggccggcgggggctggtgccctccaacttcgtggagcagattccggacagctacatcccaggctgcctgcctgccaaatcccctgatcttggccccagtcaactcccagcggggcaggatgaagctctggaggaagacagcttattatctgggaaagcccagggaatggtggacagagggctgtgccagatggtcagggtgggctccaagacagaagtagcaacagagatcctggataccaagacggaagcctgccagctgggcttgctgcagagcatggggaagcagggcctctccagaccccttctggggaccaaaggggtgctccgtatggctcccatgcagctacacctgcagaatgtcacagccacatcagccaacatcacctgggtctacagcagccaccgccacccccatgtggtatatcttgatgaccgagagcatgccctgaccccagcgggcgtgagctgctacaccttccagggcctgtgccccggcacgcactaccgggtgcgggtggaggtgcggctgccatgggacttgctgcaggtgtattggggaactatgtcctccaccgtcaccttcgacacactcttggcaggacctccctacccaccgctggatgtgctggtggagcgccatgcctcgccaggtgtcctggtggtcagctggctccctgtgaccattgactcagctgggtcctccaatggagtccaggtcaccggttatgctgtgtatgcagatgggcttaaggtttgtgaggtcgccgatgccactgctgggagcaccgtattggaattctcccagctacaggtgcccctcacgtggcagaaggtctcagtgagaaccatgtcactctgtggtgagtccctggattcagtgcctgctcagatccccgaggacttcttcatgtgtcaccgatggccagagactccaccctttagctacacttgtggcgacccatccacctacagagtcaccttccccgtctgcccccagaagctgtcactggctcctccgagtgccaaggccagcccccacaaccctggaagctgcggggagccccaggccaagttcctagaagcattctttgaagaacccccaaggaggcaatccccagtgtccaacctgggctcagaaggagaatgtccgagttcaggggctggcagccaagcccaggagcttgcagaggcctgggagggctgtagaaaggacctgctctttcagaagagtccccagaaccacaggccaccttcagtcagtgaccagcctggggagaaggaaaattgctaccagcacatgggcaccagcaaaagccctgctccaggattcatccatctacgcaccgagtgtgggcccaggaaagaaccgtgtcaggaaaaggctgcccttgagagggtacttcggcaaaagcaagatgcccaagggttcacacctccccagctgggcgccagccaacagtatgcatctgacttccataacgttttgaaggaggagcaggaggcactgtgcttggatctgcggggcacagagaggcgagaggagaggagggagcctgagccccacagcaggcaaggacaagctctgggggtgaagagagggtgccagctccatgagcccagctcggcactgtgtccagctccatccgccaaagtcatcaagatgcccaggggtggcccccaacagctggggacgggggccaacactccagccagggtctttgtggccctctctgattacaaccccctggtgatgtctgccaacctcaaggctgcagaggaggagctggtcttccagaaaaggcagttgctaagagtgtggggctctcaggacacccatgatttctacctcagcgagtgcaacaggcaagtgggcaatatccccgggcgcctagtggctgagatggaggtggggacagagcagactgataggaggtggcgttctccggcccaagggcacctgccttctgtggcccacctcgaggactttcaggggctcatcatcccccagggttcctccctggtgctccaggggaactccaagagactcccactgtggactccaaagatcatgatagcagctctggactatgatcctggggatgggcaaatggggggccaggggaagggcaggctggcgctgagggcaggagacgtggtcatggtttacgggcccatggatgaccaaggattctattatggagagttgggcggccacaggggcctggttcctgcccacctgctggatcacatgtccctccatggacactgagcaagcatccttgcccaggtagtggcctctggctgctcacaccctgccagaggagaagcaagcgttcagaccctcacaccagcacccctcctcaccaccataagtagcatgtgctccaagtgccactgtgttaaactgatggtagtccttaagtgtcccctaggctctgaaagtagcaggacttaagcctgagttatttgcaaaagcaaacacaacaagccaacccctgagagtctgagaagccatttcaaagttgctgataactatggcaggtatacggagaagcgcctttttctgtggccaatgtgtgttttctctgggaggttaaggttatctgtccattgccttgtacgaaagtctcaagaaaagtctacatcttaaaaaagaaaaagcaatctgagtgttatttttgggatgtgagggtgatctggctgcgacatgtgtcaccccattgatcatcagggttgattcggctgatctggctgactaggcgggtatccccttcctcccgcaccactccatgtgcgtccctccagaagctgtgcgctcaatggaagaggatgaccatccccgatagaggacgatcggtcttcagtcaagagtataagagtagctgcgctcccctgctagaacctccaaacgagctctcagaatgttatttttctgtcttatgtccaacccctcattaaaatgttcatag

SEQ ID NO: 46455 - DNA, 5784 bp, Artificial Sequence
  derived and/or modified sequence
ccagccacctgacccaaatacaccacctgaacccacgaccaggtatgcccacaccccatgggtggccttaacacacacaccctgcccctttctccaagtacaggagcagcagcccagacttccctcggggcaccgcggcctgcttgggactgcacagtgcctgggagggtgcctggggagggtcacaagggacttggtgctagaagcaggaaaagtgtagggaccggaaaagcccccgtgcatcctggaagggacatgggccagtttgagcaggggtgtgggagtccagccctggccttgccaggtggagaggcgcctgggccagacatccgcggcaggaggcgggggaacatgccaagaggcggaaggggcacgcggagacccccagggggcgccggaaggggcgcgccgggcggtcggcggcggccgttggcgagctgaggcctgccaggcgaagtctggagaccagccgggccgcggccgcaatggccaaggactcgcccagccccttgggcgcgtcgcccaagaagccgggctgctccagcccggcggcggcagtgctggagaaccagaggcgggagctggagaagctacgggcggagctggaggcggagcgggcaggctggcgggcggaacggcggcgcttcgctgcccgggagcgccagctgcgtgaggaggccgagcgggagcggcggcagctggctgaccgtctgcgctccaagtgggaggcacagcgcagccgggagttgcggcagctgcaagaggagatgcagcgggaacgcgaggccgagatccggcagctgctgcgctggaaggaggccgagcagcggcagctgcagcagctgctgcaccgggagcgcgatggcgtggtgcgccaagcccgggagctgcagcgccagctggccgaggagctggtgaaccgcggccactgtagccgcccgggggcgtccgaggtttccgcggcgcagtgccgctgtcgcctgcaggaagtgttggcgcagcttcgctggcagactgacggcgagcaggcggcgcgcatccgctatctgcaggcggcgctggaggtggagcgccagctcttcctcaagtacatcctggcgcacttccgcgggcacccggctttgtcgggatcaccggacccccaagctgtgcattccttggaagaaccgctgccccagacctccagcggctcttgccacgcccccaaacccgcctgccaactcggatctctagacagcctgagtgctgaagtcggtgtgcgctcccgctcgctaggcctggtgtcctctgcgtgctccagctccccagacggcctgctctccacgcacgccagctcccttgattgcttcgcacctgcgtgttcccgctcgcttgacagcacccggagcctccccaaggcctccaaatccgaggagcggccctcctcaccagacacctccacccctggctcccggaggctctcgccgccaccatcgccactcccgccgccaccaccaccgtcagcccacaggaaactcagcaacccgcggggaggagaaggctctgagagccagccctgcgaagtcctgactccctcacccccgggcctgggccaccacgagctgataaagctgaactggctgctggccaaggcgttgtgggtgctggcgcgccgctgttataccctgcaagaggagaacaagcagctgcggcgtgcaggctgcccctaccaggcagacgagaaggtgaagcggctcaaggtaaagcgcgcggagctgaccgggctcgcgcggcgcctagctgaccgcgcccgcgagctgcaggagaccaacctccgggccgtgagcgcgcctatacccggcgagagttgcgccggcctggagctgtgccaagtctttgcccgccagcgcgctcgggacctgtcggagcaggcgagcgcgccgctggccaaggacaagcagatcgaagagctgcggcaggagtgccacctcctgcaggcgcgtgtcgcctcgggtccctgcagcgacctgcatactggaaggggcggcccctgcacccagtggctcaacgtcagagacttagaccgcctgcagcgcgagtcccagcgggaagtgctgcgcctgcagaggcagttgatgcttcagcagggcaacggtggcgcttggcccgaggcgggcggccagagcgcaacctgcgaggaggtgcgacggcagatgctggcgctggagcgcgagctggaccagcggcggcgcgagtgccaggagctgggcacgcaggcggccccggcgcggcgacgtggcgaggaggccgagacacagctgcaggcggcgctgctcaaaaacgcctggctggcggaggagaatgggcggctgcaggccaagaccgactgggtgcggaaggtggaggctgagaatagcgaagtgcgcggccacctgggccgcgcgtgtcaagagcgcgatgcctccggcttgatcgccgaacagctgctgcagcaggcggcgcgcgggcaggacaggcagcagcagctgcaacgcgacccgcagaaggccctgtgtgacctccatccttcctggaaggagatacaggcgctccagtgtcggcctggtcaccctcctgaacagccctgggagaccagtcaaatgccggagtcccaagttaaaggtagcagaaggcccaagttccacgcacggcctgaagactacgcagtgtcacagcccaacagagacatacaggagaaaagggaagcctccctcgaggagagcccagttgcccttggggagtcagccagtgtcccccaagtttcagagacagtccctgccagccaacctctgtccaagaaaaccagctcccagtcaaactcctcctctgaggggtcgatgtgggccaccgtgccgtcctcccctactctggacagggacacagccagtgaggtggatgacctggagcctgacagcgtgtccctggccctggaaatggggggctcggcggctcctgctgcccccaagctcaagatcttcatggctcagtataactacaacccatttgaggggcccaatgatcaccctgagggtgagctgcccctcacagctggggactacatatatatcttcggggacatggatgaggatggcttctatgagggggagcttgacgatggccggcgggggctggtgccctccaacttcgtggagcagattccggacagctacatcccaggctgcctgcctgccaaatcccctgatcttggccccagtcaactcccagcggggcaggatgaagctctggaggaagacagcttattatctgggaaagcccagggaatggtggacagagggctgtgccagatggtcagggtgggctccaagacagaagtagcaacagagatcctggataccaagacggaagcctgccagctgggcttgctgcagagcatggggaagcagggcctctccagaccccttctggggaccaaaggggtgctccgtatggctcccatgcagctacacctgcagaatgtcacagccacatcagccaacatcacctgggtctacagcagccaccgccacccccatgtggtatatcttgatgaccgagagcatgccctgaccccagcgggcgtgagctgctacaccttccagggcctgtgccccggcacgcactaccgggtgcgggtggaggtgcggctgccatgggacttgctgcaggtgtattggggaactatgtcctccaccgtcaccttcgacacactcttggcaggacctccctacccaccgctggatgtgctggtggagcgccatgcctcgccaggtgtcctggtggtcagctggctccctgtgaccattgactcagctgggtcctccaatggagtccaggtcaccggttatgctgtgtatgcagatgggcttaaggtttgtgaggtcgccgatgccactgctgggagcaccgtattggaattctcccagctacaggtgcccctcacgtggcagaaggtctcagtgagaaccatgtcactctgtggtgagtccctggattcagtgcctgctcagatccccgaggacttcttcatgtgtcaccgatggccagagactccaccctttagctacacttgtggcgacccatccacctacagagtcaccttccccgtctgcccccagaagctgtcactggctcctccgagtgccaaggccagcccccacaaccctggaagctgcggggagccccaggccaagttcctagaagcattctttgaagaacccccaaggaggcaatccccagtgtccaacctgggctcagaaggagaatgtccgagttcaggggctggcagccaagcccaggagcttgcagaggcctgggagggctgtagaaaggacctgctctttcagaagagtccccagaaccacaggccaccttcagtcagtgaccagcctggggagaaggaaaattgctaccagcacatgggcaccagcaaaagccctgctccaggattcatccatctacgcaccgagtgtgggcccaggaaagaaccgtgtcaggaaaaggctgcccttgagagggtacttcggcaaaagcaagatgcccaagggttcacacctccccagctgggcgccagccaacagtatgcatctgacttccataacgttttgaaggaggagcaggaggcactgtgcttggatctgcggggcacagagaggcgagaggagaggagggagcctgagccccacagcaggcaaggacaagctctgggggtgaagagagggtgccagctccatgagcccagctcggcactgtgtccagctccatccgccaaagtcatcaagatgcccaggggtggcccccaacagctggggacgggggccaacactccagccagggtctttgtggccctctctgattacaaccccctggtgatgtctgccaacctcaaggctgcagaggaggagctggtcttccagaaaaggcagttgctaagagtgtggggctctcaggacacccatgatttctacctcagcgagtgcaacaggcaagtgggcaatatccccgggcgcctagtggctgagatggaggtggggacagagcagactgataggaggtggcgttctccggcccaagggcacctgccttctgtggcccacctcgaggactttcaggggctcatcatcccccagggttcctccctggtgctccaggggaactccaagagactcccactgtggactccaaagatcatgatagcagctctggactatgatcctggggatgggcaaatggggggccaggggaagggcaggctggcgctgagggcaggagacgtggtcatggtttacgggcccatggatgaccaaggattctattatggagagttgggcggccacaggggcctggttcctgcccacctgctggatcacatgtccctccatggacactgagcaagcatccttgcccaggtagtggcctctggctgctcacaccctgccagaggagaagcaagcgttcagaccctcacaccagcacccctcctcaccaccataagtagcatgtgctccaagtgccactgtgttaaactgatggtagtccttaagtgtcccctaggctctgaaagtagcaggacttaagcctgagttatttgcaaaagcaaacacaacaagccaacccctgagagtctgagaagccatttcaaagttgctgataactatggcaggtatacggagaagcgcctttttctgtggccaatgtgtgttttctctgggaggttaaggttatctgtccattgccttgtacgaaagtctcaagaaaagtctacatctt

SEQ ID NO: 46456 - DNA, 4638 bp, Artificial Sequence
  derived and/or modified sequence
atgcagagagagagagaggccgagatcagacagctgctgagatggaaggaggccgagcagagacagctgcagcagctgctgcacagagagagagacggcgtggtgagacaggccagagagctgcagagacagctggccgaggagctggtgaacagaggccactgcagcagacccggcgccagcgaggtgagcgccgcccagtgcagatgcagactgcaggaggtgctggcccagctgagatggcagaccgacggcgagcaggccgccagaatcagatacctgcaggccgccctggaggtggagagacagctgttcctgaagtacatcctggcccacttcagaggccaccccgccctgagcggcagccccgacccccaggccgtgcacagcctggaggagcccctgccccagaccagcagcggcagctgccacgcccccaagcccgcctgccagctgggcagcctggacagcctgagcgccgaggtgggcgtgagaagcagaagcctgggcctggtgagcagcgcctgcagcagcagccccgacggcctgctgagcacccacgccagcagcctggactgcttcgcccccgcctgcagcagaagcctggacagcaccagaagcctgcccaaggccagcaagagcgaggagagacccagcagccccgacaccagcacccccggcagcagaagactgagccccccccccagccccctgccccccccccccccccccagcgcccacagaaagctgagcaaccccagaggcggcgagggcagcgagagccagccctgcgaggtgctgacccccagcccccccggcctgggccaccacgagctgatcaagctgaactggctgctggccaaggccctgtgggtgctggccagaagatgctacaccctgcaggaggagaacaagcagctgagaagagccggctgcccctaccaggccgacgagaaggtgaagagactgaaggtgaagagagccgagctgaccggcctggccagaagactggccgacagagccagagagctgcaggagaccaacctgagagccgtgagcgcccccatccccggcgagagctgcgccggcctggagctgtgccaggtgttcgccagacagagagccagagacctgagcgagcaggccagcgcccccctggccaaggacaagcagatcgaggagctgagacaggagtgccacctgctgcaggccagagtggccagcggcccctgcagcgacctgcacaccggcagaggcggcccctgcacccagtggctgaacgtgagagacctggacagactgcagagagagagccagagagaggtgctgagactgcagagacagctgatgctgcagcagggcaacggcggcgcctggcccgaggccggcggccagagcgccacctgcgaggaggtgagaagacagatgctggccctggagagagagctggaccagagaagaagagagtgccaggagctgggcacccaggccgcccccgccagaagaagaggcgaggaggccgagacccagctgcaggccgccctgctgaagaacgcctggctggccgaggagaacggcagactgcaggccaagaccgactgggtgagaaaggtggaggccgagaacagcgaggtgagaggccacctgggcagagcctgccaggagagagacgccagcggcctgatcgccgagcagctgctgcagcaggccgccagaggccaggacagacagcagcagctgcagagagacccccagaaggccctgtgcgacctgcaccccagctggaaggagatccaggccctgcagtgcagacccggccacccccccgagcagccctgggagaccagccagatgcccgagagccaggtgaagggcagcagaagacccaagttccacgccagacccgaggactacgccgtgagccagcccaacagagacatccaggagaagagagaggccagcctggaggagagccccgtggccctgggcgagagcgccagcgtgccccaggtgagcgagaccgtgcccgccagccagcccctgagcaagaagaccagcagccagagcaacagcagcagcgagggcagcatgtgggccaccgtgcccagcagccccaccctggacagagacaccgccagcgaggtggacgacctggagcccgacagcgtgagcctggccctggagatgggcggcagcgccgcccccgccgcccccaagctgaagatcttcatggcccagtacaactacaaccccttcgagggccccaacgaccaccccgagggcgagctgcccctgaccgccggcgactacatctacatcttcggcgacatggacgaggacggcttctacgagggcgagctggacgacggcagaagaggcctggtgcccagcaacttcgtggagcagatccccgacagctacatccccggctgcctgcccgccaagagccccgacctgggccccagccagctgcccgccggccaggacgaggccctggaggaggacagcctgctgagcggcaaggcccagggcatggtggacagaggcctgtgccagatggtgagagtgggcagcaagaccgaggtggccaccgagatcctggacaccaagaccgaggcctgccagctgggcctgctgcagagcatgggcaagcagggcctgagcagacccctgctgggcaccaagggcgtgctgagaatggcccccatgcagctgcacctgcagaacgtgaccgccaccagcgccaacatcacctgggtgtacagcagccacagacacccccacgtggtgtacctggacgacagagagcacgccctgacccccgccggcgtgagctgctacaccttccagggcctgtgccccggcacccactacagagtgagagtggaggtgagactgccctgggacctgctgcaggtgtactggggcaccatgagcagcaccgtgaccttcgacaccctgctggccggccccccctacccccccctggacgtgctggtggagagacacgccagccccggcgtgctggtggtgagctggctgcccgtgaccatcgacagcgccggcagcagcaacggcgtgcaggtgaccggctacgccgtgtacgccgacggcctgaaggtgtgcgaggtggccgacgccaccgccggcagcaccgtgctggagttcagccagctgcaggtgcccctgacctggcagaaggtgagcgtgagaaccatgagcctgtgcggcgagagcctggacagcgtgcccgcccagatccccgaggacttcttcatgtgccacagatggcccgagaccccccccttcagctacacctgcggcgaccccagcacctacagagtgaccttccccgtgtgcccccagaagctgagcctggccccccccagcgccaaggccagcccccacaaccccggcagctgcggcgagccccaggccaagttcctggaggccttcttcgaggagccccccagaagacagagccccgtgagcaacctgggcagcgagggcgagtgccccagcagcggcgccggcagccaggcccaggagctggccgaggcctgggagggctgcagaaaggacctgctgttccagaagagcccccagaaccacagaccccccagcgtgagcgaccagcccggcgagaaggagaactgctaccagcacatgggcaccagcaagagccccgcccccggcttcatccacctgagaaccgagtgcggccccagaaaggagccctgccaggagaaggccgccctggagagagtgctgagacagaagcaggacgcccagggcttcacccccccccagctgggcgccagccagcagtacgccagcgacttccacaacgtgctgaaggaggagcaggaggccctgtgcctggacctgagaggcaccgagagaagagaggagagaagagagcccgagccccacagcagacagggccaggccctgggcgtgaagagaggctgccagctgcacgagcccagcagcgccctgtgccccgcccccagcgccaaggtgatcaagatgcccagaggcggcccccagcagctgggcaccggcgccaacacccccgccagagtgttcgtggccctgagcgactacaaccccctggtgatgagcgccaacctgaaggccgccgaggaggagctggtgttccagaagagacagctgctgagagtgtggggcagccaggacacccacgacttctacctgagcgagtgcaacagacaggtgggcaacatccccggcagactggtggccgagatggaggtgggcaccgagcagaccgacagaagatggagaagccccgcccagggccacctgcccagcgtggcccacctggaggacttccagggcctgatcatcccccagggcagcagcctggtgctgcagggcaacagcaagagactgcccctgtggacccccaagatcatgatcgccgccctggactacgaccccggcgacggccagatgggcggccagggcaagggcagactggccctgagagccggcgacgtggtgatggtgtacggccccatggacgaccagggcttctactacggcgagctgggcggccacagaggcctggtgcccgcccacctgctggaccacatgagcctgcacggccactag

SEQ ID NO: 46457 - DNA, 4920 bp, Artificial Sequence
  derived and/or modified sequence
atggccaaggacagccccagccccctgggcgccagccccaagaagcccggctgcagcagccccgccgccgccgtgctggagaaccagagaagagagctggagaagctgagagccgagctggaggccgagagagccggctggagagccgagagaagaagattcgccgccagagagagacagctgagagaggaggccgagagagagagaagacagctggccgacagactgagaagcaagtgggaggcccagagaagcagagagctgagacagctgcaggaggagatgcagagagagagagaggccgagatcagacagctgctgagatggaaggaggccgagcagagacagctgcagcagctgctgcacagagagagagacggcgtggtgagacaggccagagagctgcagagacagctggccgaggagctggtgaacagaggccactgcagcagacccggcgccagcgaggtgagcgccgcccagtgcagatgcagactgcaggaggtgctggcccagctgagatggcagaccgacggcgagcaggccgccagaatcagatacctgcaggccgccctggaggtggagagacagctgttcctgaagtacatcctggcccacttcagaggccaccccgccctgagcggcagccccgacccccaggccgtgcacagcctggaggagcccctgccccagaccagcagcggcagctgccacgcccccaagcccgcctgccagctgggcagcctggacagcctgagcgccgaggtgggcgtgagaagcagaagcctgggcctggtgagcagcgcctgcagcagcagccccgacggcctgctgagcacccacgccagcagcctggactgcttcgcccccgcctgcagcagaagcctggacagcaccagaagcctgcccaaggccagcaagagcgaggagagacccagcagccccgacaccagcacccccggcagcagaagactgagccccccccccagccccctgccccccccccccccccccagcgcccacagaaagctgagcaaccccagaggcggcgagggcagcgagagccagccctgcgaggtgctgacccccagcccccccggcctgggccaccacgagctgatcaagctgaactggctgctggccaaggccctgtgggtgctggccagaagatgctacaccctgcaggaggagaacaagcagctgagaagagccggctgcccctaccaggccgacgagaaggtgaagagactgaaggtgaagagagccgagctgaccggcctggccagaagactggccgacagagccagagagctgcaggagaccaacctgagagccgtgagcgcccccatccccggcgagagctgcgccggcctggagctgtgccaggtgttcgccagacagagagccagagacctgagcgagcaggccagcgcccccctggccaaggacaagcagatcgaggagctgagacaggagtgccacctgctgcaggccagagtggccagcggcccctgcagcgacctgcacaccggcagaggcggcccctgcacccagtggctgaacgtgagagacctggacagactgcagagagagagccagagagaggtgctgagactgcagagacagctgatgctgcagcagggcaacggcggcgcctggcccgaggccggcggccagagcgccacctgcgaggaggtgagaagacagatgctggccctggagagagagctggaccagagaagaagagagtgccaggagctgggcacccaggccgcccccgccagaagaagaggcgaggaggccgagacccagctgcaggccgccctgctgaagaacgcctggctggccgaggagaacggcagactgcaggccaagaccgactgggtgagaaaggtggaggccgagaacagcgaggtgagaggccacctgggcagagcctgccaggagagagacgccagcggcctgatcgccgagcagctgctgcagcaggccgccagaggccaggacagacagcagcagctgcagagagacccccagaaggccctgtgcgacctgcaccccagctggaaggagatccaggccctgcagtgcagacccggccacccccccgagcagccctgggagaccagccagatgcccgagagccaggtgaagggcagcagaagacccaagttccacgccagacccgaggactacgccgtgagccagcccaacagagacatccaggagaagagagaggccagcctggaggagagccccgtggccctgggcgagagcgccagcgtgccccaggtgagcgagaccgtgcccgccagccagcccctgagcaagaagaccagcagccagagcaacagcagcagcgagggcagcatgtgggccaccgtgcccagcagccccaccctggacagagacaccgccagcgaggtggacgacctggagcccgacagcgtgagcctggccctggagatgggcggcagcgccgcccccgccgcccccaagctgaagatcttcatggcccagtacaactacaaccccttcgagggccccaacgaccaccccgagggcgagctgcccctgaccgccggcgactacatctacatcttcggcgacatggacgaggacggcttctacgagggcgagctggacgacggcagaagaggcctggtgcccagcaacttcgtggagcagatccccgacagctacatccccggctgcctgcccgccaagagccccgacctgggccccagccagctgcccgccggccaggacgaggccctggaggaggacagcctgctgagcggcaaggcccagggcatggtggacagaggcctgtgccagatggtgagagtgggcagcaagaccgaggtggccaccgagatcctggacaccaagaccgaggcctgccagctgggcctgctgcagagcatgggcaagcagggcctgagcagacccctgctgggcaccaagggcgtgctgagaatggcccccatgcagctgcacctgcagaacgtgaccgccaccagcgccaacatcacctgggtgtacagcagccacagacacccccacgtggtgtacctggacgacagagagcacgccctgacccccgccggcgtgagctgctacaccttccagggcctgtgccccggcacccactacagagtgagagtggaggtgagactgccctgggacctgctgcaggtgtactggggcaccatgagcagcaccgtgaccttcgacaccctgctggccggccccccctacccccccctggacgtgctggtggagagacacgccagccccggcgtgctggtggtgagctggctgcccgtgaccatcgacagcgccggcagcagcaacggcgtgcaggtgaccggctacgccgtgtacgccgacggcctgaaggtgtgcgaggtggccgacgccaccgccggcagcaccgtgctggagttcagccagctgcaggtgcccctgacctggcagaaggtgagcgtgagaaccatgagcctgtgcggcgagagcctggacagcgtgcccgcccagatccccgaggacttcttcatgtgccacagatggcccgagaccccccccttcagctacacctgcggcgaccccagcacctacagagtgaccttccccgtgtgcccccagaagctgagcctggccccccccagcgccaaggccagcccccacaaccccggcagctgcggcgagccccaggccaagttcctggaggccttcttcgaggagccccccagaagacagagccccgtgagcaacctgggcagcgagggcgagtgccccagcagcggcgccggcagccaggcccaggagctggccgaggcctgggagggctgcagaaaggacctgctgttccagaagagcccccagaaccacagaccccccagcgtgagcgaccagcccggcgagaaggagaactgctaccagcacatgggcaccagcaagagccccgcccccggcttcatccacctgagaaccgagtgcggccccagaaaggagccctgccaggagaaggccgccctggagagagtgctgagacagaagcaggacgcccagggcttcacccccccccagctgggcgccagccagcagtacgccagcgacttccacaacgtgctgaaggaggagcaggaggccctgtgcctggacctgagaggcaccgagagaagagaggagagaagagagcccgagccccacagcagacagggccaggccctgggcgtgaagagaggctgccagctgcacgagcccagcagcgccctgtgccccgcccccagcgccaaggtgatcaagatgcccagaggcggcccccagcagctgggcaccggcgccaacacccccgccagagtgttcgtggccctgagcgactacaaccccctggtgatgagcgccaacctgaaggccgccgaggaggagctggtgttccagaagagacagctgctgagagtgtggggcagccaggacacccacgacttctacctgagcgagtgcaacagacaggtgggcaacatccccggcagactggtggccgagatggaggtgggcaccgagcagaccgacagaagatggagaagccccgcccagggccacctgcccagcgtggcccacctggaggacttccagggcctgatcatcccccagggcagcagcctggtgctgcagggcaacagcaagagactgcccctgtggacccccaagatcatgatcgccgccctggactacgaccccggcgacggccagatgggcggccagggcaagggcagactggccctgagagccggcgacgtggtgatggtgtacggccccatggacgaccagggcttctactacggcgagctgggcggccacagaggcctggtgcccgcccacctgctggaccacatgagcctgcacggccactag

SEQ ID NO: 46458 - protein, 172 aa, Artificial Sequence
  derived and/or modified sequence
MATITEKEVQQWYKGFIKDCPSGQLDAAGFQKIYKQFFPFGDPTKFATFVFNVFDENKDGRIEFSEFIQALSVTSRGTLDEKLRWAFKLYDLDNDGYITRNEMLDIVDAIYQMVGNTVELPEEENTPEKRVDRIFAMMDKNADGKLTLQEFQEGSKADPSIVQALSLYDGLV

SEQ ID NO: 46459 - DNA, 519 bp, Artificial Sequence
  derived and/or modified sequence
atggccacaatcacagagaaggaagtgcaacaatggtacaagggctttatcaaggactgccccagcgggcagctggacgctgccggctttcagaagatctacaaacagttttttccgttcggcgatccaacgaagttcgcaaccttcgtcttcaacgtgtttgacgagaataaggatgggcgcatcgaattttctgagtttatccaagccctgtccgttacaagtagaggaaccctcgacgaaaaattgcggtgggctttcaaactgtacgatctggataacgacgggtatattacaagaaacgagatgcttgatatcgtcgacgccatataccagatggtgggaaatacagtggagctaccagaggaagagaataccccagaaaagcgggttgaccgaatcttcgctatgatggataagaatgctgatgggaaacttacgttgcaggaattccaggagggcagcaaggccgacccctctattgtccaggcattgtcattgtacgatgggctggtttag

SEQ ID NO: 46460 - DNA, 519 bp, Artificial Sequence
  derived and/or modified sequence
atggccaccatcacagagaaggaggtgcagcagtggtacaagggcttcatcaaggactgccccagcggccagctggatgctgctggcttccagaagatctacaagcagttcttcccctttggagaccccaccaagtttgccacctttgtgttcaacgtgtttgatgagaacaaggatggccgcatcgagttcagcgagttcatccaggccctgtctgtgaccagccggggcaccctggatgagaagctgcgctgggccttcaagctgtatgacctggacaatgatggctacatcaccagaaatgagatgctggacatcgtggatgccatctaccagatggtgggcaacacagtggagctgcctgaggaggagaacaccccagagaagagggtggaccgcatctttgccatgatggacaagaatgctgatggcaagctgaccctgcaggagttccaggagggcagcaaggctgaccccagcatcgtgcaggccctgagcctgtatgatggcctggtgtag

SEQ ID NO: 46461 - DNA, 519 bp, Artificial Sequence
  derived and/or modified sequence
atggccaccatcaccgagaaggaggtgcagcagtggtacaagggctttatcaaagactgtccgagcggccagctggatgccgcaggattccaaaagatttataagcaatttttcccctttggcgacccgacaaagttcgccactttcgtgttcaacgtgttcgacgagaataaggatggtaggatcgaattctccgagttcattcaggcactgtctgtgaccagccggggcacactggacgaaaagctgcgttgggcattcaagctctatgacctggataacgacggatacattacccgcaatgaaatgctcgacatagtagatgctatctaccagatggtgggtaacactgtcgaactccccgaggaggagaacaccccagaaaaaagggtcgacaggattttcgcaatgatggacaaaaacgctgacggcaagttgacattgcaggagtttcaagagggttccaaggcagatccttcaatcgtccaagctctgagcttgtatgatggcctggtttag

SEQ ID NO: 46462 - DNA, 4860 bp, Artificial Sequence
  derived and/or modified sequence
gattgagagatggcaacgattaccgagaaggaggtccagcagtggtacaaaggcttcatcaaggactgccccagtgggcagctggatgcggcaggcttccagaagatctacaagcaattcttcccgttcggagaccccaccaagtttgccacatttgttttcaacgtctttgatgaaaacaaggacgggcgaattgagttctccgagttcatccaggcgctgtcggtgacctcacggggaaccctggatgagaagctacggtgggccttcaagctctacgacttggacaatgatggctacatcaccaggaatgagatgctggacattgtggatgccatttaccagatggtggggaataccgtggagctcccagaggaggagaacactcctgagaagagggtggaccggatctttgccatgatggataagaatgccgacgggaagctgaccctgcaggagttccaggagggttccaaggcagacccgtccattgtgcaggcgctgtccctctacgacgggctggtatagtcccaggctggagctggatgcctgggaaccactcacctccttctgtgccatgaggccacctcagccctgacaccaaccccgtgcgtccacccagccttcttccgcatccacacacagccggctgcccttgacccgggaggccccggctctcctctcccctgtcctgcacccatcccccgcctgaagccaccggctccaattgccagcaacctctgcttgtccggaaaacgacaacacgaaatggaaaaggctacagccctctgcataaaccaaggacttggctgcctcgcaggcagcctccgttcctcccgctctcttgcgcgtgtgcttttgttttttattttgaacagacgttttaaaagaaaaaaaaacaactaccttctgtcctagaagacacagactgacagatggggtgaaggcctggggacctcagagaactctgccttgccctcgtccctcgtccttcggcagccggagaggctgtgggtgggccgagggtgtctaggggttctgcctggtcaacgttatttgtcgtcccatcttttggcagcaaaaccacctgcgtggctaggatgattaattatgaggatgatgattttttttgtgataacagtattgtgctttttgtggggaaagtgaggtttttttttatatacatatataattgatatctttaatttattggttgttaactgttgctgctgcctggtgtgtcctcagctcccagggctgcgggcccaccgtttacatgtgcacgccctgacccacctgcccacgccgacttgggaggatggtggcctgcagcggccaagaagccaaaaaaaattttttttttttcagatactgtgcttgatttttggagaggggagaggtggaaattcctaaatggctaatgcactgttccctccagcccgaatgcctcctgccaaaccccttttccctgctgcctctgtccccgcatccttgttctcccctgggtccgtaacattttttccgaggatgaacaggggacatctttaggtttctcaactcttgctttggtgtttgccgcagcatggaaaacagggcgcctaaggctgggagctggaagaaggggcattgggtacccaggcagagtcaggagaggtggtctttgaagtaagttagcagaaatcaaggggacccccgcctccttgggctggggaggggatttcaagatagttcatgactctctcccgctctgccttccctccttcctatctgctttttccagtaaactgcatggtgtccttccctggccttctcttggctcaaaggctgggagggagggaaggagagaagagttccaggcaatcccatcaatatagtccctacacctggggctgcggcccacatgtcttcacggaggcttccagcggtgcctgccactgaggcaggtgcggccccaggaccatcaccaggaatgcgaggccaccctggaccagaggtaggagcccaaggtccggcccttgctctttgattgtgggcagcctcctgccctctctgggtctcagttgccccatctgcagagcgaggaggcccgggctggttggtcttgaaggcccttttccatgccgacatcatgtcactctaggcctggggttcagtttcctgtggctggtgatgctgtggttaagtttgcttgaccccagcagcccgagggactgtctgagtcacagcacagcccctattgcgtggctgctggtgtgtggggtcagttccagcagatgaatgtgtcatgtggcacaccttgtcccttcccgcagcatttcctggttccccccagacccttgagcgctctttgggacccagaaggagtccttgcacagggaaggcttgaggtgagaagccgcttcccagactgtcagggccaggcctgggtctagaattcttgctgctgctttgcagagtcaacagcccatcagcccatgttttagaggggacactttggtcctcggttcccaccctcagcaagcaggcctccagcccgaggaaggcctctgccgtagtgacgttgccgtgtggggctgcgtggctgttccccttggctggagcattcagccaaccccagcgtcccccctgaggcgttcattggcagccccctaggactgcacgctggccccacggtaaccccccctcccccaccaacatcctgcagggatggggtcagtggttccaccttcacaggccactttgaagggtggattctttgaggcccctgccagtcggctccctgctcagctgctggcccgggcgacctgggactcagcaccaacggctgaagtttctcagctgggctctgacctggggtctggggcagggaacgaacatggtggctttgggctgagaggatgagggaggtctttcccaggtcaaattactttcctttggcctctgcctgaggctcgatttgcctctctggtccaatgggactgacactgttgtacaacctgacctgtggctgagggtgtctgggcttaagcatgtggaccccttcggtgtgtccggccttcctccatcgtcctgccctttggccttttggtttgaagccacaggtgtggcttctggccttagcagatggtatgcttgcggaccgcagcccagcatgccggtgggcccacagcccgagccagcccagagctgccggaagggccgcccttcccggccctggcggggtgctggacactggccattttcactagagtttgcctggcagggaccgatctctgccccctcctctccccaggcctctggctgcagtgatgccgcagaatcctgagccaggtgcctcctgagcagcccgtgcgcctctccacagcggcgtttgccacccaatgcggctcgcttcagatgctctgatgcagagggcacgcccatagtccctctgcagagcctcgcactggggccagggcaggcaccagccccaggcggccagtcggccacggcctgtcctcttcctcgtagcgtctgctcctcactttgtgttgatggtgacttaggagaatgttccgattttccatgatctaagcaggccacgtttaaaataacatcaaggcaagcgtacgtgtcaccctctgtactgacatctcttcccctgaaatgcttttcagtttgacagcccgtttcctagacaagtgcacctggggtttcaggaactttgtgttttttcggagggggttggtggggaggtcgggatgcctgggatcccttcctggagaggcaggctgtctctggaaaaagcctccattgcccacccgccaggcggaaagtcaccctgttcccagcgcggtttcagcatttaattttaagggagctaaggaagcgcggcgcgccccctggtggtggtaagccgccaacgcacctgggggctgcaaccccaccggacgggtggtccggagggaggctggagcggggaggcgaggagggggctgtgagtcctcagaggccctgggccaccacatttctggcagcgtttcccagacacccctctgctaggccatccctggatagcaagtgaattaacttaagggcactgtgatgggaagccttgcccccctcttttttttttttttttaatatctgcggaataaacccaatggttaatttttgaatgaataaaaggcttttgttgaataaacagctggtcccatcttctgtcttggcatcttagcatccaggctcaggctctgccccttctccaggatggggtagccccgagtcgccctccccagtctgcacattccctgttgtccctgttcctgcagtggctcccggccccagggaggcccacctcactcccagcctgactcggtggctggcttccttcaggactttgcgcaagtcagttctgctcattgggtctcaatttccccatcccttggatgggagcaagagtctctgctgggcctgcctcgcaggggcctggtgagacccaaatgtgagtgtcatcatcaaagcccctcacagaagtggaggacggtgcccaagagtagcggtttggactgctgctgcctcccacccggagcctgccacttgggggagaaattggtataatgcttgcaaaaacaaacaaacaaaaggcaatgtcttctggttgtggttatttcctttcctgcttgcctccccagccccctttgagtctctttttggggtgccgtcctgtctgaacctgccggtgtgtgtctctggggccagggtcagggcgaggcccaggggtggacaggggccgtgtagcatgccccagcctccccaagctcctgctgtatgtcgtccatgtcacgccaattaaacacgcttcctggacttgtcctcgcc

SEQ ID NO: 46463 - DNA, 519 bp, Artificial Sequence
  derived and/or modified sequence
atggcaacgatcactgagaaggaggtgcagcagtggtataaagggtttataaaggactgcccctccggccagctggacgcagccggtttccagaagatttacaaacagttcttcccctttggggatcctacgaaatttgccacattcgttttcaatgtgtttgatgagaacaaagacgggcgtatcgagtttagtgaattcatacaagccttatccgtcacttcaagaggaaccctcgacgaaaagctgcgctgggcctttaagctgtacgatctcgacaatgatgggtatatcacccggaatgagatgctggacattgtagatgctatctatcaaatggtgggtaataccgttgagctgcccgaggaggaaaacacccctgagaagcgggttgacagaattttcgccatgatggacaaaaatgcagatgggaagctgacgctccaggagttccaggaagggagcaaagctgatccttcaatagtccaggcactttcgctttacgacggcctggtgtag

SEQ ID NO: 46464 - DNA, 519 bp, Artificial Sequence
  derived and/or modified sequence
atggccaccatcaccgagaaggaggtgcagcagtggtacaagggcttcatcaaggactgccccagcggccagctggacgccgccggcttccagaagatctacaagcagttcttccccttcggcgaccccaccaagttcgccaccttcgtgttcaacgtgttcgacgagaacaaggacggcagaatcgagttcagcgagttcatccaggccctgagcgtgaccagcagaggcaccctggacgagaagctgagatgggccttcaagctgtacgacctggacaacgacggctacatcaccagaaacgagatgctggacatcgtggacgccatctaccagatggtgggcaacaccgtggagctgcccgaggaggagaacacccccgagaagagagtggacagaatcttcgccatgatggacaagaacgccgacggcaagctgaccctgcaggagttccaggagggcagcaaggccgaccccagcatcgtgcaggccctgagcctgtacgacggcctggtgtag

SEQ ID NO: 46465 - protein, 721 aa, Artificial Sequence
  derived and/or modified sequence
MDCLCIVTTKKYRYQDEDTPPLEHSPAHLPNQANSPPVIVNTDTLEAPGYVNGTEGEMEYEEITLERGNSGLGFSIAGGTDNPHIGDDPSIFITKIIPGGAAAQDGRLRVNDSILFVNEVDVREVTHSAAVEALKEAGSIVRLYVMRRKPPAEKVMEIKLIKGPKGLGFSIAGGVGNQHIPGDNSIYVTKIIEGGAAHKDGRLQIGDKILAVNSVGLEDVMHEDAVAALKNTYDVVYLKVAKPSNAYLSDSYAPPDITTSYSQHLDNEISHSSYLGTDYPTAMTPTSPRRYSPVAKDLLGEEDIPREPRRIVIHRGSTGLGFNIVGGEDGEGIFISFILAGGPADLSGELRKGDQILSVNGVDLRNASHEQAAIALKNAGQTVTIIAQYKPEEYSRFEAKIHDLREQLMNSSLGSGTASLRSNPKRGFYIRALFDYDKTKDCGFLSQALSFRFGDVLHVIDASDEEWWQARRVHSDSETDDIGFIPSKRRVERREWSRLKAKDWGSSSGSQGREDSVLSYETVTQMEVHYARPIIILGPTKDRANDDLLSEFPDKFGSCVPHTTRPKREYEIDGRDYHFVSSREKMEKDIQAHKFIEAGQYNSHLYGTSVQSVREVAEQGKHCILDVSANAVRRLQAAHLHPIAIFIRPRSLENVLEINKRITEEQARKAFDRATKLEQEFTECFSAIVEGDSFEEIYHKVKRVIEDLSGPYIWVPARERL

SEQ ID NO: 46466 - DNA, 2166 bp, Artificial Sequence
  derived and/or modified sequence
atggactgtttatgcattgtcaccaccaagaaatatagataccaggacgaagataccccccccctggagcattccccggcccatctccctaaccaggccaactcacctccagttattgtaaacacggacaccctcgaagcccccggctacgtgaatggaacagagggcgaaatggagtatgaagagatcacactcgaaagaggaaacagcggactgggatttagtatcgctggcggcacagacaatcctcacattggcgatgatcccagcatcttcattacgaaaatcattcctggtggcgccgccgcccaggatggcagactgagagttaatgactccatcttgttcgtcaatgaggtggacgtaagggaagtgactcactcggctgctgtggaggcattgaaagaggcgggaagcatcgtccgcttgtacgtgatgcggagaaagcctcctgccgagaaggtaatggagatcaaactgatcaaagggcctaagggcttaggctttagtatcgccggtggagtaggcaatcagcacattcccggtgataactctatatacgtcacaaaaattatcgagggaggcgcagctcacaaggacgggagacttcagatcggcgacaagattctggcagtgaatagcgtgggcctggaagacgttatgcacgaggacgccgtggctgctcttaaaaatacctatgacgtggtgtacctcaaggtcgccaagcctagcaatgcatacttatccgattcttacgctccgcccgacatcactacttcttattctcaacatctcgataacgagatcagtcactcttcatacctggggacagattatcccacagccatgactcccaccagcccgcgaagatatagcccggtcgcaaaagacttactcggggaggaagatattcctagggaacctcgccgcattgtgattcatcgggggtcaactggtttgggatttaacatcgttggaggcgaggacggggaggggatatttatttcatttatcctcgccggggggcctgcagacctctcaggggagttgcgtaaaggtgaccaaatcctgtcagtgaatggcgttgatctcagaaacgctagtcacgaacaagctgccatcgcactcaagaatgctggccagacagtgaccatcatagcacagtataagcccgaagaatattccaggtttgaggcgaagatccacgatctgagagaacagctgatgaattcgtctctcggaagcgggaccgccagcctgagaagcaatcccaagaggggtttctatattcgcgctctttttgattatgataagactaaggattgcggctttttgtcacaggctctgtcttttcgcttcggcgacgttctccatgtgatcgatgctagtgatgaggagtggtggcaggcgcgtcgcgtgcactcagattcggaaactgatgatatcggttttatccccagtaagcggcgcgtcgaaagacgggagtggtcacgtttgaaagctaaggattggggctcctcaagtggcagccaaggcagggaggactccgtcttaagctacgaaaccgtgacacagatggaggttcactacgcgcgacctataatcatcctgggcccaacaaaagatagagccaatgacgaccttctaagtgagttcccggacaagtttggctcttgtgtaccacacactaccaggcccaaacgggagtacgaaattgacggcagagattatcatttcgttagctcccgggagaaaatggagaaggatatccaagctcacaaattcatcgaagctggtcaatacaatagccacctgtatggaacctcagtgcagtccgttcgggaggttgcagagcaagggaagcactgtattctggacgtgtctgcaaatgctgttcgcagattacaggccgctcatctgcatccaattgccatctttattcggcctcggtcactggaaaatgtgctggagattaacaagagaataacagaggagcaggcaaggaaagcatttgacagggcaacaaagttagagcaagagtttacagagtgcttttccgctatcgtggagggcgactcctttgaagagatttatcacaaagttaagcgggtcattgaggacttaagtgggccgtacatatgggtgccagctagggagcggttgtag

SEQ ID NO: 46467 - DNA, 2166 bp, Artificial Sequence
  derived and/or modified sequence
atggactgcctgtgcatcgtgaccaccaagaagtaccgctaccaggatgaggacaccccacccctggagcacagccctgcccacctgcccaaccaggccaacagcccccctgtgattgtgaacacagacaccctggaggcccctggctacgtgaatggaacagaaggagagatggagtatgaggagatcaccctggagcggggcaacagcggcctgggcttcagcattgctgggggcacagacaacccccacatcggagatgaccccagcatcttcatcaccaagatcatccctgggggcgccgccgcccaggacggccgcctgcgggtgaatgacagcatcctgtttgtgaatgaggtggatgtgcgggaggtgacccacagcgctgctgtggaggccctgaaggaggccggcagcatcgtgcggctgtatgtgatgaggaggaagcccccagctgagaaggtgatggagatcaagctgatcaagggccccaagggcctgggcttcagcattgctgggggcgtgggcaaccagcacatccctggggacaacagcatctacgtgaccaagatcatcgagggcggggccgcccacaaggatggccgcctgcagattggagacaagatcctggccgtgaacagcgtgggcctggaggatgtgatgcatgaagatgctgtggccgccctgaagaacacctatgatgtggtgtacctgaaggtggccaagcccagcaatgcctacctgagtgacagctatgcccccccagacatcaccaccagctacagccagcacctggacaatgagatcagccacagcagctacctgggcacagactaccccacagccatgacccccaccagcccccggcgctacagccctgtggccaaggacctgctgggggaggaggacatcccccgggagcccaggagaattgtcatccaccggggcagcacaggcctgggcttcaacatcgtgggcggggaggatggagagggcatcttcatctccttcatcctggccggcggccctgctgacctgtctggagagctgaggaagggggaccagatcctgtctgtgaatggagtggacctgagaaatgccagccatgagcaggccgccatcgccctgaagaatgccggccagacagtgaccatcatcgcccagtacaagccagaggagtacagcagatttgaggccaagatccatgacctgcgggagcagctgatgaacagcagcctgggcagcggcacagccagcctgcggagcaaccccaagaggggcttctacatccgggccctgtttgattatgacaagaccaaggactgtggcttcctgagccaggccctgtccttccgctttggagatgtgctgcacgtgattgatgccagtgatgaggagtggtggcaggccaggagagtgcacagcgacagcgagacagatgacatcggcttcatccccagcaagagaagagtggagcggcgggagtggagccggctgaaggccaaggactggggcagcagcagcggcagccagggccgggaggacagcgtgctgtcctatgagaccgtgacccagatggaggtgcactacgcccggcccatcatcatcctgggccccaccaaggaccgggccaatgatgacctgctgtctgagttcccagacaagtttggcagctgtgtgccccacaccacccggcccaagcgggagtatgaaattgatggccgggactaccactttgtgagcagccgggagaagatggagaaggacatccaggcccacaagttcatcgaggccggccagtacaacagccacctgtatggcacctctgtgcagagcgtgcgggaggtggccgagcagggcaagcactgcatcctggatgtgtctgccaatgctgtgcggcggctgcaggccgcccacctgcaccccatcgccatcttcatccggcccaggagcctggagaatgtgctggagatcaacaagaggatcacagaggagcaggccaggaaggcctttgaccgggccaccaagctggagcaggagttcacagagtgcttcagcgccatcgtggagggggacagctttgaggagatctaccacaaggtgaagagggtgattgaggacctgagcggcccctacatctgggtgcctgcccgggagcggctgtag

SEQ ID NO: 46468 - DNA, 2166 bp, Artificial Sequence
  derived and/or modified sequence
atggactgcctgtgcatcgtgaccaccaagaagtaccggtaccaggacgaggacacaccacctctggagcacagccccgcccaccttcccaaccaagcgaacagccccccggtcattgtgaacacagatactctcgaggcccctgggtatgtgaatggcactgagggggagatggaatacgaggagataacacttgaaaggggtaactctggacttggcttttccattgccggtgggactgacaatccccacatcggggacgatccatccatctttatcactaaaattattccaggcggcgccgccgcccaggatggacggctgagagtcaatgactctattctgttcgtgaatgaagtggatgttagggaggtgactcactctgctgccgttgaagctctaaaggaagcgggctctattgtgcgcctgtacgttatgagaaggaagcctcccgcggaaaaagtgatggagatcaagctgattaagggacctaaggggctcggttttagtatcgccgggggggtggggaatcagcacatcccaggagacaacagtatctacgtgacaaaaattatagagggcggcgccgctcacaaagacgggcggttacaaattggtgataaaattttagcagttaactctgtggggcttgaggatgtcatgcacgaagatgccgtagccgccttgaaaaatacctatgacgtggtctacttgaaggtggccaagccttccaacgcatacctgagtgacagttacgctcctcctgacatcaccacatcatattctcaacacctggacaacgagatatcccattcctcttacctgggcaccgattaccctaccgcaatgaccccaacctctccgcggcgctatagtccagtcgcgaaggaccttctcggcgaggaggacattccccgtgagcctcgacggattgtaatccaccgcggttccactggcttgggtttcaacatagttggcggggaggacggcgaagggatctttatctctttcattcttgccggaggccctgccgatctaagtggggaactgcggaagggagatcagatcctgagtgtaaatggagtggatctccggaatgcctctcacgagcaggctgctatagccctcaagaacgccggacagacagtcacaattatcgcacaatataaacccgaggaatactcccgcttcgaagccaaaatccatgatctgagagagcaactgatgaattcctcgctgggctctggtacagcaagcctgcggagtaaccctaaacgcgggttttacattcgagcactcttcgactatgacaaaaccaaggattgcggctttctgagccaggcactgtcattccggttcggagacgtcctccacgtaatagatgcgagtgacgaggagtggtggcaggctcggcgggtgcactccgatagtgagaccgatgacatcggattcattcccagtaagcgcagggtcgaaaggcgagaatggtctagactgaaggctaaggactggggtagtagttcaggaagccaggggcgggaggactccgtcctgagctacgagaccgttactcagatggaggtccattatgctcgtcctatcatcattctaggacctacgaaagaccgtgccaatgacgacttattatcagagttccccgataaatttggctcctgtgtcccacatacaactcgccctaaaagggaatacgagatagatggccgggactatcactttgtgtcttccagggagaagatggagaaggacatccaagcacacaagttcattgaagcggggcagtacaattcccacttatacgggacaagcgtgcaatctgttcgagaggttgccgaacagggcaaacactgtattctcgacgtctccgctaatgcggtgaggcgcctccaggctgctcatctgcaccctatagcaatctttatcaggccacgctccctggagaatgtgctggagataaataagagaatcaccgaagagcaggcccggaaggccttcgacagagccaccaaattggaacaggagtttaccgagtgcttttcggctatcgtagagggcgattcgttcgaggaaatctaccataaggtcaagagagtgatagaagacctgagcggcccatacatttgggtcccggcccgagagcgcctgtag

SEQ ID NO: 46469 - DNA, 2166 bp, Artificial Sequence
  derived and/or modified sequence
atggattgcttgtgtattgtgacaacaaaaaagtatagataccaggatgaagacacccccccacttgagcattccccagcacatttgccgaatcaggccaatagcccgccagtcatcgtgaacacagatacattggaggcacctgggtatgtcaatggcaccgaaggagagatggagtacgaagagattactctagaacgtggtaactcaggcctggggttcagcatcgccggtgggaccgataatccgcatataggggatgaccctagcattttcatcactaaaattatccccggaggggctgccgctcaagatgggaggctgcgggtcaatgattctattctgttcgtgaatgaagtcgatgtgagggaggtgactcactccgcagctgttgaggctctgaaagaggccggaagtatcgttcgcctttatgtgatgcgacggaagccccctgccgagaaggtgatggaaataaaactgatcaaagggccaaaagggctgggattttccattgcagggggagtgggcaaccagcacatccccggagacaacagcatatatgtgacaaaaattattgaggggggagcagctcacaaggatgggaggctgcaaatcggagataagatcctggctgtgaactcagtaggactcgaggacgtcatgcacgaagacgcagtcgctgcactcaaaaatacatatgatgtggtgtatctcaaggttgcgaagccgagcaacgcttacctttccgactcctatgccccaccagatatcactaccagttactctcagcacctggataacgaaatatcacattctagttatctcggcaccgattatcctacggccatgacaccaacttccccacgccgatacagccccgttgccaaagacctgcttggtgaagaagacattcctcgcgagcctcgccgaattgtcatccacagagggagcactggactgggtttcaacattgtcggtggtgaggatggcgagggcatctttatcagctttatccttgctggcggtccagctgacctaagcggcgagcttagaaagggagatcagattctctcagttaatggggtcgaccttcgcaatgcctcccatgagcaggccgcaatcgcattgaaaaacgcaggacagaccgtcaccatcatcgctcaatataagcccgaggagtattctcgcttcgaggccaagatccacgacctgcgagaacagctgatgaattcgtcgctggggtcaggcaccgctagtctgcggagtaaccctaagcggggtttctatattcgtgctctattcgattacgacaagaccaaggattgtggctttttatctcaggcgctgagctttaggtttggcgatgtcctgcacgtcatagacgcgagtgacgaagagtggtggcaggcacgacgcgtacacagcgactctgaaacagacgatatcggcttcatacctagcaaaaggcgggtggaacggcgagaatggtcccggttgaaagcgaaagactggggctcctcctctggctcgcaggggagagaagacagcgtgctctcctatgaaactgttacccagatggaggtccactacgccagacctattattattcttggacccactaaggatagagctaatgacgatttactgtccgagttcccagataagttcggcagctgtgtgccgcacaccacccggcctaaaagagagtacgagattgatggaagagattaccactttgtgtcctcccgagaaaagatggagaaggacattcaagcacataagttcatcgaagcaggccagtataactctcacctttacggtacgagtgtgcagagtgtcagagaggtcgcagaacagggcaaacattgtattcttgacgtgagcgcgaacgctgttaggcgcctacaagcggcacatctccaccctatagccatcttcatcagacctcggtcactagagaacgtcctggagatcaacaagcgaatcacagaagaacaggccagaaaagccttcgatcgagctacgaagctcgagcaagaatttaccgagtgcttctctgccatcgtggaaggcgatagttttgaggaaatctaccacaaagtgaagagggtaatcgaggatctgtctggcccttacatctgggtcccggcacgagaacggttatag

SEQ ID NO: 46470 - DNA, 2166 bp, Artificial Sequence
  derived and/or modified sequence
atggactgcctgtgcatcgtgaccaccaagaagtacagataccaggacgaggacaccccccccctggagcacagccccgcccacctgcccaaccaggccaacagcccccccgtgatcgtgaacaccgacaccctggaggcccccggctacgtgaacggcaccgagggcgagatggagtacgaggagatcaccctggagagaggcaacagcggcctgggcttcagcatcgccggcggcaccgacaacccccacatcggcgacgaccccagcatcttcatcaccaagatcatccccggcggcgccgccgcccaggacggcagactgagagtgaacgacagcatcctgttcgtgaacgaggtggacgtgagagaggtgacccacagcgccgccgtggaggccctgaaggaggccggcagcatcgtgagactgtacgtgatgagaagaaagccccccgccgagaaggtgatggagatcaagctgatcaagggccccaagggcctgggcttcagcatcgccggcggcgtgggcaaccagcacatccccggcgacaacagcatctacgtgaccaagatcatcgagggcggcgccgcccacaaggacggcagactgcagatcggcgacaagatcctggccgtgaacagcgtgggcctggaggacgtgatgcacgaggacgccgtggccgccctgaagaacacctacgacgtggtgtacctgaaggtggccaagcccagcaacgcctacctgagcgacagctacgccccccccgacatcaccaccagctacagccagcacctggacaacgagatcagccacagcagctacctgggcaccgactaccccaccgccatgacccccaccagccccagaagatacagccccgtggccaaggacctgctgggcgaggaggacatccccagagagcccagaagaatcgtgatccacagaggcagcaccggcctgggcttcaacatcgtgggcggcgaggacggcgagggcatcttcatcagcttcatcctggccggcggccccgccgacctgagcggcgagctgagaaagggcgaccagatcctgagcgtgaacggcgtggacctgagaaacgccagccacgagcaggccgccatcgccctgaagaacgccggccagaccgtgaccatcatcgcccagtacaagcccgaggagtacagcagattcgaggccaagatccacgacctgagagagcagctgatgaacagcagcctgggcagcggcaccgccagcctgagaagcaaccccaagagaggcttctacatcagagccctgttcgactacgacaagaccaaggactgcggcttcctgagccaggccctgagcttcagattcggcgacgtgctgcacgtgatcgacgccagcgacgaggagtggtggcaggccagaagagtgcacagcgacagcgagaccgacgacatcggcttcatccccagcaagagaagagtggagagaagagagtggagcagactgaaggccaaggactggggcagcagcagcggcagccagggcagagaggacagcgtgctgagctacgagaccgtgacccagatggaggtgcactacgccagacccatcatcatcctgggccccaccaaggacagagccaacgacgacctgctgagcgagttccccgacaagttcggcagctgcgtgccccacaccaccagacccaagagagagtacgagatcgacggcagagactaccacttcgtgagcagcagagagaagatggagaaggacatccaggcccacaagttcatcgaggccggccagtacaacagccacctgtacggcaccagcgtgcagagcgtgagagaggtggccgagcagggcaagcactgcatcctggacgtgagcgccaacgccgtgagaagactgcaggccgcccacctgcaccccatcgccatcttcatcagacccagaagcctggagaacgtgctggagatcaacaagagaatcaccgaggagcaggccagaaaggccttcgacagagccaccaagctggagcaggagttcaccgagtgcttcagcgccatcgtggagggcgacagcttcgaggagatctaccacaaggtgaagagagtgatcgaggacctgagcggcccctacatctgggtgcccgccagagagagactgtag

SEQ ID NO: 46471 - DNA, 3184 bp, Artificial Sequence
  derived and/or modified sequence
gcccccttcccctccctcccacgctcccctccccttcccttctccaaccccctccttcccctctcacccctccccccatcctggccccccctgcaaaagtggggtgcggaggggggaggggtgagaacccacggaggggaggaacgaaactccgatgaagtcagagccccttacccgccgccgcggccaggccccccaacatggactgtctctgtatagtgacaaccaagaaataccgctaccaagatgaagacacgccccctctggagcacagcccggcccacctccccaaccaggccaattctcccccagtgattgtcaacacagataccctagaagccccaggatatgtgaacgggaccgagggggagatggaatacgaggaaatcacattggaaaggggtaactcaggtctgggcttcagcatcgcaggtggcactgacaacccacacatcggtgacgacccatccattttcatcaccaagatcattcctggtggggctgcggcccaggatggccgcctcagggtcaacgacagcatcctgtttgtaaatgaagtggacgtgcgcgaggtgacccactcagcggcggtggaagccctcaaagaggcaggctccatcgttcgcctctatgtcatgcgccggaagcccccggctgagaaggtcatggagatcaagctcatcaaggggcctaaaggtcttggcttcagcatcgcagggggcgtagggaaccagcacatcccaggagataatagcatctatgtaacaaagatcatcgaagggggtgctgcccacaaggatgggaggttgcagattggagacaagatcctggcggtcaacagtgtggggctagaggacgtcatgcatgaagatgctgtggcagccctgaagaacacgtatgatgttgtctacctaaaggtggccaagcccagcaatgcctacctgagtgacagctatgctcccccagacatcacaacctcttattcccagcacctggacaatgagatcagtcacagcagctacctgggcaccgactaccccacagccatgacccccacttcccctcggcgctactctccagtggccaaggacctgctcggggaggaagacattccccgagaaccgaggcgaattgtgatccaccggggctccacgggcctgggcttcaacatcgtgggtggcgaggacggtgaaggcatcttcatctcctttatcctggccgggggccctgcagacctcagtggggagctgcggaagggggaccagatcctgtcggtcaacggtgtggacctccgaaatgccagccatgagcaggctgccattgccctgaagaatgcgggtcagacggtcacgatcatcgctcagtataaaccagaagagtacagccgattcgaggccaagatccacgaccttcgggaacagctcatgaacagcagcctgggctcagggactgcgtccctgcggagcaaccccaaaaggggtttctacatcagggccctgtttgattacgacaagaccaaggactgcggcttcctgagccaggccctgagcttccgctttggggatgtgctgcatgtcatcgatgctagtgatgaggagtggtggcaggcacggcgggtccactctgacagtgagaccgacgacattgggttcatccccagcaaacggcgggttgagcgacgagagtggtcaaggttaaaggccaaggactggggctccagctctggatcgcagggtcgagaagactcggttctgagctacgagacagtgacgcagatggaagtgcactatgctcgccccatcatcatccttgggcccaccaaggaccgcgccaacgatgatcttctctccgagttccccgacaagtttggatcctgtgttccccatacgacacggcccaagcgggagtatgagatagatggccgggattaccactttgtgtcgtcccgggagaaaatggagaaggacattcaggcgcacaagttcattgaggccggccagtacaacagccacctctatgggaccagcgtccagtccgtgcgagaggtggcagagcaggggaagcactgcatcctcgatgtctcggccaatgccgtgcggcggctgcaggcggcccacctgcaccccatcgccatcttcatccgcccccgctccctggagaatgtgctagagattaacaagcggatcacagaggagcaagcccgcaaagccttcgacagagccaccaagctggagcaggagttcacagagtgcttctcagccatcgtggagggtgacagctttgaggagatctaccacaaggtgaagcgtgtcatcgaggacctctcaggcccctacatctgggttccagcccgagagagactctgattcctgccctggcttggcctggactcgccctgcctccatcacctgggcccttggtctggactgaattgcccaagcccttggctccccccggcctccctcccaccccttcttatttatttcctttctaactggatccagcctgttggaggggggacactcctctgcatgtatccccgcaccccagaactgggctcctgaacgccaggaacctggggtctgggggggagctgggctccttgttccgagcccttgctccttaggatccccgcccccacctgcccccaatgcacacacagacccaccgggggccacctgccctcccccatcctctcccacacacattccagaagtcagggccccctcgaggagcacccgctgcagggatgcagggccacaggcctccgctctctcctaaggcagggtctggggtcacccctgccctcatcgtaattccccatgttccttgatttctcatttattttttccactttttttcttctcaaaggtggttttttggggggagaagcaggggactccgcagcgggcccctgccttccacatgcccccaccatttttctttgccggtttgcatgagtggaaggtctaaatgtggcttttttttttttttttcctgggaatttttttggggaaaagggagggatgggtctagggagtgggaaatgcgggagggagggtggggggcaggggtcgggggtcgggtgtccgggagccagggaagactggaaatgctgccgccttctgcaatttatttatttttttcttttgagagagtgaaaggaagagacagatacttgaaa

SEQ ID NO: 46472 - protein, 140 aa, Artificial Sequence [sequence omitted]

SEQ ID NO: 46473 - protein, 147 aa, Artificial Sequence
  derived and/or modified sequence
MSGSFYFVIVGHHDNPVFEMEFLPAGKAESKDDHRHLNQFIAHAALDLVDENMWLSNNMYLKTVDKFNEWFVSAFVTAGHILTFLVKMRFIMLHDIRQEDGIKNFFTDVYDLYIKFSMNPFYEPNSPIRSSAFDRKVQFLGKKHLLS

SEQ ID NO: 46474 - protein, 174 aa, Artificial Sequence
  derived and/or modified sequence
MSSWKQDRSGLRSTELNVLEYQPLCAVRSHILKTMSGSFYFVIVGHHDNPVFEMEFLPAGKAESKDDHRHLNQFIAHAALDLVDENMWLSNNMYLKTVDKFNEWFVSAFVTAGHMRFIMLHDIRQEDGIKNFFTDVYDLYIKFSMNPFYEPNSPIRSSAFDRKVQFLGKKHLLS

SEQ ID NO: 46475 - protein, 74 aa, Artificial Sequence
  derived and/or modified sequence
MSGSFYFVIVGHHDNPVFEMEFLPAGKAESKDDHRHLNQFIAHAALDLVDENMWLSNNMYLKTVDKFNEWFVSA

SEQ ID NO: 46476 - DNA, 732 bp, Artificial Sequence
  derived and/or modified sequence
gtgacggagcggaaaagcgcgagaagcggcttggttccttgtacgcagaggcggtagtgacacaggcacaactgacagtggcagaagctcagctgacaaggactggggacggcggtgtccttgtcttgcctttgtcgcccccgcccctctcttccctggctggacttgcggagtccccgccgaagaacccgaggagccatatattgaagaccatgtctggaagcttctactttgtaattgttggtcaccatgataatccagtttttgaaatggagtttttgccagctgggaaggcagaatccaaagacgaccatcgtcatctgaaccagttcatagctcatgctgctctcgacctcgtagatgagaacatgtggctgtcgaacaacatgtacttgaaaactgtggacaagttcaacgagtggtttgtgtcagcatttgtcaccgcggggcatatgaggtttattatgcttcatgacataagacaagaagatggaataaagaacttctttactgatgtttatgatttatatataaaattttcaatgaatccattttatgaacccaattctcctattcgatcaagtgcatttgacagaaaagttcagtttcttgggaagaaacaccttttaagctgaatggagaaaattccaaaataaattatatcaccacaatggtgtatactcaggaatgtgtacattgtaaattacttgattaaatagcctggaaatcttt

SEQ ID NO: 46477 - DNA, 525 bp, Artificial Sequence
  derived and/or modified sequence
atgagcagctggaagcaggacagaagcggcctgagaagcaccgagctgaacgtgctggagtaccagcccctgtgcgccgtgagaagccacatcctgaagaccatgagcggcagcttctacttcgtgatcgtgggccaccacgacaaccccgtgttcgagatggagttcctgcccgccggcaaggccgagagcaaggacgaccacagacacctgaaccagttcatcgcccacgccgccctggacctggtggacgagaacatgtggctgagcaacaacatgtacctgaagaccgtggacaagttcaacgagtggttcgtgagcgccttcgtgaccgccggccacatgagattcatcatgctgcacgacatcagacaggaggacggcatcaagaacttcttcaccgacgtgtacgacctgtacatcaagttcagcatgaaccccttctacgagcccaacagccccatcagaagcagcgccttcgacagaaaggtgcagttcctgggcaagaagcacctgctgagctag

SEQ ID NO: 46478 - DNA, 525 bp, Artificial Sequence
  derived and/or modified sequence
atgtcaagctggaaacaggatcgatcaggtttgcggagcacagaattgaacgtgctcgagtatcagcccctatgcgcagtgagaagccatatcctcaagactatgtctggaagcttttattttgtgatcgtcggtcatcacgacaaccccgtttttgagatggagttcctgccggcgggcaaagccgagagcaaggacgaccacaggcatctgaaccagtttattgcccatgctgccctggacttggtggacgaaaatatgtggctctccaataacatgtatctcaaaaccgtcgacaaatttaatgaatggtttgtcagcgcatttgtgaccgcagggcatatgcgttttatcatgcttcacgatatcaggcaggaagatggcataaagaatttttttaccgatgtgtacgacctgtacattaagttctcaatgaacccattctatgagcccaacagccccatacgatcctcagcttttgatcgcaaggtgcagttccttggtaagaaacacctgctgtcatag

SEQ ID NO: 46479 - DNA, 525 bp, Artificial Sequence
  derived and/or modified sequence
atgagctcctggaagcaggacagaagtggcctgcggagcacagagctgaatgtgctggagtaccagcccctgtgtgctgtgcgcagccacatcctgaagaccatgagcggcagcttctactttgtgattgtgggccaccacgacaaccctgtgtttgagatggagttcctgcctgctgggaaggccgagagcaaggatgaccaccgccacctgaaccagttcatcgcccacgccgccctggacctggtggatgagaacatgtggctgagcaacaacatgtacctgaagacagtggacaagttcaatgagtggtttgtgtctgcctttgtgacagctggccacatgaggttcatcatgctgcatgacatccggcaggaggatggcatcaagaacttcttcacagatgtgtatgacctgtacatcaagttctccatgaaccccttctatgagcccaacagccccatccgcagcagcgcctttgacaggaaggtgcagttcctgggcaagaagcacctgctgtcctag

SEQ ID NO: 46480 - DNA, 525 bp, Artificial Sequence
  derived and/or modified sequence
atgagcagctggaagcaggaccggagcggcctgcggagcaccgagctgaacgtgttggagtaccagccactatgcgccgtgaggagccacattctgaagaccatgtctggctcattttatttcgtgattgtaggtcaccacgataaccccgtgttcgaaatggagttcttaccagccgggaaggctgagtccaaagatgatcacaggcatctaaaccagttcatagcacacgccgctctcgatttggtggacgaaaacatgtggctcagcaataacatgtacttgaagaccgtggataagttcaatgagtggtttgtgagtgctttcgtaaccgctggtcacatgcggtttattatgctccacgacatccggcaggaggatggcatcaagaacttttttaccgatgtctatgatctctacattaaattttccatgaatccgttttatgagcctaattcacctatccgcagctcagctttcgacagaaaagtccagttcctgggcaagaaacacttgttgagctag

SEQ ID NO: 46481 - DNA, 525 bp, Artificial Sequence
  derived and/or modified sequence
atgagctcttggaaacaggaccgctccggcctgcgcagtacggagctgaatgtgcttgaatatcagccattgtgtgccgttcgaagtcatattcttaaaacaatgtctggatctttctatttcgtgatcgtcgggcatcacgataatccagttttcgagatggagttcctgcccgctggcaaggccgagtccaaagacgaccaccggcatctgaaccagttcatcgctcacgctgcactggacttagtggacgagaacatgtggctgagcaacaacatgtacctcaaaacagttgataaattcaatgagtggttcgtctccgcatttgtgacagccggacacatgcgattcattatgctgcatgacatcagacaggaagacggaatcaaaaatttctttactgatgtatacgacctttacatcaagttttcaatgaatccgttttatgagcccaactcgccgattaggtcaagtgccttcgaccggaaggtgcagtttctgggaaagaaacatctgctgtcttag

SEQ ID NO: 46482 - DNA, 1980 bp, Artificial Sequence
  derived and/or modified sequence
ggctacaggttcggggcgcgggtctcttccgcggaaactgacattgcgtttccgttgtcggcctcccactgcaggagccatatattgaagaccatgtctgggagcttctactttgtaattgttggccaccatgataatccagtttttgaaatggagtttttgccagctgggaaggcagaatccaaagacgaccatcgtcatctgaaccagttcatagctcatgctgctctcgacctcgtagatgagaacatgtggctatcgaacaacatgtacttgaaaactgtggacaagttcaacgagtggtttgtgtcggcatttgtcactgcggggcatatgaggtttattatgcttcatgacataagacaagaagatggaataaagaacttctttactgatgtttatgatttatatataaagttttcaatgaatccattttatgaacccaattctcctattcgatcaagtgcatttgacagaaaagttcagtttcttgggaagaaacaccttttaagctgaatgcagaaaattccaaaataaatgatgtcaccacaatggtgtatactcaggaatgtgtacattgtaagttacttgattaaatagcctggaaaacttttgtgtattctcagcttatctaaacctaatgaaattccttttatatttaaaaatagtacattctgtctcatgtcacgtatcaatagatcaattggtatttccttgtgaacagtgttatttataaagagttcattatcaataatcatgttttttttttttttttttttctgatacagagtctcactctgttgccaggctggagtgcagtggcgcaatcttggctcactgcaacctccgcctcccaggttcaggcgattctcctgcctcagcctccaagtagctgggactacaggcgcgtgccaccacgcccggctaatttttgtatttttagtagagacagggtttcaccatattggtcaggctggtcttgaactcctgacctcgtgatctgcccgcctcagcctcccaaagtgctaggattacaggcatgaaccaccgtgcccggccaggaataagcttttgacttacccaattcagataggttgatctttggggttttttttttttttttgagatggagtttcgctctgttgtccaggctggagtgcaatggcagttgtttcaccgtaacctctgcctcctgacttcaagcaattctcctgcctcagcctcccaaagtgctgggattacaggtgtgagccaccgtgcccggcccagataggttgatcttaatgtaacaacccaaaaataaatgtcatagtcaagatttggtagataaatttaaaattaaaatattctgcagttgggagtgaaatgtgatagcacatacgttgacattatgcatttagagatgttataaaaatgtataggcagtatacacagcactactcaagaagccaaagaaacacttgtgcagtgctaagtgtcacatgtctgcttccaccagaggctaggaatagtgatcctgctataatgtgagaacccaaatcatgtttataaaataggacgctgggagcagttgcaggccacagtgaagtgtgttgcttctgtcactttatattcttatatttcctttccctcagacagtaaactgttgatactcgtacttgtaaaaaattgtaaggcaatttttagtattgttgtcaaagaaaagcttggattacattaacatttgtattcagtcttttaggtgatacaccagagggggctgggaattgtctctttgttcctataagtagatcttaatgtaaaatagtaaatgtccattgaaaagcaagtaatacagcctgtgctaattgggagcacttgaacaattttgttccattctgagtaacttttgagcaagtaattctaagctttgtcttgtatccttgtgtgaaattgcataatttttaccctatttgatttcttaaataaagatgtttgctc

SEQ ID NO: 46483 - DNA, 2716 bp, Artificial Sequence
  derived and/or modified sequence
acatcccagggtatcgcgagaactgcttcggcgttctggctacaggttcggggcgcgggtctcttccgcggaaactgacattgcgtttccgttgtcggcctcccactgcaggagccatatattgaagaccatgtctgggagcttctactttgtaattgttggccaccatgataatccagtttttgaaatggagtttttgccagctgggaaggcagaatccaaagacgaccatcgtcatctgaaccagttcatagctcatgctgctctcgacctcgtagatgagaacatgtggctatcgaacaacatgtacttgaaaactgtggacaagttcaacgagtggtttgtgtcggcatttgtcactgcggggcatatgaggtttattatgcttcatgacataagacaagaagatggaataaagaacttctttactgatgtttatgatttatatataaagttttcaatgaatccattttatgaacccaattctcctattcgatcaagtgcatttgacagaaaagttcagtttcttgggaagaaacaccttttaagctgaatgcagaaaattccaaaataaatgatgtcaccacaatggtgtatactcaggaatgtgtacattgtaagttacttgattaaatagcctggaaaacttttgtgtattctcagcttatctaaacctaatgaaattccttttatatttaaaaatagtacattctgtctcatgtcacgtatcaatagatcaattggtatttccttgtgaacagtgttatttataaagagttcattatcaataatcatgttttttttttttttttttttctgatacagagtctcactctgttgccaggctggagtgcagtggcgcaatcttggctcactgcaacctccgcctcccaggttcaggcgattctcctgcctcagcctccaagtagctgggactacaggcgcgtgccaccacgcccggctaatttttgtatttttagtagagacagggtttcaccatattggtcaggctggtcttgaactcctgacctcgtgatctgcccgccttggcctcccaaagtactgggattacaggcgtgagccaccgtgcccaaccatgaaatatttttacttaaaaattgggaataagctcgctttttttttttttgagatggagtcttgctcctgttgtgcaggctgtagtgcagtggcacgatcttggctcactgcaacctccacctcccgggttcaagcaattctccttcttcagcctcccgagtagctgagattataggcgtgcaccaccacacctggctaatttttgtatttttagtagagacagggtttcaccatattggtcaggctggtcttgaactcctgacctcgtgatccacccacctcaggaagtgctgggattacaggcgtgtgagccaccacgcccggccatgaaatatttttacttaaaaattgggaataagctttttggttttttgtgggtttttgtttttgttttttgttttttgtttttttgagatggagtcttgctcctgttgtgcaggctggagtgcagtggcacagtcttggctcactgcaacctccacctcctgggttcaagcaattctccttcttcagcctcccgagtagctgggattacaggcatgcaccaccacacctggctaatttttgtgtttttagtagagacggggtttcgctattttggccgggctggtttcaaactcctgacctcagttgatccacccgcctcagcctcccaaagtgctaggattacaggcatgaaccaccgtgcccggccaggaataagcttttgacttacccaattcagataggttgatctttggggttttttttttttttttgagatggagtttcgctctgttgtccaggctggagtgcaatggcagttgtttcaccgtaacctctgcctcctgacttcaagcaattctcctgcctcagcctcccaaagtgctgggattacaggtgtgagccaccgtgcccggcccagataggttgatcttaatgtaacaacccaaaaataaatgtcatagtcaagatttggtagataaatttaaaattaaaatattctgcagttgggagtgaaatgtgatagcacatacgttgacattatgcatttagagatgttataaaaatgtataggcagtatacacagcactactcaagaagccaaagaaacacttgtgcagtgctaagtgtcacatgtctgcttccaccagaggctaggaatagtgatcctgctataatgtgagaacccaaatcatgtttataaaataggacgctgggagcagttgcaggccacagtgaagtgtgttgcttctgtcactttatattcttatatttcctttccctcagacagtaaactgttgatactcgtacttgtaaaaaattgtaaggcaatttttagtattgttgtcaaagaaaagcttggattacattaacatttgtattcagtcttttaggtgatacaccagagggggctgggaattgtctctttgttcctataagtagatcttaatgtaaaatagtaaatgtccattgaaaagcaagtaatacagcctgtgctaattgggagcacttgaacaattttgttccattctgagtaacttttgagcaagtaattctaagctttgtcttgtatccttgtgtgaaattgcataatttttaccctatttgatttcttaaataaagatgtttgctcaag

SEQ ID NO: 46484 - DNA, 2776 bp, Artificial Sequence
  derived and/or modified sequence
attgcgtttccgttgtcggcctcccactgcagtatcaccttctcccccaagtgtgacaaccaaagatgtctccagatattgccagatgtcctcttggaagcaagatcgctccgggttgagatccacagagctaaacgttttagagtaccaaccattgtgtgctgtgaggtaaaggagccatatattgaagaccatgtctgggagcttctactttgtaattgttggccaccatgataatccagtttttgaaatggagtttttgccagctgggaaggcagaatccaaagacgaccatcgtcatctgaaccagttcatagctcatgctgctctcgacctcgtagatgagaacatgtggctatcgaacaacatgtacttgaaaactgtggacaagttcaacgagtggtttgtgtcggcatttgtcactgcggggcatatgaggtttattatgcttcatgacataagacaagaagatggaataaagaacttctttactgatgtttatgatttatatataaagttttcaatgaatccattttatgaacccaattctcctattcgatcaagtgcatttgacagaaaagttcagtttcttgggaagaaacaccttttaagctgaatgcagaaaattccaaaataaatgatgtcaccacaatggtgtatactcaggaatgtgtacattgtaagttacttgattaaatagcctggaaaacttttgtgtattctcagcttatctaaacctaatgaaattccttttatatttaaaaatagtacattctgtctcatgtcacgtatcaatagatcaattggtatttccttgtgaacagtgttatttataaagagttcattatcaataatcatgttttttttttttttttttttctgatacagagtctcactctgttgccaggctggagtgcagtggcgcaatcttggctcactgcaacctccgcctcccaggttcaggcgattctcctgcctcagcctccaagtagctgggactacaggcgcgtgccaccacgcccggctaatttttgtatttttagtagagacagggtttcaccatattggtcaggctggtcttgaactcctgacctcgtgatctgcccgccttggcctcccaaagtactgggattacaggcgtgagccaccgtgcccaaccatgaaatatttttacttaaaaattgggaataagctcgctttttttttttttgagatggagtcttgctcctgttgtgcaggctgtagtgcagtggcacgatcttggctcactgcaacctccacctcccgggttcaagcaattctccttcttcagcctcccgagtagctgagattataggcgtgcaccaccacacctggctaatttttgtatttttagtagagacagggtttcaccatattggtcaggctggtcttgaactcctgacctcgtgatccacccacctcaggaagtgctgggattacaggcgtgtgagccaccacgcccggccatgaaatatttttacttaaaaattgggaataagctttttggttttttgtgggtttttgtttttgttttttgttttttgtttttttgagatggagtcttgctcctgttgtgcaggctggagtgcagtggcacagtcttggctcactgcaacctccacctcctgggttcaagcaattctccttcttcagcctcccgagtagctgggattacaggcatgcaccaccacacctggctaatttttgtgtttttagtagagacggggtttcgctattttggccgggctggtttcaaactcctgacctcagttgatccacccgcctcagcctcccaaagtgctaggattacaggcatgaaccaccgtgcccggccaggaataagcttttgacttacccaattcagataggttgatctttggggttttttttttttttttgagatggagtttcgctctgttgtccaggctggagtgcaatggcagttgtttcaccgtaacctctgcctcctgacttcaagcaattctcctgcctcagcctcccaaagtgctgggattacaggtgtgagccaccgtgcccggcccagataggttgatcttaatgtaacaacccaaaaataaatgtcatagtcaagatttggtagataaatttaaaattaaaatattctgcagttgggagtgaaatgtgatagcacatacgttgacattatgcatttagagatgttataaaaatgtataggcagtatacacagcactactcaagaagccaaagaaacacttgtgcagtgctaagtgtcacatgtctgcttccaccagaggctaggaatagtgatcctgctataatgtgagaacccaaatcatgtttataaaataggacgctgggagcagttgcaggccacagtgaagtgtgttgcttctgtcactttatattcttatatttcctttccctcagacagtaaactgttgatactcgtacttgtaaaaaattgtaaggcaatttttagtattgttgtcaaagaaaagcttggattacattaacatttgtattcagtcttttaggtgatacaccagagggggctgggaattgtctctttgttcctataagtagatcttaatgtaaaatagtaaatgtccattgaaaagcaagtaatacagcctgtgctaattgggagcacttgaacaattttgttccattctgagtaacttttgagcaagtaattctaagctttgtcttgtatccttgtgtgaaattgcataatttttaccctatttgatttcttaaataaagatgtttgctc

SEQ ID NO: 46485 - DNA, 1982 bp, Artificial Sequence
  derived and/or modified sequence
ggctacaggttcggggcgcgggtctcttccgcggaaactgacattgcgtttccgttgtcggcctcccactgcaggagccatatattgaagaccatgtctgggagcttctactttgtaattgttggccaccatgataatccagtttttgaaatggagtttttgccagctgggaaggcagaatccaaagacgaccatcgtcatctgaaccagttcatagctcatgctgctctcgacctcgtagatgagaacatgtggctatcgaacaacatgtacttgaaaactgtggacaagttcaacgagtggtttgtgtcggcatttgtcactgcggggcatatgaggtttattatgcttcatgacataagacaagaagatggaataaagaacttctttactgatgtttatgatttatatataaagttttcaatgaatccattttatgaacccaattctcctattcgatcaagtgcatttgacagaaaagttcagtttcttgggaagaaacaccttttaagctgaatgcagaaaattccaaaataaatgatgtcaccacaatggtgtatactcaggaatgtgtacattgtaagttacttgattaaatagcctggaaaacttttgtgtattctcagcttatctaaacctaatgaaattccttttatatttaaaaatagtacattctgtctcatgtcacgtatcaatagatcaattggtatttccttgtgaacagtgttatttataaagagttcattatcaataatcatgttttttttttttttttttttctgatacagagtctcactctgttgccaggctggagtgcagtggcgcaatcttggctcactgcaacctccgcctcccaggttcaggcgattctcctgcctcagcctccaagtagctgggactacaggcgcgtgccaccacgcccggctaatttttgtatttttagtagagacagggtttcaccatattggtcaggctggtcttgaactcctgacctcttgatccacccgcctcagcctcccaaagtgctaggattacaggcatgaaccaccgtgcccggccaggaataagcttttgacttacccaattcagataggttgatctttggggttttttttttttttttgagatggagtttcgctctgttgtccaggctggagtgcaatggcagttgtttcaccgtaacctctgcctcctgacttcaagcaattctcctgcctcagcctcccaaagtgctgggattacaggtgtgagccaccgtgcccggcccagataggttgatcttaatgtaacaacccaaaaataaatgtcatagtcaagatttggtagataaatttaaaattaaaatattctgcagttgggagtgaaatgtgatagcacatacgttgacattatgcatttagagatgttataaaaatgtataggcagtatacacagcactactcaagaagccaaagaaacacttgtgcagtgctaagtgtcacatgtctgcttccaccagaggctaggaatagtgatcctgctataatgtgagaacccaaatcatgtttataaaataggacgctgggagcagttgcaggccacagtgaagtgtgttgcttctgtcactttatattcttatatttcctttccctcagacagtaaactgttgatactcgtacttgtaaaaaattgtaaggcaatttttagtattgttgtcaaagaaaagcttggattacattaacatttgtattcagtcttttaggtgatacaccagagggggctgggaattgtctctttgttcctataagtagatcttaatgtaaaatagtaaatgtccattgaaaagcaagtaatacagcctgtgctaattgggagcacttgaacaattttgttccattctgagtaacttttgagcaagtaattctaagctttgtcttgtatccttgtgtgaaattgcataatttttaccctatttgatttcttaaataaagatgtttgctcaa

SEQ ID NO: 46486 - DNA, 2879 bp, Artificial Sequence
  derived and/or modified sequence
acatcccagggtatcgcgagaactgcttcggcgttctggctacaggttcggggcgcgggtctcttccgcggaaactgacattgcgtttccgttgtcggcctcccactgcagtatcaccttctcccccaagtgtgacaaccaaagatgtctccagatattgccagatgtcctcttggaagcaagatcgctccgggttgagatccacagagctaaacgttttagagtaccaaccattgtgtgctgtgaggtaaaggagccatatattgaagaccatgtctgggagcttctactttgtaattgttggccaccatgataatccagtttttgaaatggagtttttgccagctgggaaggcagaatccaaagacgaccatcgtcatctgaaccagttcatagctcatgctgctctcgacctcgtagatgagaacatgtggctatcgaacaacatgtacttgaaaactgtggacaagttcaacgagtggtttgtgtcggcatttgtcactgcggggcatatccttaccttcttagtaaagatgaggtttattatgcttcatgacataagacaagaagatggaataaagaacttctttactgatgtttatgatttatatataaagttttcaatgaatccattttatgaacccaattctcctattcgatcaagtgcatttgacagaaaagttcagtttcttgggaagaaacaccttttaagctgaatgcagaaaattccaaaataaatgatgtcaccacaatggtgtatactcaggaatgtgtacattgtaagttacttgattaaatagcctggaaaacttttgtgtattctcagcttatctaaacctaatgaaattccttttatatttaaaaatagtacattctgtctcatgtcacgtatcaatagatcaattggtatttccttgtgaacagtgttatttataaagagttcattatcaataatcatgttttttttttttttttttttctgatacagagtctcactctgttgccaggctggagtgcagtggcgcaatcttggctcactgcaacctccgcctcccaggttcaggcgattctcctgcctcagcctccaagtagctgggactacaggcgcgtgccaccacgcccggctaatttttgtatttttagtagagacagggtttcaccatattggtcaggctggtcttgaactcctgacctcgtgatctgcccgccttggcctcccaaagtactgggattacaggcgtgagccaccgtgcccaaccatgaaatatttttacttaaaaattgggaataagctcgctttttttttttttgagatggagtcttgctcctgttgtgcaggctgtagtgcagtggcacgatcttggctcactgcaacctccacctcccgggttcaagcaattctccttcttcagcctcccgagtagctgagattataggcgtgcaccaccacacctggctaatttttgtatttttagtagagacagggtttcaccatattggtcaggctggtcttgaactcctgacctcgtgatccacccacctcaggaagtgctgggattacaggcgtgtgagccaccacgcccggccatgaaatatttttacttaaaaattgggaataagctttttggttttttgtgggtttttgtttttgttttttgttttttgtttttttgagatggagtcttgctcctgttgtgcaggctggagtgcagtggcacagtcttggctcactgcaacctccacctcctgggttcaagcaattctccttcttcagcctcccgagtagctgggattacaggcatgcaccaccacacctggctaatttttgtgtttttagtagagacggggtttcgctattttggccgggctggtttcaaactcctgacctcagttgatccacccgcctcagcctcccaaagtgctaggattacaggcatgaaccaccgtgcccggccaggaataagcttttgacttacccaattcagataggttgatctttggggttttttttttttttttgagatggagtttcgctctgttgtccaggctggagtgcaatggcagttgtttcaccgtaacctctgcctcctgacttcaagcaattctcctgcctcagcctcccaaagtgctgggattacaggtgtgagccaccgtgcccggcccagataggttgatcttaatgtaacaacccaaaaataaatgtcatagtcaagatttggtagataaatttaaaattaaaatattctgcagttgggagtgaaatgtgatagcacatacgttgacattatgcatttagagatgttataaaaatgtataggcagtatacacagcactactcaagaagccaaagaaacacttgtgcagtgctaagtgtcacatgtctgcttccaccagaggctaggaatagtgatcctgctataatgtgagaacccaaatcatgtttataaaataggacgctgggagcagttgcaggccacagtgaagtgtgttgcttctgtcactttatattcttatatttcctttccctcagacagtaaactgttgatactcgtacttgtaaaaaattgtaaggcaatttttagtattgttgtcaaagaaaagcttggattacattaacatttgtattcagtcttttaggtgatacaccagagggggctgggaattgtctctttgttcctataagtagatcttaatgtaaaatagtaaatgtccattgaaaagcaagtaatacagcctgtgctaattgggagcacttgaacaattttgttccattctgagtaacttttgagcaagtaattctaagctttgtcttgtatccttgtgtgaaattgcataatttttaccctatttgatttcttaaataaagatgtttgctcaag

SEQ ID NO: 46487 - DNA, 678 bp, Artificial Sequence
  derived and/or modified sequence
ctcttccgcggaaactgacattgcgtttccgttgtcggcctcccactgcagtatcaccttctcccccaagtgtgacaaccaaagatgtctccagatattgccagatgtcctcttggaagcaagatcgctccgggttgagatccacagagctaaacgttttagagtaccaaccattgtgtgctgtgaggagccatatattgaagaccatgtctgggagcttctactttgtaattgttggccaccatgataatccagtttttgaaatggagtttttgccagctgggaaggcagaatccaaagacgaccatcgtcatctgaaccagttcatagctcatgctgctctcgacctcgtagatgagaacatgtggctatcgaacaacatgtacttgaaaactgtggacaagttcaacgagtggtttgtgtcggcatttgtcactgcggggcatatgaggtttattatgcttcatgacataagacaagaagatggaataaagaacttctttactgatgtttatgatttatatataaagttttcaatgaatccattttatgaacccaattctcctattcgatcaagtgcatttgacagaaaagttcagtttcttgggaagaaacaccttttaagctgaatgcagaaaattccaaaataaatgatgtcaccacaatggtgtatactca

SEQ ID NO: 46488 - DNA, 562 bp, Artificial Sequence
  derived and/or modified sequence
atcccagggtatcgcgagaactgcttcggcgttctggctacaggttcggggcgcgggtctcttccgcggaaactgacattgcgtttccgttgtcggcctcccactgcagtatcaccttctcccccaagtgtgacaaccaaagatgtctccagatattgccagatgtcctcttggaagcaagatcgctccgggttgagatccacagagctaaacgttttagagtaccaaccattgtgtgctgtgaggtaaaggtaagtgacatgaggtagagttggttttagcttcccccgacggatgcctcctggaaatttctaaggcaaggagccatatattgaagaccatgtctgggagcttctactttgtaattgttggccaccatgataatccagtttttgaaatggagtttttgccagctgggaaggcagaatccaaagacgaccatcgtcatctgaaccagttcatagctcatgctgctctcgacctcgtagatgagaacatgtggctatcgaacaacatgtacttgaaaactgtggacaagttcaacgagtggtttgtgtcggca

SEQ ID NO: 46489 - protein, 2137 aa, Artificial Sequence
  derived and/or modified sequence
MMMMMMMKKMQHQRQQQADHANEANYARGTRLPLSGEGPTSQPNSSKQTVLSWQAAIDAARQAKAAQTMSTSAPPPVGSLSQRKRQQYAKSKKQGNSSNSRPARALFCLSLNNPIRRACISIVEWKPFDIFILLAIFANCVALAIYIPFPEDDSNSTNHNLEKVEYAFLIIFTVETFLKIIAYGLLLHPNAYVRNGWNLLDFVIVIVGLFSVILEQLTKETEGGNHSSGKSGGFDVKALRAFRVLRPLRLVSGVPSLQVVLNSIIKAMVPLLHIALLVLFVIIIYAIIGLELFIGKMHKTCFFADSDIVAEEDPAPCAFSGNGRQCTANGTECRSGWVGPNGGITNFDNFAFAMLTVFQCITMEGWTDVLYWMNDAMGFELPWVYFVSLVIFGSFFVLNLVLGVLSGEFSKEREKAKARGDFQKLREKQQLEEDLKGYLDWITQAEDIDPENEEEGGEEGKRNTSMPTSETESVNTENVSGEGENRGCCGSLCQAISKSKLSRRWRRWNRFNRRRCRAAVKSVTFYWLVIVLVFLNTLTISSEHYNQPDWLTQIQDIANKVLLALFTCEMLVKMYSLGLQAYFVSLFNRFDCFVVCGGITETILVELEIMSPLGISVFRCVRLLRIFKVTRHWTSLSNLVASLLNSMKSIASLLLLLFLFIIIFSLLGMQLFGGKFNFDETQTKRSTFDNFPQALLTVFQILTGEDWNAVMYDGIMAYGGPSSSGMIVCIYFIILFICGNYILLNVFLAIAVDNLADAESLNTAQKEEAEEKERKKIARKESLENKKNNKPEVNQIANSDNKVTIDDYREEDEDKDPYPPCDVPVGEEEEEEEEDEPEVPAGPRPRRISELNMKEKIAPIPEGSAFFILSKTNPIRVGCHKLINHHIFTNLILVFIMLSSAALAAEDPIRSHSFRNTILGYFDYAFTAIFTVEILLKMTTFGAFLHKGAFCRNYFNLLDMLVVGVSLVSFGIQSSAISVVKILRVLRVLRPLRAINRAKGLKHVVQCVFVAIRTIGNIMIVTTLLQFMFACIGVQLFKGKFYRCTDEAKSNPEECRGLFILYKDGDVDSPVVRERIWQNSDFNFDNVLSAMMALFTVSTFEGWPALLYKAIDSNGENIGPIYNHRVEISIFFIIYIIIVAFFMMNIFVGFVIVTFQEQGEKEYKNCELDKNQRQCVEYALKARPLRRYIPKNPYQYKFWYVVNSSPFEYMMFVLIMLNTLCLAMQHYEQSKMFNDAMDILNMVFTGVFTVEMVLKVIAFKPKGYFSDAWNTFDSLIVIGSIIDVALSEADNSEESNRISITFFRLFRVMRLVKLLSRGEGIRTLLWTFIKSFQALPYVALLIAMLFFIYAVIGMQMFGKVAMRDNNQINRNNNFQTFPQAVLLLFRCATGEAWQEIMLACLPGKLCDPESDYNPGEEYTCGSNFAIVYFISFYMLCAFLIINLFVAVIMDNFDYLTRDWSILGPHHLDEFKRIWSEYDPEAKGRIKHLDVVTLLRRIQPPLGFGKLCPHRVACKRLVAMNMPLNSDGTVMFNATLFALVRTALKIKTEGNLEQANEELRAVIKKIWKKTSMKLLDQVVPPAGDDEVTVGKFYATFLIQDYFRKFKKRKEQGLVGKYPAKNTTIALQAGLRTLHDIGPEIRRAISCDLQDDEPEETKREEEDDVFKRNGALLGNHVNHVNSDRRDSLQQTNTTHRPLHVQRPSIPPASDTEKPLFPPAGNSVCHNHHNHNSIGKQVPTSTNANLNNANMSKAAHGKRPSIGNLEHVSENGHHSSHKHDREPQRRSSVKRSDSGDEQLPTICREDPEIHGYFRDPHCLGEQEYFSSEECYEDDSSPTWSRQNYGYYSRYPGRNIDSERPRGYHHPQGFLEDDDSPVCYDSRRSPRRRLLPPTPASHRRSSFNFECLRRQSSQEEVPSSPIFPHRTALPLHLMQQQIMAVAGLDSSKAQKYSPSHSTRSWATPPATPPYRDWTPCYTPLIQVEQSEALDQVNGSLPSLHRSSWYTDEPDISYRTFTPASLTVPSSFRNKNSDKQRSADSLVEAVLISEGLGRYARDPKFVSATKHEIADACDLTIDEMESAASTLLNGNVRPRANGDVGPLSHRQDYELQDFGPGYSDEEPDPGRDEEDLADEMICITTL

SEQ ID NO: 46490 - protein, 539 aa, Artificial Sequence
  derived and/or modified sequence
MGETWLCPAALGLLYKAIDSNGENIGPIYNHRVEISIFFIIYIIIVAFFMMNIFVGFVIVTFQEQGEKEYKNCELDKNQRQCVEYALKARPLRRYIPKNPYQYKFWYVVNSSPFEYMMFVLIMLNTLCLAMQHYEQSKMFNDAMDILNMVFTGVFTVEMVLKVIAFKPKGYFSDAWNTFDSLIVIGSIIDVALSEADNSEESNRISITFFRLFRVMRLVKLLSRGEGIRTLLWTFIKSFQALPYVALLIAMLFFIYAVIGMQMFGKVAMRDNNQINRNNNFQTFPQAVLLLFRCATGEAWQEIMLACLPGKLCDPESDYNPGEEYTCGSNFAIVYFISFYMLCAFLIINLFVAVIMDNFDYLTRDWSILGPHHLDEFKRIWSEYDPEAKGRIKHLDVVTLLRRIQPPLGFGKLCPHRVACKRLVAMNMPLNSDGTVMFNATLFALVRTALKIKTEGNLEQANEELRAVIKKIWKKTSMKLLDQVVPPAGDDEVTVGKFYATFLIQDYFRKFKKRKEQGLVGKYPAKNTTIALQMLERML

SEQ ID NO: 46491 - DNA, 6414 bp, Artificial Sequence
  derived and/or modified sequence
atgatgatgatgatgatgatgaagaagatgcagcaccaacgacagcaacaggccgatcacgctaacgaggctaattacgccagagggactaggctgcccctcagcggtgaaggcccaacttcacaacccaattcttccaaacaaactgtgttgagttggcaggcagccatagatgcagcaagacaggcaaaagccgctcagaccatgtccaccagcgctcctccgcccgtagggtctcttagtcagcgcaaacgccagcagtatgctaagtcaaagaaacagggtaacagtagtaattctagaccagcccgggcgcttttttgcctttcgctcaacaatcccatcaggagagcgtgcatcagcatcgttgagtggaagcctttcgacatcttcatactgctggcaattttcgccaactgtgttgcgcttgcaatctacatcccttttcccgaagatgacagcaattcaaccaatcataacctagagaaggtggagtatgcatttctgatcattttcaccgttgagacctttctcaagatcattgcatatggcctccttttacaccctaacgcatacgttcgaaatggttggaatcttctagacttcgtgatcgtcatcgtcggtttattctcagtgatactcgaacagctgactaaggaaacagagggcgggaaccatagcagcggaaagtcaggtggcttcgacgtcaaagctctgagagcgtttagggttctgcgccccctgcgtttggtgagcggggttccctccttgcaggttgtgcttaactctattatcaaagccatggtgccattgctccacattgcactgctagtgctgttcgtcatcattatatacgccatcatcggcttagagctgtttataggcaagatgcacaagacctgcttttttgccgatagcgacattgtagccgaagaggatccagccccatgtgctttcagcggtaatggtaggcagtgcacagccaacggaacggagtgtaggtcaggctgggtagggcctaatggtggtattaccaatttcgacaactttgcgtttgctatgctcaccgtcttccagtgtatcactatggagggatggaccgacgttctgtactggatgaacgacgccatgggattcgagctcccttgggtttatttcgtctctctggtgatctttgggtcattctttgtcttaaacctggtgctcggggtgctaagcggggagttcagtaaagagagagaaaaggctaaggcccggggggacttccagaagcttagggagaagcagcagctggaagaggatttaaaggggtatctcgactggatcacacaggccgaagacattgaccccgagaatgaagaagaggggggggaggagggcaaacggaacacttccatgcccacctctgagaccgagagcgtgaacactgaaaatgtgagtggggaaggcgagaaccgcggttgctgcggatccctgtgtcaagcgatctctaagagcaaactttcaaggcgctggagacgatggaatcggttcaataggaggcgctgtagagccgccgttaaaagtgttactttttattggctggtgatcgtgctcgtgtttttgaacacactgaccataagctccgagcactacaaccagcctgattggctgactcagatccaggatatcgcaaataaggttctcctggcactctttacgtgcgagatgctggttaagatgtacagcttgggcttacaggcttattttgtgtctttattcaacaggttcgactgttttgtggtctgtgggggcatcacagagacaattttagtggagcttgaaatcatgtccccactgggaatcagcgtgtttcgatgtgtaagactcttgcgaatttttaaagtgactcgccactggacgtccctgtccaatctcgttgcaagtctactgaattcaatgaagagcattgcttcactgttgctcctcctgttcctgtttattatcatattctccttgctcgggatgcaactgtttggaggtaagtttaacttcgatgagacccagaccaagcgctccacatttgacaattttccgcaggctctgcttacagtattccaaattttgacaggggaagattggaacgccgtgatgtacgatggcataatggcatacggcggcccaagctctagcggcatgattgtctgtatctactttatcattttgttcatctgcggcaattatatactgctcaacgtgttcctggctatagccgtggacaatttggccgatgcggaaagcttaaataccgcccaaaaagaggaagccgaagagaaggagcgcaagaaaatcgctaggaaagaatcactggagaacaagaagaacaataagcccgaagtgaaccagattgctaactctgacaataaggtgaccatcgacgactacagggaagaggacgaggacaaagacccttatccgccttgcgatgtcccggttggtgaggaggaggaagaggaagaggaagacgagccagaagtgccagccgggccacggccacggaggatcagtgaactcaatatgaaagagaagatcgctcctatccctgaggggtcagcgttcttcatcctgtctaagacgaaccctatcagagtggggtgtcacaagctcattaaccaccatatcttcaccaatttgatccttgtgttcatcatgctgtcatctgcagccttggccgccgaggacccaatccggagccattcttttcgcaataccattctgggctatttcgactatgcttttacagccatcttcacagttgagatcctcctcaagatgactactttcggtgcattcttgcataagggagcattttgcaggaattactttaatctcttagacatgctagtcgtcggggtctcactagttagctttggcattcagtcctctgcaatttctgtagtgaaaattctgcgcgtcctccgggtcctgagaccgctgcgcgccattaatcgggccaagggcctgaagcacgtggtccagtgcgtcttcgttgccattcgcacgattggaaacataatgatagtgaccaccctcttgcagtttatgttcgcatgcattggggtgcagctctttaaaggtaagttttatagatgcacagatgaagctaagtccaacccggaagagtgcagaggactcttcattctgtataaggacggcgatgtggacagccctgttgtgcgagagcgaatctggcagaacagcgattttaactttgacaacgtcctgtctgcaatgatggccctgttcaccgtttcgacttttgagggctggccagcgttattgtataaggccatcgactctaacggcgagaatatcgggccgatctacaaccatcgggttgagatctccatctttttcattatctatattatcatcgtggccttcttcatgatgaacatcttcgtcggttttgttatcgtgacattccaggaacagggagaaaaggaatataagaattgtgaactggataaaaatcaacgacaatgcgtggaatacgctttgaaggcccggccactacggcgttatatacccaagaacccatatcaatacaagttttggtatgtggtgaactcgtccccctttgagtacatgatgtttgtgttaattatgctcaacactctatgcctggcaatgcagcactacgagcagtctaagatgttcaatgatgcaatggatatcttgaatatggtgttcactggcgtgtttactgttgagatggttctaaaagtaatcgcctttaaaccaaagggctacttctctgatgcctggaacacctttgacagcctgatcgtcatcggaagcattatagacgtggccctgtcagaggccgacaatagcgaggagagcaataggatatcaattacttttttcagactgttccgggtcatgcgcctggtgaaactcctgagccggggagagggcattcggaccctgctgtggacctttatcaaatctttccaggccttgccatacgtggcccttctgatcgctatgctctttttcatatacgctgtgattggtatgcagatgttcggaaaggtcgccatgcgagacaacaaccagatcaacagaaacaacaatttccagacatttccacaggctgtgttattgttgtttaggtgtgccaccggggaagcatggcaagaaatcatgctggcttgcctgcctggcaaattgtgcgatcccgaatccgattacaatccaggcgaggaatacacctgcggtagcaactttgccatcgtctactttatttctttttatatgctctgtgccttcttaataattaatctctttgtagccgttatcatggataatttcgactacctgacgagagactggtcaatcctcgggccccaccatcttgatgagttcaaacgcatttggtccgagtatgacccagaggctaaagggagaattaagcatctcgatgtggtgactctgctgcgcagaattcagcctcctctgggctttgggaaactgtgcccccatcgcgttgcatgtaagagactggtcgccatgaatatgcctctcaacagcgatggaacagtcatgtttaacgcaacactgtttgccctagttcgcacagccctcaagattaagacagaaggcaacctggagcaggcaaacgaggagttgcgggccgtgatcaaaaagatctggaaaaagacatctatgaagctgctcgaccaagtcgtaccccctgctggggatgacgaagtgactgttggcaagttctatgccacctttctgattcaagactactttcgaaagttcaagaaacgtaaggaacagggtctcgtggggaagtatcctgcaaaaaacacgaccatcgctctgcaagctgggctacgaactctgcacgatattgggcccgaaatcagaagggcgattagctgcgatcttcaggatgatgaaccagaggagaccaaacgtgaggaggaagatgacgtatttaagcggaacggcgcgctcctgggcaatcatgtcaaccacgtcaatagcgatagaagggactctctgcagcaaacaaacactacacacagacctctgcatgtgcagaggccttccatcccacctgcctcagatactgagaaacctcttttccctccagctggtaatagtgtctgtcataaccatcataaccacaatagtatcggcaagcaagtgccaacatcaacaaatgccaacctgaataacgccaacatgtctaaagcagcccatgggaaacggccctcaatcggcaacctggaacacgtgtccgagaatggtcatcattcctcgcataagcatgatagggagcctcagaggcgctcttccgtgaaaaggagcgattcaggggacgaacagttgcctacaatttgtcgcgaggatccggagatacacggctacttccgtgaccctcactgtctgggcgagcaggaatatttcagttccgaagaatgttacgaggatgattcaagcccaacctggagcagacaaaactacggttactactcgaggtatcccggaaggaatattgacagtgaacggccacggggctaccatcacccccaaggatttctggaagacgacgactcaccagtgtgctacgattctcgtagatcaccccgaagaagattgctgcccccaaccccagccagccacagaagaagcagcttcaacttcgagtgtctcagaagacaaagcagccaggaggaggttccgagtagtcctatcttccctcaccgcaccgctctcccccttcatcttatgcagcagcaaattatggctgtcgctggtctggatagtagtaaagcgcagaaatatagcccatctcattcaactagatcttgggccactccgccagccaccccaccctatcgggattggacgccatgctatacccccttaattcaagtggagcagagcgaagcactcgaccaggtcaatggctccctgccctctttgcacaggtcaagctggtatactgatgaaccagacatctcctatagaacctttactccggcctccctcactgtcccgagcagctttcgcaacaaaaatagcgacaagcagcgcagtgctgatagtctggtggaagctgtgctcattagcgaaggactgggaagatacgcacgggacccaaagttcgtgtctgccactaagcacgaaatcgcagatgcctgcgatctaaccatcgacgagatggaatctgccgcaagcactctgttgaacggaaacgtgaggccccgcgccaatggggacgtgggtcctctctcacacagacaggattacgaattacaggactttggacctggctactccgatgaagaaccagacccaggtagggacgaggaggatctggcggatgagatgatctgcatcactactctttag

SEQ ID NO: 46492 - DNA, 1620 bp, Artificial Sequence
  derived and/or modified sequence
atgggagagacatggttgtgtccagccgccctgggactgctatacaaggccatcgatagtaacggcgaaaatatagggccgatttacaaccatcgggtggaaatctccatcttctttattatctatattattattgtcgccttctttatgatgaacatttttgttggctttgtaattgtgactttccaggagcagggtgaaaaagagtacaagaactgcgagttagataagaatcaacgtcagtgcgtagagtatgcactgaaggccagacccctacgccgttatatacctaagaacccttatcagtacaaattttggtatgtcgtgaacagcagtcctttcgaatatatgatgttcgtgctgatcatgcttaacactctctgcctagccatgcaacactatgagcagtcaaagatgttcaatgacgcaatggatatcctgaacatggtgttcactggagtatttactgtggaaatggtgctcaaggtgattgcctttaaacccaaaggctattttagcgatgcttggaatacatttgacagcctgatagtgatcgggtctatcatcgatgtggctctgtcggaagccgataactcggaagagtccaaccgtatctccatcacgttctttagactgttccgagtaatgagactagtgaagctactctccagaggggagggaatccgaacccttctttggacgtttatcaaaagtttccaggcactgccctatgtggccctgctgattgcaatgctgttctttatttacgcagtcattgggatgcagatgtttggtaaggtggccatgcgcgacaataaccaaatcaaccgtaataataatttccagacatttccacaggccgtgcttctcctgtttaggtgcgctaccggcgaggcgtggcaagagattatgctcgcctgtctgccagggaagctctgcgatcccgaatcagattacaacccaggcgaagaatacacctgcggctccaactttgctatcgtgtactttatctccttctacatgctgtgcgcttttctgattataaatctcttcgttgcggtgatcatggacaattttgactaccttacccgggactggtcaatactaggtcctcaccacctggacgagttcaagcgaatctggtcagagtacgaccccgaagccaaaggccgtattaagcacctggatgtcgtgacattactgaggagaatacagccccccttaggttttgggaagctttgtccgcaccgggttgcttgtaaaaggctggtggccatgaacatgcctcttaatagtgacgggaccgtgatgtttaacgcaacactgtttgccctggtgagaacagcattaaagatcaaaacagaagggaatttggagcaggccaatgaggaattacgcgctgtcattaagaagatctggaagaagacatcgatgaagctcctggatcaagtagtccctccagctggcgatgacgaagtgaccgtcggcaaattctatgcaaccttcctcatccaagattattttcgtaagttcaagaaaaggaaagagcaaggcttggttggcaagtaccctgccaagaataccacaatcgccttgcagatgctagagaggatgctttag

SEQ ID NO: 46493 - DNA, 6414 bp, Artificial Sequence
  derived and/or modified sequence
atgatgatgatgatgatgatgaagaagatgcagcaccagaggcagcagcaggccgaccacgccaatgaggccaactatgcccggggcacccggctgcccctgtctggagagggccccaccagccagcccaacagcagcaagcagacagtgctgtcctggcaggccgccattgatgctgcccggcaggccaaggccgcccagaccatgagcaccagcgcccctcctcctgtgggcagcctgagccagaggaagaggcagcagtatgccaagagcaagaagcagggcaacagcagcaacagcaggcctgcccgggccctcttctgcctgagcctgaacaaccccatccggcgggcctgcatcagcatcgtggagtggaagccctttgacatcttcatcctgctggccatctttgccaactgtgtggccctggccatctacatccccttcccagaagatgacagcaacagcaccaaccacaacctggagaaggtggagtatgccttcctgatcatcttcaccgtggagaccttcctgaagatcatcgcctacggcctgctgctgcaccccaatgcctacgtgagaaatggctggaacctgctggactttgtgattgtcatcgtgggcctcttcagcgtcatcctggagcagctgaccaaggagacagaaggaggcaaccacagcagcggcaagagcggcggctttgatgtgaaggccctgcgggccttccgggtgctgcggcccctgcggctggtgtctggagtgcccagcctgcaggtggtgctgaacagcatcatcaaggccatggtgcccctgctgcacatcgccctgctggtgctcttcgtcatcatcatctatgccatcatcggcctggagctgttcatcggcaagatgcacaagacctgcttctttgctgacagcgacatcgtggccgaggaggaccctgccccctgtgccttctctggaaatggccggcagtgcacagccaatggaacagagtgccgcagcggctgggtgggccccaatggaggcatcaccaactttgacaactttgcctttgccatgctgaccgtcttccagtgcatcaccatggagggctggacagatgtgctgtactggatgaatgatgccatgggctttgagctgccctgggtgtactttgtgtccctggtgatcttcggcagcttctttgtgctgaacctggtgctgggcgtgctgagcggggagttcagcaaggagcgggagaaggccaaggcccggggggacttccagaagctgcgggagaagcagcagctggaggaggacctgaagggctacctggactggatcacccaggccgaggacatcgaccctgaaaatgaggaggagggcggggaggagggcaagaggaacacctccatgcccaccagcgagacagaatctgtgaacacagaaaatgtgtctggagagggggagaacagaggctgctgcggcagcctgtgccaggccatcagcaagagcaagctgagccgccgctggaggcgctggaaccgcttcaacagaagacgctgcagagctgctgtgaagtctgtgaccttctactggctggtgattgtgctggtgttcctgaacaccctgaccatcagcagcgagcactacaaccagcctgactggctgacccagatccaggacatcgccaacaaggtgctgctggccctcttcacctgtgagatgctggtgaagatgtacagcctgggcctgcaggcctactttgtgtccctcttcaacagatttgactgctttgtggtgtgtggcggcatcacagagaccatcctggtggagctggagatcatgagccccctgggcatcagcgtcttccgctgtgtgcggctgctgcgcatcttcaaggtgaccaggcactggaccagcctgagcaacctggtggccagcctgctgaacagcatgaagagcatcgccagcctgctgctgctgctcttcctgttcatcatcatcttcagcctgctgggcatgcagctgtttggaggcaagttcaactttgatgagacccagaccaagaggagcacctttgacaacttcccccaggccctgctgactgtgttccagatcctgactggagaggactggaatgctgtgatgtatgatggcatcatggcctacggcggccccagcagcagcggcatgattgtgtgcatctacttcatcatcctcttcatctgtggcaactacatcctgctgaatgtgttcctggccatcgctgtggacaacctggctgatgctgagagcctgaacacagcccagaaggaggaggccgaggagaaggagaggaagaagatcgccaggaaggagagcctggagaacaagaagaacaacaagccagaggtgaaccagatcgccaacagcgacaacaaggtgaccattgatgactaccgggaggaggatgaggacaaggacccctacccaccctgtgatgtgcctgtgggggaggaggaggaggaggaggaggaggatgagcctgaggtgcctgctggcccccggccccggcgcatcagcgagctgaacatgaaggagaagatcgcccccatccctgagggcagcgccttcttcatcctgagcaagaccaaccccatccgggtgggctgccacaagctgatcaaccaccacatcttcaccaacctgatcctggtgttcatcatgctgagcagcgctgccctggccgctgaggaccccatccgcagccacagcttcaggaacaccatcctgggctactttgattatgccttcaccgccatcttcaccgtggagatcctgctgaagatgaccacctttggagccttcctgcacaagggggccttctgcaggaactacttcaacctgctggacatgctggtggtgggcgtgtccctggtgtcctttggcatccagagcagcgccatctctgtggtgaagatcctgcgggtgctgcgggtgctgcggcccctgcgggccatcaacagagccaagggcctgaagcacgtggtgcagtgtgtgtttgtggccatccgcaccatcggcaacatcatgattgtgaccaccctgctgcagttcatgtttgcctgcatcggcgtgcagctgttcaagggcaagttctaccgctgcacagatgaggccaagagcaaccctgaggagtgccggggcctcttcatcctgtacaaggatggagatgtggacagccctgtggtgcgggagcgcatctggcagaacagcgacttcaactttgacaacgtgctgagcgccatgatggccctcttcaccgtgtccacctttgagggctggccagccctgctgtacaaggccatcgacagcaatggagagaacatcggccccatctacaaccaccgggtggagatcagcatcttcttcatcatctacatcatcatcgtggccttcttcatgatgaacatctttgtgggcttcgtcatcgtgaccttccaggagcagggcgagaaggagtacaagaactgtgagctggacaagaaccagaggcagtgtgtggagtatgccctgaaggcccggcccctgcggcgctacatccccaagaacccctaccagtacaagttctggtacgtggtgaacagcagcccctttgagtacatgatgtttgtgctgatcatgctgaacaccctgtgcctggccatgcagcactatgagcagagcaagatgtttaatgatgccatggacatcctgaacatggtgttcaccggggtcttcaccgtggagatggtgctgaaggtgattgccttcaagcccaagggctacttcagtgatgcctggaacacctttgacagcctcatcgtcatcggcagcatcattgatgtggccctgtctgaggccgacaacagcgaggagagcaaccgcatcagcatcaccttcttccgcctcttccgggtgatgaggctggtgaagctgctgagcagaggagagggcatccgcaccctgctgtggaccttcatcaagagcttccaggccctgccctacgtggccctgctgattgccatgctgttcttcatctatgctgtgattggcatgcagatgtttgggaaggtggccatgagggacaacaaccagatcaacagaaacaacaacttccagaccttcccccaggccgtgctgctgctcttccgctgtgccactggagaggcctggcaggagatcatgctggcctgcctgcccgggaagctgtgtgaccctgagagtgactacaaccctggagaggagtacacctgtggcagcaactttgccatcgtgtacttcatctccttctacatgctgtgtgccttcctgatcatcaacctgtttgtggccgtcatcatggacaactttgactacctgacccgggactggagcatcctgggcccccaccacctggatgagttcaagaggatctggagcgaatatgaccctgaggccaagggccgcatcaagcacctggatgtggtgaccctgctgcggcgcatccagccccccctgggctttgggaagctgtgcccccaccgggtggcctgcaagaggctggtggccatgaacatgcccctgaacagtgatggcaccgtgatgtttaatgccaccctgtttgccctggtgaggacagccctgaagatcaagacagagggcaacctggagcaggccaatgaggagctgcgggccgtcatcaagaagatctggaagaagacctccatgaagctgctggaccaggtggtgcccccagctggagatgatgaggtgacagtgggcaagttctacgccaccttcctgatccaggactacttcaggaagttcaagaagaggaaggagcagggcctggtgggcaagtacccagccaagaacaccaccatcgccctgcaggccggcctgcggaccctgcatgacatcggccctgagatccggcgggccatcagctgtgacctgcaggatgatgagcctgaggagaccaagcgggaggaggaggatgatgtgttcaagagaaatggagccctgctgggcaaccacgtgaaccacgtgaacagcgaccggcgggacagcctgcagcagaccaacaccacccaccggcccctgcacgtgcagaggcccagcatccccccagccagtgacacagagaagcccctcttccccccagctggcaacagcgtgtgccacaaccaccacaaccacaacagcatcggcaagcaggtgcccaccagcaccaatgccaacctgaacaatgccaacatgagcaaggccgcccacggcaagaggcccagcatcggcaacctggagcacgtgtctgaaaatggccaccacagcagccacaagcatgaccgggagccccagaggaggagctctgtgaagagaagtgacagcggagatgagcagctgcccaccatctgccgggaggaccctgagatccacggctacttccgggacccccactgcctgggggagcaggagtacttcagcagcgaggagtgctatgaagatgacagcagccccacctggagccggcagaactacggctactacagccgctacccaggcaggaacatcgacagcgagcggccccggggctaccaccacccccagggcttcctggaggatgatgacagccctgtgtgctatgacagcagaagaagcccccggcggcggctgctgccccccaccccagccagccacagaagaagcagcttcaactttgagtgcctgcggcggcagagcagccaggaggaggtgcccagcagccccatcttcccccacaggacagccctgcccctgcacctgatgcagcagcagatcatggctgtggccggcctggacagcagcaaggcccagaagtacagccccagccacagcaccaggtcctgggccaccccaccagccaccccaccctacagagactggaccccctgctacacccccctcatccaggtggagcagagcgaggccctggaccaggtgaatggcagcctgcccagcctgcacaggagctcctggtacacagatgagccagacatctcctaccgcaccttcaccccagccagcctgactgtgcccagcagcttcaggaacaagaacagcgacaagcagaggtctgctgacagcctggtggaggccgtgctgatcagcgagggcctgggccgctatgcccgggaccccaagtttgtgtctgccaccaagcatgaaattgctgatgcctgtgacctgaccattgatgagatggagagcgctgccagcaccctgctgaatggaaatgtgcggccccgggccaatggagatgtgggccccctgagccaccggcaggactatgagctgcaggactttggacctggctacagtgatgaggagccagaccccggcagagatgaggaggacctggctgatgagatgatctgcatcaccaccctgtag

SEQ ID NO: 46494 - DNA, 1620 bp, Artificial Sequence
  derived and/or modified sequence
atgggagagacctggctgtgcccagctgccctgggcctgctgtacaaggccatcgacagcaatggagaaaatattggccccatctacaaccaccgggtggagatcagcatcttcttcatcatctacatcatcatcgtggccttcttcatgatgaacatctttgtgggctttgtgattgtgaccttccaggagcagggcgagaaggagtacaagaactgtgagctggacaagaaccagaggcagtgtgtggagtatgccctgaaggcccggcccctgcggcgctacatccccaagaacccctaccagtacaagttctggtacgtggtgaacagcagcccctttgagtacatgatgtttgtgctgatcatgctgaacaccctgtgcctggccatgcagcactatgagcagagcaagatgtttaatgatgccatggacatcctgaacatggtgttcaccggggtcttcaccgtggagatggtgctgaaggtgattgccttcaagcccaagggctacttcagtgatgcctggaacacctttgacagcctgattgtgattggcagcatcattgatgtggccctgtctgaggccgacaacagcgaggagagcaaccgcatcagcatcaccttcttccgcctcttccgggtgatgaggctggtgaagctgctgagcagaggagagggcatccgcaccctgctgtggaccttcatcaagagcttccaggccctgccctacgtggccctgctgattgccatgctgttcttcatctatgctgtgattggcatgcagatgtttgggaaggtggccatgagggacaacaaccagatcaacagaaacaacaacttccagaccttcccccaggccgtgctgctgctcttccgctgtgccaccggggaggcctggcaggagatcatgctggcctgcctgcccgggaagctgtgtgaccctgagagtgactacaaccctggagaggagtacacctgtggcagcaactttgccatcgtgtacttcatctccttctacatgctgtgtgccttcctgatcatcaacctgtttgtggccgtcatcatggacaactttgactacctgacccgggactggagcatcctgggcccccaccacctggatgagttcaagaggatctggagcgaatatgaccctgaggccaagggccgcatcaagcacctggatgtggtgaccctgctgcggcgcatccagccccccctgggctttgggaagctgtgcccccaccgggtggcctgcaagaggctggtggccatgaacatgcccctgaacagtgatggcaccgtgatgtttaatgccaccctgtttgccctggtgaggacagccctgaagatcaagacagagggcaacctggagcaggccaatgaggagctgcgggctgtgatcaagaagatctggaagaagacctccatgaagctgctggaccaggtggtgcccccagctggagatgatgaggtgacagtgggcaagttctacgccaccttcctgatccaggactacttcaggaagttcaagaagaggaaggagcagggcctggtgggcaagtacccagccaagaacaccaccatcgccctgcagatgctggagaggatgctgtag

SEQ ID NO: 46495 - DNA, 6414 bp, Artificial Sequence
  derived and/or modified sequence
atgatgatgatgatgatgatgaagaagatgcagcaccagcggcagcagcaggctgatcacgccaacgaagctaactatgctcgcggaacaagactgccattgtctggcgaagggccgaccagtcaacctaatagtagtaaacagacggtgttgtcttggcaagctgctatagacgcggctcgccaggccaaggctgcccaaaccatgtccacgtccgcacctccgcctgtggggtccctgtctcagcgcaagcggcagcagtacgcgaagtccaagaagcaaggcaatagttccaacagcagaccagcacgcgccctcttttgcctgagcctaaataatccaattcgaagggcttgtatcagtattgtggagtggaagccttttgatatcttcatcttgctagctatctttgccaattgtgtggcattagcaatttatattccctttcctgaagatgatagcaactcgactaaccataatctggagaaggttgagtacgcctttcttataattttcacagtcgagacttttcttaagatcatcgcatatggactgttgcttcatcccaatgcatacgtgagaaatggctggaatctactggatttcgtgatcgtgatagtggggctcttttccgtaattctggaacagttaacaaaagaaactgagggaggaaatcatagtagcggtaagtccggcggatttgacgttaaagccctcagagccttccgtgtgcttaggccactgcggctcgtgtccggcgttcccagtcttcaggtggtgctcaacagcatcatcaaagccatggtgccgttgttacacatagcgctgctagtactgtttgtgattatcatctacgccattattgggctggaattatttattgggaagatgcataagacatgcttcttcgctgattcggacatcgtggcagaagaggacccagccccctgtgcattcagcgggaacggaagacaatgcactgccaacggcactgagtgccggagcggctgggtgggacctaacggcggcatcacaaacttcgataacttcgccttcgctatgttgactgttttccagtgcattactatggagggttggacagatgtcctgtactggatgaatgacgctatgggctttgagctgccgtgggtgtatttcgtctccctggtcatatttggcagtttttttgtgcttaacctggtcctcggggttctctccggtgaattctccaaggagagagagaaggccaaggctcggggtgactttcagaaacttcgggaaaagcagcagctcgaggaggacctcaagggctatctggactggatcacacaggctgaggacatcgaccctgagaatgaagaagaaggcggagaagaaggaaagcgcaacacctctatgcccaccagcgaaacagagtccgttaacacagagaacgtgagcggtgagggtgagaatcgaggctgctgcggaagcctgtgccaggccataagcaagtccaaactgagtcgaaggtggaggcgatggaatcgttttaaccggcggcgatgccgggccgctgtgaagtccgtcactttttactggcttgtgattgtgctcgtgttccttaatacactgaccatatctagtgagcactacaatcagccggactggttaacacaaattcaagacatagcgaacaaagtcctcttggccctgttcacatgcgaaatgctcgtgaagatgtatagcctgggccttcaggcttacttcgtttctctcttcaacaggtttgattgtttcgtggtctgcggcgggattactgagaccatactggttgagctagagattatgtctcccctaggaattagcgtgttcagatgcgttcgtctcctgagaattttcaaagtgactagacactggacgtccctctctaacttggtagctagtctcttgaatagcatgaaaagtattgcctctctgctgctcctcctttttttgttcattatcatcttctctcttctggggatgcagctgtttggaggaaagttcaactttgacgagacacagaccaaacgctcaacttttgataattttccacaggccctcctcactgtgttccagatcctgaccggcgaagactggaacgccgtaatgtacgatgggatcatggcctatggaggtccttcctcatcaggcatgattgtttgtatatactttattatattattcatctgtgggaactacattctattgaacgtgtttttggccattgctgtcgacaacttggctgacgctgagtcccttaacacagcccagaaagaagaagcagaggagaaagaaaggaaaaagatcgctcgcaaggagtctctggagaacaaaaaaaacaacaagcctgaggtaaaccagattgcaaacagcgataataaagtgaccatagatgactaccgcgaggaggacgaggacaaggacccataccctccatgcgatgtgcctgtgggcgaagaagaggaagaagaagaggaagacgagcccgaagtcccagccggccctaggccccgccgaatcagtgagctgaacatgaaggagaagattgcacctatcccagagggatcggcattcttcatcttgagcaaaacgaacccgatacgcgtaggctgtcacaagttgattaaccatcatatcttcacgaatttgatcctggtctttataatgctttccagcgcagccctggccgcggaggatcccatacggagtcactccttcagaaatacaatcctgggatatttcgactacgcatttacagccattttcacagttgaaatactcctgaagatgaccacttttggcgcctttcttcataaaggcgccttttgcagaaattatttcaatcttctggatatgctggtggtcggcgtgtctctggtgtcattcggcatccagagttctgccatttctgtggttaaaatcctaagagtactccgggtcctgcgcccactgcgcgcaattaatcgtgcaaagggcctgaaacatgtggtgcaatgtgttttcgtggccattcggacaattggcaacatcatgatagtgaccacgctgctgcagtttatgttcgcatgtatcggcgtgcagttgtttaaggggaaattttacaggtgtaccgacgaggccaaatccaacccagaagagtgccggggcctgtttattctttataaagatggcgatgtggactctccagtcgtccgggagagaatatggcagaatagcgattttaactttgacaacgttcttagtgctatgatggccctctttacagtttcaacatttgaaggctggcccgctctgctgtacaaagctattgattccaacggagaaaacatcgggcctatatataatcaccgggtggaaatatctatcttctttatcatatacattatcattgtcgccttcttcatgatgaacatttttgtggggttcgttatcgtgactttccaggagcagggtgaaaaagaatacaaaaactgcgagctagataaaaatcagcgtcagtgtgtcgagtatgccctaaaagctaggcccctccgcaggtatatccctaagaacccctatcagtacaaattttggtacgttgtgaacagtagccccttcgagtacatgatgtttgtactaatcatgctcaacacactgtgccttgcaatgcaacactacgaacagagcaagatgtttaatgacgccatggacatcctcaacatggtatttacaggcgtgttcaccgttgaaatggtgctgaaggtgattgcttttaaaccgaagggatacttttcagacgcatggaacacatttgactccctaatagttatcggctccatcatcgatgttgctctgtccgaagccgacaatagcgaggaatctaacagaatcagtattactttctttcgtctattcagggtgatgagactggtcaagttgttgagcaggggagagggaatccgtacactgctgtggaccttcatcaagtcctttcaggcgctgccatacgtggctcttttaatcgctatgctgttctttatttacgcggtgatcggcatgcaaatgttcggcaaggtggccatgagagataacaaccagatcaaccgcaataataattttcaaaccttcccgcaagccgtccttctgctattccggtgcgccactggagaggcatggcaggagatcatgctggcatgcctacctggaaagctgtgtgatcccgaaagtgactacaacccgggcgaggaatacacgtgtggaagtaacttcgctattgtctatttcattagtttttatatgctgtgcgcatttcttatcattaatttgtttgtcgccgtgatcatggataacttcgattatttaaccagggattggagcattctcgggccacaccaccttgacgagtttaagaggatttggtctgaatacgatcccgaggcaaaggggcgcattaaacacttggacgtggttactttactcaggagaatccagcccccgctgggatttgggaaactgtgcccccatcgcgtagcttgcaagagacttgttgccatgaatatgcccctcaattccgacggcacagtgatgtttaatgcaacattattcgcgttggtgagaaccgcgttaaaaatcaagactgaaggcaatttagaacaggccaatgaagagctgcgcgcagtcatcaagaagatctggaagaagacctcaatgaagttactggaccaggtggtaccccccgctggagatgatgaggtcacggtgggcaaattttatgccaccttcctgattcaggactacttcaggaagtttaagaagaggaaagaacagggacttgtgggaaagtaccctgccaagaataccacgattgctctgcaggcaggacttcgaaccctccacgacatcgggcctgaaatccggagagccatctcgtgtgatttgcaggacgatgagcctgaggaaactaaacgtgaggaagaagacgatgtgttcaaaaggaatggcgccctgctgggcaaccatgtgaaccacgtgaattcagatcggagagactcgctgcagcaaacaaatacgacgcaccgtcccctgcacgtgcagcgtccttccatcccccccgcatccgatactgaaaaaccccttttccctccagcaggcaacagcgtgtgccacaaccaccacaaccacaattcaatcggcaagcaggtgcccaccagcaccaatgccaatttgaacaacgcaaatatgtccaaggccgcccacggaaaacggccctccatcgggaatttggaacacgtttcagagaatggtcatcattctagccacaagcacgatagagaaccacagcgcaggagcagcgttaaaaggtccgactcaggagatgagcagctgccaacaatctgtcgggaagacccagagattcacggctattttcgtgacccacattgcctaggagagcaggaatatttctccagcgaggaatgttacgaagatgacagtagccctacttggtctcgccagaactatggctactactcgcgttacccagggagaaatatcgatagtgaacggccgagggggtaccaccatcctcagggctttctcgaagatgacgattcaccggtctgttatgacagcaggaggtcgccacgacgcaggctgctgcctccaaccccagcctcccatcgaaggtcctcgtttaacttcgaatgcctgcgtcgccaaagctcacaggaggaagtgccttcgtccccaattttccctcaccgaaccgccttgccactgcacctcatgcagcagcagattatggccgtcgcaggcctggactcttccaaggctcagaaatattccccttcacattctacacgatcctgggcgaccccgcccgctacccccccatatcgggactggacaccctgttatacccccctaatacaggtggagcagagtgaggctcttgatcaagtaaatggaagtctcccgtctctccacagatcctcatggtacaccgatgaacctgatatctcatataggaccttcacaccagccagtttgactgtcccgtcctcttttcgaaataagaatagcgataaacagcggtctgccgactctttagtcgaagctgtactgatcagcgagggcttaggccggtacgcgagagaccccaaatttgtttcagccacaaaacacgagattgcggacgcctgtgatcttactatcgacgagatggagagcgccgcctccactctcctgaacggcaatgttcgccctcgcgctaatggggatgtgggccctttgagccatagacaagactatgagctgcaggattttggacccggctattcagacgaagagcctgatccaggtagggatgaggaagacctggctgatgaaatgatttgcatcacaaccttgtag

SEQ ID NO: 46496 - DNA, 1620 bp, Artificial Sequence
  derived and/or modified sequence
atgggcgagacctggctgtgccccgccgccctgggcctgctgtacaaggcaatcgattcgaatggagagaacattgggcccatttacaatcaccgcgtcgagatttcaatattcttcattatttatatcattattgttgcattcttcatgatgaatatatttgtgggctttgtcatagtgacttttcaggagcagggagagaaggagtataaaaactgcgagttggataagaaccagcgtcagtgtgttgagtatgcactcaaggccaggccactcagaaggtacattccaaagaacccttatcagtacaagttctggtacgtggtcaattcctcccccttcgagtatatgatgttcgtgctgataatgcttaatacactgtgccttgctatgcagcactacgagcagtcaaagatgttcaatgacgctatggacattctaaatatggttttcacgggagtgttcacagtggaaatggtgttgaaggtaattgccttcaagcccaaaggctacttttccgatgcctggaacacctttgacagcctgatcgtgatcgggagcattatcgatgtggcactgagcgaagcggacaattccgaagaatccaatagaatatcaattacattctttcgcctgttccgtgtgatgcggttggtgaaactgttgagtcgcggagagggaataaggaccttgctttggaccttcatcaagtccttccaagctttgccttacgtggccctgctgatagcgatgttgttctttatctacgccgtcattggcatgcagatgttcggaaaggtcgccatgcgagacaataaccaaatcaatcgcaacaacaacttccagactttccctcaagccgtcctcttgctattccgctgcgccactggagaggcgtggcaagagatcatgctagcctgcctccccgggaagctgtgcgaccctgagagcgattataacccgggtgaggaatatacttgcggatccaactttgccatcgtttactttatctcattctatatgctttgtgcattcctgataatcaatctcttcgtggcggtcattatggacaatttcgattacctaactcgggactggtccattctgggaccccaccatcttgatgaattcaaaagaatctggagtgagtatgacccagaagccaagggcaggatcaagcacttagacgtggtgacacttctgcggaggattcaaccgcccctgggcttcggaaaactttgtccgcatagggttgcctgcaaacgccttgtggccatgaatatgcctctaaattctgacgggaccgttatgttcaacgctaccctgttcgcccttgtgcgaactgctttaaaaatcaagaccgagggtaacctggaacaagccaatgaagaactgcgagcggtcatcaagaagatatggaagaagactagtatgaagctgctagaccaagtggtgcccccagccggtgacgacgaggtgacggttgggaaattctacgcaacatttctcatccaggactatttcagaaagttcaagaagagaaaggaacagggccttgtcggtaagtatccagccaagaacaccacaatagcattgcagatgctagaacgtatgttatag

SEQ ID NO: 46497 - DNA, 6413 bp, Artificial Sequence
  derived and/or modified sequence
atgatgatgatgatgatgatgaaaaaaatgcagcatcagcggcaacagcaggccgaccacgccaatgaggcaaactacgctagaggaacccgattgcccttgtccggggagggccctaccagtcaacccaattccagcaagcagactgtgctgtcttggcaagcagcaattgatgctgctaggcaggccaaagccgctcaaactatgagtaccagcgcaccaccacccgtgggcagcctctcgcaacgcaagaggcagcagtacgcgaaaagtaaaaaacaggggaactccagtaattccaggcccgcacgtgccctattttgcttaagccttaataatcccatccgaagggcctgtattagcatagtggagtggaaaccttttgacatcttcatcttgcttgcaatattcgcaaattgtgtcgctctcgcaatctatataccattccccgaggatgactcaaactctaccaatcataacctcgagaaggttgagtacgcattcctaattatcttcaccgttgagacatttctgaagataattgcatatggactgttgctccaccccaacgcttacgtgcgcaacgggtggaacctcctggactttgtcattgtcatcgtgggccttttttcggtaatattggaacagcttacaaaagagacggaagggggaaaccattcgtcgggcaaaagcggcggatttgatgtcaaggcgctgcgcgcttttagagtgctgcgacccttacgattagtgagtggtgtaccatccctgcaggtggtcctgaactccatcattaaggctatggtccccctccttcacattgccctcctggtgctctttgtgatcattatctatgctattatcggcctcgagctattcataggaaaaatgcataagacgtgcttctttgccgactcagatatcgtggcggaggaggacccagccccatgcgcctttagcggaaacggcagacagtgcactgcaaatgggacggaatgcaggtcgggctgggttggccctaatgggggtatcaccaacttcgataacttcgcatttgccatgctcactgtcttccagtgtatcaccatggaaggttggaccgatgttctgtattggatgaatgacgccatggggtttgagctgccgtgggtgtatttcgtcagcctggtgatatttggctccttttttgtgctcaacctggtcctgggggtgctgtcaggggagttcagcaaagaacgagagaaggcgaaagccaggggagattttcaaaaactgcgggagaagcagcagctggaagaggatctgaagggctatctagactggataacccaggccgaagatattgacccagagaacgaagaagagggaggagaagaaggaaagcggaatacaagtatgccaacgagtgaaacggagtccgtcaacactgagaatgtgagcggagagggagaaaatagaggttgttgcgggagcttgtgccaggccatctccaagtccaagctgagcaggaggtggagaagatggaacaggtttaaccgcagacgctgccgggctgccgttaagtcggtgacattttactggttagttattgtcctcgtgtttctcaacactcttaccatctcatctgaacactacaaccaaccagattggctaactcagattcaggacattgctaataaggtcctcctggcactgttcacttgtgagatgttggtgaagatgtacagtttggggctgcaggcctattttgtctccttgtttaatagatttgactgttttgtggtctgtggcggaatcactgaaaccatactcgttgaactggagataatgagccccttgggcatatccgtatttcggtgtgtgcggcttctacgcatcttcaaagtgacaaggcattggaccagcctgagtaaccttgtggcttcacttttaaactctatgaagtctatcgcttcactgctgctgttactgttccttttcatcataattttctccctactgggtatgcaactgtttggcggaaagtttaattttgatgagactcaaaccaagcgcagcacatttgataatttcccacaggctttgctgacagtgtttcagatcctaactggagaggattggaacgctgtcatgtacgatggcataatggcttacgggggtccttctagctccggcatgatcgtctgcatatatttcattatcctgttcatctgtgggaactatatcctgttgaacgtctttctggctatagccgtagacaacttggccgatgctgagagcctcaatactgcccagaaggaggaagctgaggagaaggagagaaaaaagattgctcgtaaggagtccttggaaaacaagaaaaacaataaacctgaagtgaaccagattgcgaactcagataacaaggtgacaattgacgattatagggaagaggacgaagacaaagatccctatcccccttgcgacgttccagttggagaggaggaagaggaggaagaggaggatgagcctgaggttcccgctgggcctaggccccgaaggatcagcgaacttaacatgaaagagaagattgcaccaatcccagaaggatcagctttttttattttaagcaagacaaacccaatcagggtgggatgtcacaagctgatcaatcaccatatctttaccaaccttattctagtatttatcatgctctcatcagctgccctcgcagcggaggaccctatccgatctcattccttcagaaatactatcttgggttattttgactacgctttcactgctatatttactgttgagatactactgaaaatgactacattcggcgctttcctgcacaagggtgccttctgcaggaactattttaacttgcttgacatgttagttgtgggtgtaagtcttgtgagtttcggtatccagagcagtgcaatctcggtggtcaaaatcctccgcgtcctgagagtcctccgtcccctgcgcgctatcaatcgggctaaaggtctgaaacacgtggtccaatgcgtattcgtggccattcgcacaatcggtaacatcatgattgtcacaaccctcctacagtttatgtttgcctgcatcggggttcaattgttcaagggtaagttttaccgctgcactgatgaggctaaatctaaccctgaggagtgccgaggcttgtttatcttatacaaggatggcgacgtcgactccccagtggtccgcgagagaatttggcagaactcggattttaacttcgacaacgtattaagcgcaatgatggcattattcacagttagcactttcgagggatggcccgcactgttatataaggcgattgacagcaatggagaaaatatcggtcccatttacaaccatagggtagaaattagcattttttttataatctacatcatcattgtcgcatttttcatgatgaatatcttcgttgggttcgtgatcgtgacgtttcaggagcagggcgagaaggaatacaaaaattgtgaactcgacaaaaaccagcggcagtgtgttgaatacgcgctgaaggcaagaccactccgtcgttacatccccaaaaatccttaccagtacaaattctggtacgtagttaactcatctcctttcgagtatatgatgtttgtcctgatcatgctgaacaccctgtgcctggcgatgcagcactatgagcagagcaaaatgtttaatgatgctatggacatcttgaatatggtgtttacgggtgtctttactgtcgagatggtgctcaaagtgattgcttttaaacctaaaggatacttctccgatgcctggaatacgtttgatagcctgatagtgatcgggtctatcatagacgtcgccctgtctgaggcagacaatagtgaagagagtaaccgaatttccattacgtttttcaggctgttcagggtgatgaggctggtgaaactactctcaaggggggagggcattcggacattgttgtggacctttattaagagcttccaagcgctgccctacgtagctttgttgattgccatgctcttctttatctacgcagtgattggtatgcagatgtttggcaaagttgctatgcgcgacaacaaccagatcaaccgcaacaataacttccagacgttccctcaggccgtacttctgctgtttcggtgcgctaccggggaagcatggcaggagattatgctggcatgtctgcccggaaaactctgcgatcccgaatcagattacaatccaggggaggagtatacctgtggctcaaactttgccattgtctacttcataagtttttacatgttatgcgcctttctgattatcaatctgttcgtggccgtcatcatggataacttcgattatctgacccgggactggagcattctgggtccccaccacctggacgagtttaagcggatttggagcgaatatgatccagaagcaaagggtcgcatcaaacacttagacgtggtcacattactgcgaagaattcaacctcccctgggttttggcaagctgtgcccccatcgcgtagcctgcaaacgcctcgtagccatgaatatgccactgaacagcgatggaaccgtcatgtttaatgctacgctctttgctcttgtgagaacggccctgaagataaagacagaaggtaacttagagcaggctaatgaggagctgcgggctgttattaagaagatttggaagaagacaagtatgaagctcctcgatcaggtggtaccaccagcaggggacgacgaggttaccgtgggaaaattctatgcaacttttctcatccaagactatttccgcaaattcaagaaaaggaaagagcaaggactcgtggggaagtaccctgccaaaaataccaccatagccttgcaggctggactcagaacactccacgatatcggccctgaaataagacgggcaatttcctgtgatctccaggacgatgaacccgaggagaccaagagggaagaagaagacgatgtcttcaagcgtaacggggctttgctcggcaatcatgtgaatcatgttaattcagacagacgggacagtctgcagcagacaaacacaacacacagacctcttcatgtgcagaggccctctatcccgcctgccagcgataccgagaaacccctgttcccaccagccggaaactccgtgtgccataatcaccacaaccataactccatcggtaagcaggtgccgacatctaccaatgcaaatctcaacaatgcaaatatgtcaaaggcagcccatggaaagcgccctagcatcggtaatctagaacacgtgtctgagaacggccatcacagcagtcataagcacgacagggagccccagaggaggagttctgtcaaacggtcagattctggcgacgagcaactgccgacaatctgccgcgaagacccagagattcacgggtacttcagggacccacactgcctgggtgaacaggagtacttctcttccgaagaatgctatgaggacgacagctctccaacatggagtcgccaaaactatggctattacagccgatatccaggcaggaatatcgattcagagcggcctagaggctatcatcacccccaggggttcctcgaagacgatgacagtccagtgtgctatgacagccgtcggtcacccagacggagactgttacccccaacccctgcttcccaccgcagatcgtcgtttaacttcgagtgtctgcgcaggcagtcttctcaggaggaagttccatcttcccccatatttccacatcgaacagcacttcctctacacttgatgcagcagcagatcatggcagtcgcgggactggactcttcaaaggctcagaaatattccccctctcattcaacacgttcctgggccacgccacctgcaacaccaccctaccgagactggaccccatgctacactccactgatccaggtggagcagagcgaggcacttgatcaggtaaatgggtctctgccaagtctgcaccggagcagctggtataccgatgaacccgatatctcatatagaacctttaccccggctagcctcacggtgccctccagctttcgtaataagaatagtgataagcagcggagcgctgacagcctcgtcgaagcagttctcatttccgagggcctggggaggtacgcccgtgaccctaagtttgtgagcgcaactaagcacgagatcgcggacgcatgcgacctgacgatcgatgagatggaatcagcagccagcaccttactgaatggcaatgttcggcctcgggctaacggggacgttgggcctctatcccaccgacaggattacgaactccaggattttggacccggatactcagacgaagaacctgaccctgggagagatgaagaggatcttgctgacgagatgatttgtatcactaccctata

SEQ ID NO: 46498 - DNA, 1620 bp, Artificial Sequence
  derived and/or modified sequence
atgggggaaacctggttgtgtccggcagctctgggactgctctataaagcaattgattcaaacggagagaatattggccctatttacaatcacagagtggagataagcatcttttttatcatttacataatcatagtggcgttcttcatgatgaacatctttgtgggctttgtcatcgtgacgttccaagagcagggtgaaaaagagtacaaaaattgcgagctcgacaagaaccagcgacagtgtgtcgagtatgcacttaaggccaggccgctcaggcgttacattcccaagaacccatatcagtacaaattctggtatgtggtaaattcatccccatttgaatacatgatgtttgtcctcattatgctgaacactttgtgcctcgctatgcagcactacgagcagtctaagatgttcaacgatgcaatggacattttaaatatggtttttaccggtgtgtttactgttgagatggtgttgaaggtcatagcctttaaacctaaggggtacttctccgacgcctggaataccttcgactcactgattgttataggctccattatcgatgtcgccctgagtgaagcagacaactccgaagagagcaacagaatctcaataacctttttccggctctttcgcgttatgaggttggtgaagctgttgtccagaggcgagggcattcgtaccctgctctggacattcataaagagctttcaagccctgccatatgtggccttacttatagctatgttattcttcatttacgctgtgataggcatgcaaatgtttgggaaagtggccatgagggacaacaatcagataaaccggaacaacaactttcagaccttcccccaggcagtgttactgctttttagatgcgcaaccggcgaggcctggcaggagatcatgttggcgtgtctcccgggaaaactgtgtgacccggagtcggactataatccaggggaggagtacacgtgtgggtcaaattttgcaatcgtatacttcatatcattctatatgctgtgcgctttcctgattataaacctgtttgtagccgttatcatggacaactttgattaccttacccgtgattggagtattctgggccctcatcacctcgacgaattcaagcggatttggagtgagtacgatcccgaagcgaagggacggattaaacacctcgatgtagtcacactgctcaggcgcatccagccgccattgggctttggcaaattatgcccgcatagggtcgcttgtaagagactggtggcgatgaatatgcctctgaattccgatggaaccgtaatgtttaatgctaccctgttcgcgttagtaaggactgctctaaagatcaaaacagagggtaatctggagcaggccaatgaagaactgcgcgcagtgatcaaaaaaatctggaaaaagacatccatgaagttgctcgaccaagtggtcccaccagccggtgacgacgaggtgacagtggggaagttttatgctacctttctcatacaggattattttcggaaattcaagaaacggaaggagcaaggcctggttggaaagtacccagctaagaatacaactattgcattgcagatgctggagcggatgttgtag

SEQ ID NO: 46499 - DNA, 6414 bp, Artificial Sequence
  derived and/or modified sequence
atgatgatgatgatgatgatgaaaaaaatgcagcatcaacggcagcagcaagcggaccacgcgaacgaggcaaactatgcaagaggcaccagacttcctctttctggtgaaggaccaacttctcagccgaatagctccaagcaaactgtcctgtcttggcaagctgcaatcgatgctgctagacaggccaaggctgcccaaactatgagcacctctgcacccccacctgtaggatctctctcccaaagaaaacgtcagcaatacgccaagagcaaaaaacagggtaactcgtccaacagccgacctgcccgcgcccttttctgtttatcactcaataaccccatccgaagagcctgcattagtatagtggaatggaaaccatttgacatatttatattattggctatttttgccaattgtgtggccttagctatttacatcccattccctgaagatgattctaattcaacaaatcataacttggaaaaagtagaatatgccttcctgattatttttacagtcgagacatttttgaagattatagcgtatggattattgctacatcctaatgcttatgttaggaatggatggaatttactggattttgttatagtaatagtaggattgtttagtgtaattttggaacaattaaccaaagaaacagaaggcgggaaccactcaagcggcaaatctggaggctttgatgtcaaagccctccgtgcctttcgagtgttgcgaccacttcgactagtgtcaggagtgcccagtttacaagttgtcctgaactccattataaaagccatggttcccctccttcacatagcccttttggtattatttgtaatcataatctatgctattataggattggaactttttattggaaaaatgcacaaaacatgtttttttgctgactcagatatcgtagctgaagaggacccagctccatgtgcgttctcagggaatggacgccagtgtactgccaatggcacggaatgtaggagtggctgggttggcccgaacggaggcatcaccaactttgataactttgcctttgccatgcttactgtgtttcagtgcatcaccatggagggctggacagatgtgctctactggatgaatgatgctatgggatttgaattgccctgggtgtattttgtcagtctcgtcatctttgggtcatttttcgtactaaatcttgtacttggtgtattgagcggagaattctcaaaggaaagagagaaggcaaaagcacggggagatttccagaagctccgggagaagcagcagctggaggaggatctaaagggctacttggattggatcacccaagctgaggacatcgatccggagaatgaggaagaaggaggagaggaaggcaaacgaaatactagcatgcccaccagcgagactgagtctgtgaacacagagaacgtcagcggtgaaggcgagaaccgaggctgctgtggaagtctctgtcaagccatctcaaaatccaaactcagccgacgctggcgtcgctggaaccgattcaatcgcagaagatgtagggccgccgtgaagtctgtcacgttttactggctggttatcgtcctggtgtttctgaacaccttaaccatttcctctgagcactacaatcagccagattggttgacacagattcaagatattgccaacaaagtcctcttggctctgttcacctgcgagatgctggtaaaaatgtacagcttgggcctccaagcatatttcgtctctcttttcaaccggtttgattgcttcgtggtgtgtggtggaatcactgagacgatcttggtggaactggaaatcatgtctcccctggggatctctgtgtttcggtgtgtgcgcctcttaagaatcttcaaagtgaccaggcactggacttccctgagcaacttagtggcatccttattaaactccatgaagtccatcgcttcgctgttgcttctgctttttctcttcattatcatcttttccttgcttgggatgcagctgtttggcggcaagtttaattttgatgaaacgcaaaccaagcggagcacctttgacaatttccctcaagcacttctcacagtgttccagatcctgacaggcgaagactggaatgctgtgatgtacgatggcatcatggcttacgggggcccatcctcttcaggaatgatcgtctgcatctacttcatcatcctcttcatttgtggtaactatattctactgaatgtcttcttggccatcgctgtagacaatttggctgatgctgaaagtctgaacactgctcagaaagaagaagcggaagaaaaggagaggaaaaagattgccagaaaagagagcctagaaaataaaaagaacaacaaaccagaagtcaaccagatagccaacagtgacaacaaggttacaattgatgactatagagaagaggatgaagacaaggacccctatccgccttgcgatgtgccagtaggggaagaggaagaggaagaggaggaggatgaacctgaggttcctgccggaccccgtcctcgaaggatctcggagttgaacatgaaggaaaaaattgcccccatccctgaagggagcgctttcttcattcttagcaagaccaacccgatccgcgtaggctgccacaagctcatcaaccaccacatcttcaccaacctcatccttgtcttcatcatgctgagcagcgctgccctggccgcagaggaccccatccgcagccactccttccggaacacgatactgggttactttgactatgccttcacagccatctttactgttgagatcctgttgaagatgacaacttttggagctttcctccacaaaggggccttctgcaggaactacttcaatttgctggatatgctggtggttggggtgtctctggtgtcatttgggattcaatccagtgccatctccgttgtgaagattctgagggtcttaagggtcctgcgtcccctcagggccatcaacagagcaaaaggacttaagcacgtggtccagtgcgtcttcgtggccatccggaccatcggcaacatcatgatcgtcaccaccctcctgcagttcatgtttgcctgtatcggggtccagttgttcaaggggaagttctatcgctgtacggatgaagccaaaagtaaccctgaagaatgcaggggacttttcatcctctacaaggatggggatgttgacagtcctgtggtccgtgaacggatctggcaaaacagtgatttcaacttcgacaacgtcctctctgctatgatggcgctcttcacagtctccacgtttgagggctggcctgcgttgctgtataaagccatcgactcgaatggagagaacatcggcccaatctacaaccaccgcgtggagatctccatcttcttcatcatctacatcatcattgtagctttcttcatgatgaacatctttgtgggctttgtcatcgttacatttcaggaacaaggagaaaaagagtataagaactgtgagctggacaaaaatcagcgtcagtgtgttgaatacgccttgaaagcacgtcccttgcggagatacatccccaaaaacccctaccagtacaagttctggtacgtggtgaactcttcgcctttcgaatacatgatgtttgtcctcatcatgctcaacacactctgcttggccatgcagcactacgagcagtccaagatgttcaatgatgccatggacattctgaacatggtcttcaccggggtgttcaccgtcgagatggttttgaaagtcatcgcatttaagcctaaggggtattttagtgacgcctggaacacgtttgactccctcatcgtaatcggcagcattatagacgtggccctcagcgaagcagacaactctgaagagagcaatagaatctccatcacctttttccgtcttttccgagtgatgcgattggtgaagcttctcagcaggggggaaggcatccggacattgctgtggacttttattaagtcctttcaggcgctcccgtatgtggccctcctcatagccatgctgttcttcatctatgcggtcattggcatgcagatgtttgggaaagttgccatgagagataacaaccagatcaataggaacaataacttccagacgtttccccaggcggtgctgctgctcttcaggtgtgcaacaggtgaggcctggcaggagatcatgctggcctgtctcccagggaagctctgtgaccctgagtcagattacaaccccggggaggagtatacatgtgggagcaactttgccattgtctatttcatcagtttttacatgctctgtgcatttctgatcatcaatctgtttgtggctgtcatcatggataatttcgactatctgacccgggactggtctattttggggcctcaccatttagatgaattcaaaagaatatggtcagaatatgaccctgaggcaaagggaaggataaaacaccttgatgtggtcactctgcttcgacgcatccagcctcccctggggtttgggaagttatgtccacacagggtagcgtgcaagagattagttgccatgaacatgcctctcaacagtgacgggacagtcatgtttaatgcaaccctgtttgctttggttcgaacggctcttaagatcaagaccgaagggaacctggagcaagctaatgaagaacttcgggctgtgataaagaaaatttggaagaaaaccagcatgaaattacttgaccaagttgtccctccagctggtgatgatgaggtaaccgtggggaagttctatgccactttcctgatacaggactactttaggaaattcaagaaacggaaagaacaaggactggtgggaaagtaccctgcgaagaacaccacaattgccctacaggcgggattaaggacactgcatgacattgggccagaaatccggcgtgctatatcgtgtgatttgcaagatgacgagcctgaggaaacaaaacgagaagaagaagatgatgtgttcaaaagaaatggtgccctgcttggaaaccatgtcaatcatgttaatagtgataggagagattcccttcagcagaccaataccacccaccgtcccctgcatgtccaaaggccttcaattccacctgcaagtgatactgagaaaccgctgtttcctccagcaggaaattcggtgtgtcataaccatcataaccataattccataggaaagcaagttcccacctcaacaaatgccaatctcaataatgccaatatgtccaaagctgcccatggaaagcggcccagcattgggaaccttgagcatgtgtctgaaaatgggcatcattcttcccacaagcatgaccgggagcctcagagaaggtccagtgtgaaaaggtccgactcaggagatgaacagctcccaactatttgccgggaagacccagagatacatggctatttcagggacccccactgcttgggggagcaggagtatttcagtagtgaggaatgctacgaggatgacagctcgcccacctggagcaggcaaaactatggctactacagcagatacccaggcagaaacatcgactctgagaggccccgaggctaccatcatccccaaggattcttggaggacgatgactcgcccgtttgctatgattcacggagatctccaaggagacgcctactacctcccaccccagcatcccaccggagatcctccttcaactttgagtgcctgcgccggcagagcagccaggaagaggtcccgtcgtctcccatcttcccccatcgcacggccctgcctctgcatctaatgcagcaacagatcatggcagttgccggcctagattcaagtaaagcccagaagtactcaccgagtcactcgacccggtcgtgggccacccctccagcaacccctccctaccgggactggacaccgtgctacacccccctgatccaagtggagcagtcagaggccctggaccaggtgaacggcagcctgccgtccctgcaccgcagctcctggtacacagacgagcccgacatctcctaccggactttcacaccagccagcctgactgtccccagcagcttccggaacaaaaacagcgacaagcagaggagtgcggacagcttggtggaggcagtcctgatatccgaaggcttgggacgctatgcaagggacccaaaatttgtgtcagcaacaaaacacgaaatcgctgatgcctgtgacctcaccatcgacgagatggagagtgcagccagcaccctgcttaatgggaacgtgcgtccccgagccaacggggatgtgggccccctctcacaccggcaggactatgagctacaggactttggtcctggctacagcgacgaagagccagaccctgggagggatgaggaggacctggcggatgaaatgatatgcatcaccaccttgtag

SEQ ID NO: 46500 - DNA, 1830 bp, Artificial Sequence
  derived and/or modified sequence
ctcttagtgctggctgtttgggcctgaggctgatgggagagacctggttgtgtccagcagccttggggttgctgtataaagccatcgactcgaatggagagaacatcggcccaatctacaaccaccgcgtggagatctccatcttcttcatcatctacatcatcattgtagctttcttcatgatgaacatctttgtgggctttgtcatcgttacatttcaggaacaaggagaaaaagagtataagaactgtgagctggacaaaaatcagcgtcagtgtgttgaatacgccttgaaagcacgtcccttgcggagatacatccccaaaaacccctaccagtacaagttctggtacgtggtgaactcttcgcctttcgaatacatgatgtttgtcctcatcatgctcaacacactctgcttggccatgcagcactacgagcagtccaagatgttcaatgatgccatggacattctgaacatggtcttcaccggggtgttcaccgtcgagatggttttgaaagtcatcgcatttaagcctaaggggtattttagtgacgcctggaacacgtttgactccctcatcgtaatcggcagcattatagacgtggccctcagcgaagcagacaactctgaagagagcaatagaatctccatcacctttttccgtcttttccgagtgatgcgattggtgaagcttctcagcaggggggaaggcatccggacattgctgtggacttttattaagtcctttcaggcgctcccgtatgtggccctcctcatagccatgctgttcttcatctatgcggtcattggcatgcagatgtttgggaaagttgccatgagagataacaaccagatcaataggaacaataacttccagacgtttccccaggcggtgctgctgctcttcaggtgtgcaacaggtgaggcctggcaggagatcatgctggcctgtctcccagggaagctctgtgaccctgagtcagattacaaccccggggaggagtatacatgtgggagcaactttgccattgtctatttcatcagtttttacatgctctgtgcatttctgatcatcaatctgtttgtggctgtcatcatggataatttcgactatctgacccgggactggtctattttggggcctcaccatttagatgaattcaaaagaatatggtcagaatatgaccctgaggcaaagggaaggataaaacaccttgatgtggtcactctgcttcgacgcatccagcctcccctggggtttgggaagttatgtccacacagggtagcgtgcaagagattagttgccatgaacatgcctctcaacagtgacgggacagtcatgtttaatgcaaccctgtttgctttggttcgaacggctcttaagatcaagaccgaagggaacctggagcaagctaatgaagaacttcgggctgtgataaagaaaatttggaagaaaaccagcatgaaattacttgaccaagttgtccctccagctggtgatgatgaggtaaccgtggggaagttctatgccactttcctgatacaggactactttaggaaattcaagaaacggaaagaacaaggactggtgggaaagtaccctgcgaagaacaccacaattgccctacagatgcttgaacggatgctttagaattttctgcctgagctacggcaccaagctggttagtcggaaggcgtttgtggctaaggccttgaaagggaaaagtctcaagtgggcttatttctactgaaacagcatttcagaagaaatgcaggaaaaagcagacccaaggccccagggagaccccttccaagcaaagcactcctcc

SEQ ID NO: 46501 - DNA, 6414 bp, Artificial Sequence
  derived and/or modified sequence
atgatgatgatgatgatgatgaagaagatgcagcaccagagacagcagcaggccgaccacgccaacgaggccaactacgccagaggcaccagactgcccctgagcggcgagggccccaccagccagcccaacagcagcaagcagaccgtgctgagctggcaggccgccatcgacgccgccagacaggccaaggccgcccagaccatgagcaccagcgcccccccccccgtgggcagcctgagccagagaaagagacagcagtacgccaagagcaagaagcagggcaacagcagcaacagcagacccgccagagccctgttctgcctgagcctgaacaaccccatcagaagagcctgcatcagcatcgtggagtggaagcccttcgacatcttcatcctgctggccatcttcgccaactgcgtggccctggccatctacatccccttccccgaggacgacagcaacagcaccaaccacaacctggagaaggtggagtacgccttcctgatcatcttcaccgtggagaccttcctgaagatcatcgcctacggcctgctgctgcaccccaacgcctacgtgagaaacggctggaacctgctggacttcgtgatcgtgatcgtgggcctgttcagcgtgatcctggagcagctgaccaaggagaccgagggcggcaaccacagcagcggcaagagcggcggcttcgacgtgaaggccctgagagccttcagagtgctgagacccctgagactggtgagcggcgtgcccagcctgcaggtggtgctgaacagcatcatcaaggccatggtgcccctgctgcacatcgccctgctggtgctgttcgtgatcatcatctacgccatcatcggcctggagctgttcatcggcaagatgcacaagacctgcttcttcgccgacagcgacatcgtggccgaggaggaccccgccccctgcgccttcagcggcaacggcagacagtgcaccgccaacggcaccgagtgcagaagcggctgggtgggccccaacggcggcatcaccaacttcgacaacttcgccttcgccatgctgaccgtgttccagtgcatcaccatggagggctggaccgacgtgctgtactggatgaacgacgccatgggcttcgagctgccctgggtgtacttcgtgagcctggtgatcttcggcagcttcttcgtgctgaacctggtgctgggcgtgctgagcggcgagttcagcaaggagagagagaaggccaaggccagaggcgacttccagaagctgagagagaagcagcagctggaggaggacctgaagggctacctggactggatcacccaggccgaggacatcgaccccgagaacgaggaggagggcggcgaggagggcaagagaaacaccagcatgcccaccagcgagaccgagagcgtgaacaccgagaacgtgagcggcgagggcgagaacagaggctgctgcggcagcctgtgccaggccatcagcaagagcaagctgagcagaagatggagaagatggaacagattcaacagaagaagatgcagagccgccgtgaagagcgtgaccttctactggctggtgatcgtgctggtgttcctgaacaccctgaccatcagcagcgagcactacaaccagcccgactggctgacccagatccaggacatcgccaacaaggtgctgctggccctgttcacctgcgagatgctggtgaagatgtacagcctgggcctgcaggcctacttcgtgagcctgttcaacagattcgactgcttcgtggtgtgcggcggcatcaccgagaccatcctggtggagctggagatcatgagccccctgggcatcagcgtgttcagatgcgtgagactgctgagaatcttcaaggtgaccagacactggaccagcctgagcaacctggtggccagcctgctgaacagcatgaagagcatcgccagcctgctgctgctgctgttcctgttcatcatcatcttcagcctgctgggcatgcagctgttcggcggcaagttcaacttcgacgagacccagaccaagagaagcaccttcgacaacttcccccaggccctgctgaccgtgttccagatcctgaccggcgaggactggaacgccgtgatgtacgacggcatcatggcctacggcggccccagcagcagcggcatgatcgtgtgcatctacttcatcatcctgttcatctgcggcaactacatcctgctgaacgtgttcctggccatcgccgtggacaacctggccgacgccgagagcctgaacaccgcccagaaggaggaggccgaggagaaggagagaaagaagatcgccagaaaggagagcctggagaacaagaagaacaacaagcccgaggtgaaccagatcgccaacagcgacaacaaggtgaccatcgacgactacagagaggaggacgaggacaaggacccctaccccccctgcgacgtgcccgtgggcgaggaggaggaggaggaggaggaggacgagcccgaggtgcccgccggccccagacccagaagaatcagcgagctgaacatgaaggagaagatcgcccccatccccgagggcagcgccttcttcatcctgagcaagaccaaccccatcagagtgggctgccacaagctgatcaaccaccacatcttcaccaacctgatcctggtgttcatcatgctgagcagcgccgccctggccgccgaggaccccatcagaagccacagcttcagaaacaccatcctgggctacttcgactacgccttcaccgccatcttcaccgtggagatcctgctgaagatgaccaccttcggcgccttcctgcacaagggcgccttctgcagaaactacttcaacctgctggacatgctggtggtgggcgtgagcctggtgagcttcggcatccagagcagcgccatcagcgtggtgaagatcctgagagtgctgagagtgctgagacccctgagagccatcaacagagccaagggcctgaagcacgtggtgcagtgcgtgttcgtggccatcagaaccatcggcaacatcatgatcgtgaccaccctgctgcagttcatgttcgcctgcatcggcgtgcagctgttcaagggcaagttctacagatgcaccgacgaggccaagagcaaccccgaggagtgcagaggcctgttcatcctgtacaaggacggcgacgtggacagccccgtggtgagagagagaatctggcagaacagcgacttcaacttcgacaacgtgctgagcgccatgatggccctgttcaccgtgagcaccttcgagggctggcccgccctgctgtacaaggccatcgacagcaacggcgagaacatcggccccatctacaaccacagagtggagatcagcatcttcttcatcatctacatcatcatcgtggccttcttcatgatgaacatcttcgtgggcttcgtgatcgtgaccttccaggagcagggcgagaaggagtacaagaactgcgagctggacaagaaccagagacagtgcgtggagtacgccctgaaggccagacccctgagaagatacatccccaagaacccctaccagtacaagttctggtacgtggtgaacagcagccccttcgagtacatgatgttcgtgctgatcatgctgaacaccctgtgcctggccatgcagcactacgagcagagcaagatgttcaacgacgccatggacatcctgaacatggtgttcaccggcgtgttcaccgtggagatggtgctgaaggtgatcgccttcaagcccaagggctacttcagcgacgcctggaacaccttcgacagcctgatcgtgatcggcagcatcatcgacgtggccctgagcgaggccgacaacagcgaggagagcaacagaatcagcatcaccttcttcagactgttcagagtgatgagactggtgaagctgctgagcagaggcgagggcatcagaaccctgctgtggaccttcatcaagagcttccaggccctgccctacgtggccctgctgatcgccatgctgttcttcatctacgccgtgatcggcatgcagatgttcggcaaggtggccatgagagacaacaaccagatcaacagaaacaacaacttccagaccttcccccaggccgtgctgctgctgttcagatgcgccaccggcgaggcctggcaggagatcatgctggcctgcctgcccggcaagctgtgcgaccccgagagcgactacaaccccggcgaggagtacacctgcggcagcaacttcgccatcgtgtacttcatcagcttctacatgctgtgcgccttcctgatcatcaacctgttcgtggccgtgatcatggacaacttcgactacctgaccagagactggagcatcctgggcccccaccacctggacgagttcaagagaatctggagcgagtacgaccccgaggccaagggcagaatcaagcacctggacgtggtgaccctgctgagaagaatccagccccccctgggcttcggcaagctgtgcccccacagagtggcctgcaagagactggtggccatgaacatgcccctgaacagcgacggcaccgtgatgttcaacgccaccctgttcgccctggtgagaaccgccctgaagatcaagaccgagggcaacctggagcaggccaacgaggagctgagagccgtgatcaagaagatctggaagaagaccagcatgaagctgctggaccaggtggtgccccccgccggcgacgacgaggtgaccgtgggcaagttctacgccaccttcctgatccaggactacttcagaaagttcaagaagagaaaggagcagggcctggtgggcaagtaccccgccaagaacaccaccatcgccctgcaggccggcctgagaaccctgcacgacatcggccccgagatcagaagagccatcagctgcgacctgcaggacgacgagcccgaggagaccaagagagaggaggaggacgacgtgttcaagagaaacggcgccctgctgggcaaccacgtgaaccacgtgaacagcgacagaagagacagcctgcagcagaccaacaccacccacagacccctgcacgtgcagagacccagcatcccccccgccagcgacaccgagaagcccctgttcccccccgccggcaacagcgtgtgccacaaccaccacaaccacaacagcatcggcaagcaggtgcccaccagcaccaacgccaacctgaacaacgccaacatgagcaaggccgcccacggcaagagacccagcatcggcaacctggagcacgtgagcgagaacggccaccacagcagccacaagcacgacagagagccccagagaagaagcagcgtgaagagaagcgacagcggcgacgagcagctgcccaccatctgcagagaggaccccgagatccacggctacttcagagacccccactgcctgggcgagcaggagtacttcagcagcgaggagtgctacgaggacgacagcagccccacctggagcagacagaactacggctactacagcagataccccggcagaaacatcgacagcgagagacccagaggctaccaccacccccagggcttcctggaggacgacgacagccccgtgtgctacgacagcagaagaagccccagaagaagactgctgccccccacccccgccagccacagaagaagcagcttcaacttcgagtgcctgagaagacagagcagccaggaggaggtgcccagcagccccatcttcccccacagaaccgccctgcccctgcacctgatgcagcagcagatcatggccgtggccggcctggacagcagcaaggcccagaagtacagccccagccacagcaccagaagctgggccaccccccccgccacccccccctacagagactggaccccctgctacacccccctgatccaggtggagcagagcgaggccctggaccaggtgaacggcagcctgcccagcctgcacagaagcagctggtacaccgacgagcccgacatcagctacagaaccttcacccccgccagcctgaccgtgcccagcagcttcagaaacaagaacagcgacaagcagagaagcgccgacagcctggtggaggccgtgctgatcagcgagggcctgggcagatacgccagagaccccaagttcgtgagcgccaccaagcacgagatcgccgacgcctgcgacctgaccatcgacgagatggagagcgccgccagcaccctgctgaacggcaacgtgagacccagagccaacggcgacgtgggccccctgagccacagacaggactacgagctgcaggacttcggccccggctacagcgacgaggagcccgaccccggcagagacgaggaggacctggccgacgagatgatctgcatcaccaccctgtag

SEQ ID NO: 46502 - DNA, 1620 bp, Artificial Sequence
  derived and/or modified sequence
atgggcgagacctggctgtgccccgccgccctgggcctgctgtacaaggccatcgacagcaacggcgagaacatcggccccatctacaaccacagagtggagatcagcatcttcttcatcatctacatcatcatcgtggccttcttcatgatgaacatcttcgtgggcttcgtgatcgtgaccttccaggagcagggcgagaaggagtacaagaactgcgagctggacaagaaccagagacagtgcgtggagtacgccctgaaggccagacccctgagaagatacatccccaagaacccctaccagtacaagttctggtacgtggtgaacagcagccccttcgagtacatgatgttcgtgctgatcatgctgaacaccctgtgcctggccatgcagcactacgagcagagcaagatgttcaacgacgccatggacatcctgaacatggtgttcaccggcgtgttcaccgtggagatggtgctgaaggtgatcgccttcaagcccaagggctacttcagcgacgcctggaacaccttcgacagcctgatcgtgatcggcagcatcatcgacgtggccctgagcgaggccgacaacagcgaggagagcaacagaatcagcatcaccttcttcagactgttcagagtgatgagactggtgaagctgctgagcagaggcgagggcatcagaaccctgctgtggaccttcatcaagagcttccaggccctgccctacgtggccctgctgatcgccatgctgttcttcatctacgccgtgatcggcatgcagatgttcggcaaggtggccatgagagacaacaaccagatcaacagaaacaacaacttccagaccttcccccaggccgtgctgctgctgttcagatgcgccaccggcgaggcctggcaggagatcatgctggcctgcctgcccggcaagctgtgcgaccccgagagcgactacaaccccggcgaggagtacacctgcggcagcaacttcgccatcgtgtacttcatcagcttctacatgctgtgcgccttcctgatcatcaacctgttcgtggccgtgatcatggacaacttcgactacctgaccagagactggagcatcctgggcccccaccacctggacgagttcaagagaatctggagcgagtacgaccccgaggccaagggcagaatcaagcacctggacgtggtgaccctgctgagaagaatccagccccccctgggcttcggcaagctgtgcccccacagagtggcctgcaagagactggtggccatgaacatgcccctgaacagcgacggcaccgtgatgttcaacgccaccctgttcgccctggtgagaaccgccctgaagatcaagaccgagggcaacctggagcaggccaacgaggagctgagagccgtgatcaagaagatctggaagaagaccagcatgaagctgctggaccaggtggtgccccccgccggcgacgacgaggtgaccgtgggcaagttctacgccaccttcctgatccaggactacttcagaaagttcaagaagagaaaggagcagggcctggtgggcaagtaccccgccaagaacaccaccatcgccctgcagatgctggagagaatgctgtag

SEQ ID NO: 46503 - protein, 2161 aa, Artificial Sequence
  derived and/or modified sequence
MMMMMMMKKMQHQRQQQADHANEANYARGTRLPLSGEGPTSQPNSSKQTVLSWQAAIDAARQAKAAQTMSTSAPPPVGSLSQRKRQQYAKSKKQGNSSNSRPARALFCLSLNNPIRRACISIVEWKPFDIFILLAIFANCVALAIYIPFPEDDSNSTNHNLEKVEYAFLIIFTVETFLKIIAYGLLLHPNAYVRNGWNLLDFVIVIVGLFSVILEQLTKETEGGNHSSGKSGGFDVKALRAFRVLRPLRLVSGVPSLQVVLNSIIKAMVPLLHIALLVLFVIIIYAIIGLELFIGKMHKTCFFADSDIVAEEDPAPCAFSGNGRQCTANGTECRSGWVGPNGGITNFDNFAFAMLTVFQCITMEGWTDVLYWMNDAMGFELPWVYFVSLVIFGSFFVLNLVLGVLSGEFSKEREKAKARGDFQKLREKQQLEEDLKGYLDWITQAEDIDPENEEEGGEEGKRNTSMPTSETESVNTENVSGEGENRGCCGSLCQAISKSKLSRRWRRWNRFNRRRCRAAVKSVTFYWLVIVLVFLNTLTISSEHYNQPDWLTQIQDIANKVLLALFTCEMLVKMYSLGLQAYFVSLFNRFDCFVVCGGITETILVELEIMSPLGISVFRCVRLLRIFKVTRHWTSLSNLVASLLNSMKSIASLLLLLFLFIIIFSLLGMQLFGGKFNFDETQTKRSTFDNFPQALLTVFQILTGEDWNAVMYDGIMAYGGPSSSGMIVCIYFIILFICGNYILLNVFLAIAVDNLADAESLNTAQKEEAEEKERKKIARKESLENKKNNKPEVNQIANSDNKVTIDDYREEDEDKDPYPPCDVPVGEEEEEEEEDEPEVPAGPRPRRISELNMKEKIAPIPEGSAFFILSKTNPIRVGCHKLINHHIFTNLILVFIMLSSAALAAEDPIRSHSFRNTILGYFDYAFTAIFTVEILLKMTTFGAFLHKGAFCRNYFNLLDMLVVGVSLVSFGIQSSAISVVKILRVLRVLRPLRAINRAKGLKHVVQCVFVAIRTIGNIMIVTTLLQFMFACIGVQLFKGKFYRCTDEAKSNPEECRGLFILYKDGDVDSPVVRERIWQNSDFNFDNVLSAMMALFTVSTFEGWPALLYKAIDSNGENIGPIYNHRVEISIFFIIYIIIVAFFMMNIFVGFVIVTFQEQGEKEYKNCELDKNQRQCVEYALKARPLRRYIPKNPYQYKFWYVVNSSPFEYMMFVLIMLNTLCLAMQHYEQSKMFNDAMDILNMVFTGVFTVEMVLKVIAFKPKGYFSDAWNTFDSLIVIGSIIDVALSEADPTESENVPVPTATPGNSEESNRISITFFRLFRVMRLVKLLSRGEGIRTLLWTFIKSFQALPYVALLIAMLFFIYAVIGMQMFGKVAMRDNNQINRNNNFQTFPQAVLLLFRCATGEAWQEIMLACLPGKLCDPESDYNPGEEYTCGSNFAIVYFISFYMLCAFLIINLFVAVIMDNFDYLTRDWSILGPHHLDEFKRIWSEYDPEAKGRIKHLDVVTLLRRIQPPLGFGKLCPHRVACKRLVAMNMPLNSDGTVMFNATLFALVRTALKIKTEGNLEQANEELRAVIKKIWKKTSMKLLDQVVPPAGDDEVTVGKFYATFLIQDYFRKFKKRKEQGLVGKYPAKNTTIALQAGLRTLHDIGPEIRRAISCDLQDDEPEETKREEEDDVFKRNGALLGNHVNHVNSDRRDSLQQTNTTHRPLHVQRPSIPPASDTEKPLFPPAGNSVCHNHHNHNSIGKQVPTSTNANLNNANMSKAAHGKRPSIGNLEHVSENGHHSSHKHDREPQRRSSVKRTRYYETYIRSDSGDEQLPTICREDPEIHGYFRDPHCLGEQEYFSSEECYEDDSSPTWSRQNYGYYSRYPGRNIDSERPRGYHHPQGFLEDDDSPVCYDSRRSPRRRLLPPTPASHRRSSFNFECLRRQSSQEEVPSSPIFPHRTALPLHLMQQQIMAVAGLDSSKAQKYSPSHSTRSWATPPATPPYRDWTPCYTPLIQVEQSEALDQVNGSLPSLHRSSWYTDEPDISYRTFTPASLTVPSSFRNKNSDKQRSADSLVEAVLISEGLGRYARDPKFVSATKHEIADACDLTIDEMESAASTLLNGNVRPRANGDVGPLSHRQDYELQDFGPGYSDEEPDPGRDEEDLADEMICITTL

SEQ ID NO: 46504 - DNA, 6486 bp, Artificial Sequence
  derived and/or modified sequence
atgatgatgatgatgatgatgaagaaaatgcagcatcagcgccaacagcaggccgatcacgccaatgaagccaattacgctagaggcacacgccttcccctcagcggggaggggccaaccagccaacctaacagctccaagcagaccgtgctgagctggcaggcggccatagatgcagctagacaggctaaagccgcacagaccatgtcaacctccgctcctcctccggttgggagccttagccagcggaagagacagcagtacgccaaaagtaagaagcaaggaaattcttctaattccagacctgctcgagccttgttttgtctctcacttaacaatcctattaggcgggcttgcatctccattgtagaatggaagcccttcgacatcttcatcctcctcgccatctttgcgaattgcgtagccctcgccatttacataccgtttcctgaagatgattctaactccactaaccataatttggagaaggtggaatacgcattcttgatcatctttacagtcgaaaccttcctcaagatcattgcgtacggcttactgctgcacccgaacgcatacgtgcggaacggatggaatctcctggattttgtgatcgtgattgtgggcctcttctctgtgattttagagcaattgaccaaagagactgaaggaggcaaccatagcagcgggaaatcaggcgggttcgacgtaaaggcattgcgagccttcagagtgctgcggccactgaggctggtgtctggcgttccctctttacaggtggtcctgaactcaatcattaaggcaatggttcctctgctgcacattgcactgttagtgctgtttgtaattattatttatgccattatcggcctggaactcttcattggtaagatgcacaagacctgtttcttcgcagattcagatatagtagcagaagaagatccggccccctgtgccttctcaggtaacgggcggcagtgcaccgccaatgggaccgaatgccggagcggttgggtcgggcctaacggcggcatcactaactttgataactttgctttcgctatgctgaccgtgttccaatgtattacaatggagggctggacagatgtcctgtactggatgaacgatgccatgggatttgaacttccgtgggtgtatttcgtgagccttgtgatattcggatccttttttgtgctgaatctcgtgctgggggttcttagcggcgagttctctaaggagagggagaaggccaaggcccgaggagattttcaaaagctgcgggagaaacagcagctggaagaggaccttaagggatatcttgactggattacacaagccgaggatattgaccctgagaatgaggaggaaggcggtgaagaagggaagcgcaacacttcaatgccaacgtccgagaccgaatctgtgaacacagagaacgttagcggagagggggaaaaccggggctgttgtggttcactgtgtcaggctatatccaaatctaagctgtcccgacggtggaggcggtggaacaggttcaaccgaaggcgctgtcgggccgccgttaagtctgtcaccttctattggcttgtgatcgttctcgtgtttctgaacaccctgacaattagcagtgagcactacaatcagccagactggctgacacagattcaggatatcgcgaacaaggtattgctcgcccttttcacttgcgaaatgcttgttaagatgtactctctcgggctgcaagcttacttcgtcagtttgtttaatcggtttgactgcttcgtcgtgtgtggagggataactgaaactatacttgtcgagctggaaattatgagccccctggggatctcagttttccgctgcgtgcgcctgctgcgaatctttaaggtgaccaggcactggacatcacttagtaatctggtcgcttcattacttaattctatgaagagtatcgcaagcctcctgctgctgctgttcttgtttatcattattttctctttgctgggtatgcagctgttcggcgggaagttcaacttcgacgaaacgcagacaaagcgatcaacattcgataacttcccacaggcgttgctgacagtgttccagatcctcacaggcgaggattggaacgccgtaatgtacgacgggattatggcatatggagggccttccagtagcgggatgatagtctgtatttattttattatcctgttcatttgtggcaactatatcctcctcaatgtgtttctcgccatagccgtggataatctggctgacgctgagagccttaataccgcgcagaaggaggaagcagaggaaaaagagcgcaagaagattgcccgcaaggagagcctggagaataaaaaaaataataagcccgaagtgaatcagatcgccaattcagacaacaaggtgactatcgacgattaccgggaagaggacgaagacaaagatccgtaccctccgtgtgacgtgcccgtgggagaagaagaggaagaagaggaggaagacgagcctgaagtgcctgcgggcccgagacccagaagaatcagtgagctgaacatgaaagagaagattgcccccattcccgagggcagtgcctttttcatcctgagcaagactaaccccattagggtagggtgtcataagttaatcaaccatcacattttcacgaacctgattctcgtgtttatcatgctcagcagcgctgctctggctgccgaggaccctatccgctctcatagtttccggaacaccattttagggtactttgattacgcttttactgcaattttcactgtggagatcctgctaaagatgacgacttttggcgccttccttcacaagggggcgttttgccgtaattacttcaacttattggacatgctggtcgtgggcgtgagcctggtctccttcgggatacaatcgtctgcaatctcagtggtcaaaatactccgggtgctacgcgtgctgcgccctctacgggctatcaacagagcaaagggactcaagcacgtagtccagtgcgtcttcgtcgcaatccgaacaattggcaatattatgatagtaaccacgctccttcagttcatgttcgcgtgcatcggcgttcagctattcaagggaaaattctacaggtgcacggacgaggccaaaagcaatccagaggaatgccgtggactgtttattctgtacaaggacggcgacgttgatagtcctgttgtgagggagcgaatatggcagaattccgatttcaattttgataacgtcctctcagcaatgatggcactgttcactgtgagcactttcgagggatggcccgctctgctctataaagctatcgattcaaacggcgaaaacatcggcccgatctataaccatcgggtcgagattagtatattcttcattatttacatcattatagtcgcctttttcatgatgaatatatttgttgggtttgtaatcgttactttccaggagcagggagagaaggaatataagaactgtgaactcgataagaatcagcgccaatgcgttgagtacgcattaaaagcccggcccctccgccgttacatccccaaaaatccctatcagtacaagttctggtacgtcgttaactccagcccattcgagtatatgatgttcgtactgattatgctcaacactctttgtcttgcaatgcaacactatgaacagtcgaagatgttcaatgacgctatggatattctgaatatggtatttactggggtctttacagtggagatggttcttaaagtgatagcatttaaacccaaaggctacttcagcgacgcatggaatacctttgactcccttatagtgattggatccatcatcgatgtagccctgtctgaagctgaccccaccgagagcgaaaacgttcccgttccgaccgcgacgccgggaaattctgaggaaagcaatcggatcagtatcaccttcttccgcctctttagagtaatgcgcctggtcaaacttctttcaaggggggaaggcattcgcactctgttatggacctttataaaaagctttcaagcattgccatatgttgccctcctgatcgccatgctattttttatttacgcagtaatcggaatgcagatgtttgggaaggttgccatgagggacaacaatcagattaataggaataataattttcagacattcccgcaggctgtgctgctcctgtttagatgtgccactggcgaagcctggcaagaaatcatgctggcttgcctgccaggtaaactctgcgatcccgaatctgattacaacccaggcgaggagtacacatgcggctcgaactttgctattgtgtacttcattagcttttacatgctgtgtgctttcctaatcatcaacctcttcgtagctgtgatcatggacaatttcgactatctcaccagagattggtctattctggggccccaccacttggacgaatttaaacgtatctggtccgagtatgaccccgaggctaagggcaggataaagcacctggatgttgtgacgctgctgcggcgcatccagccaccgttaggattcggcaagctttgtccgcatagggtggcttgtaaaagacttgtcgcaatgaacatgccattaaactcagacggaacagtgatgtttaatgccacattgtttgccctggtgagaactgcgctcaagattaagaccgaaggcaatctggaacaagccaatgaagaactgagggctgtaatcaaaaagatctggaagaagactagcatgaaactgttggaccaggtggttccacctgccggagatgacgaagtcacagtggggaagttttatgccacttttttgatccaggattacttccggaaattcaagaagaggaaagagcaaggcctcgtcggaaagtaccctgctaaaaataccactatcgctttgcaagccggccttcgtactctgcacgacattgggcctgagatacggcgcgccatcagctgcgatctgcaagacgacgaaccagaggagaccaagcgcgaggaagaggatgatgtctttaaacgaaacggggctttgctgggtaaccatgttaatcacgtcaattctgacagacgggattccctgcagcagacgaacactacccaccggcccctgcacgttcaaaggccatccatcccacccgcctccgatactgagaagcccttattcccccctgctgggaattccgtgtgtcataaccatcataatcacaattctatcggaaagcaagtgcccactagcaccaacgccaatctcaacaacgccaatatgtcaaaagccgctcacgggaagaggccctctattggtaacctggagcacgtgagcgagaacggccatcattcaagccacaagcacgaccgtgaaccccagcggcggtcaagcgttaaaaggacgcgatattatgaaacgtacataaggagcgattctggcgacgagcagctccctaccatatgtcgtgaagacccagagattcatggttacttccgcgacccccactgcctcggggaacaagaatactttagctcagaggagtgctacgaagacgacagcagccccacatggtcccgccagaactacggatactactccaggtaccccggccggaatattgactcagagcgacctcgtgggtaccaccatcctcagggcttcctggaagatgacgatagccccgtttgttacgactctagacggagcccaaggcgacggctgcttccccctacgccggcctcgcaccggcgctcctcgtttaactttgaatgcctgcggcgacagagctcccaggaggaagtcccctcaagcccaatcttccctcacaggacggcgcttcctctgcacctgatgcagcagcagatcatggccgtggctggcctagactcctctaaggcccagaagtatagccccagtcattccacccgatcttgggcaaccccgccggccacccctccctatcgggactggacgccatgttacacccccctaattcaggtggagcaatctgaagccctcgaccaggtgaacggctccctgccttccctccaccgttcttcctggtacacagatgaacctgatattagctaccggactttcacaccagcttctctgacggttcctagctcttttaggaacaaaaactctgataagcagagatccgccgattcactggtggaggcggttttgattagcgaggggctcggcaggtatgccagggatccgaagttcgttagcgcgactaagcatgagattgctgatgcttgtgacctgaccatcgatgagatggagtctgccgcaagcaccctgctgaacggaaatgttcgtccacgcgctaatggagatgtcggacctctctcgcatagacaggattatgaattgcaagacttcggccctgggtatagcgacgaagaacctgatcccggcagagacgaggaagacctggcagatgagatgatttgtatcactacactgtag

SEQ ID NO: 46505 - DNA, 6486 bp, Artificial Sequence
  derived and/or modified sequence
atgatgatgatgatgatgatgaagaagatgcagcaccagaggcagcagcaggccgaccacgccaatgaggccaactatgcccggggcacccggctgcccctgtctggagagggccccaccagccagcccaacagcagcaagcagacagtgctgtcctggcaggccgccattgatgctgcccggcaggccaaggccgcccagaccatgagcaccagcgcccctcctcctgtgggcagcctgagccagaggaagaggcagcagtatgccaagagcaagaagcagggcaacagcagcaacagcaggcctgcccgggccctcttctgcctgagcctgaacaaccccatccggcgggcctgcatcagcatcgtggagtggaagccctttgacatcttcatcctgctggccatctttgccaactgtgtggccctggccatctacatccccttcccagaagatgacagcaacagcaccaaccacaacctggagaaggtggagtatgccttcctgatcatcttcaccgtggagaccttcctgaagatcatcgcctacggcctgctgctgcaccccaatgcctacgtgagaaatggctggaacctgctggactttgtgattgtcatcgtgggcctcttcagcgtcatcctggagcagctgaccaaggagacagaaggaggcaaccacagcagcggcaagagcggcggctttgatgtgaaggccctgcgggccttccgggtgctgcggcccctgcggctggtgtctggagtgcccagcctgcaggtggtgctgaacagcatcatcaaggccatggtgcccctgctgcacatcgccctgctggtgctcttcgtcatcatcatctatgccatcatcggcctggagctgttcatcggcaagatgcacaagacctgcttctttgctgacagcgacatcgtggccgaggaggaccctgccccctgtgccttctctggaaatggccggcagtgcacagccaatggaacagagtgccgcagcggctgggtgggccccaatggaggcatcaccaactttgacaactttgcctttgccatgctgaccgtcttccagtgcatcaccatggagggctggacagatgtgctgtactggatgaatgatgccatgggctttgagctgccctgggtgtactttgtgtccctggtgatcttcggcagcttctttgtgctgaacctggtgctgggcgtgctgagcggggagttcagcaaggagcgggagaaggccaaggcccggggggacttccagaagctgcgggagaagcagcagctggaggaggacctgaagggctacctggactggatcacccaggccgaggacatcgaccctgaaaatgaggaggagggcggggaggagggcaagaggaacacctccatgcccaccagcgagacagaatctgtgaacacagaaaatgtgtctggagagggggagaacagaggctgctgcggcagcctgtgccaggccatcagcaagagcaagctgagccgccgctggaggcgctggaaccgcttcaacagaagacgctgcagagctgctgtgaagtctgtgaccttctactggctggtgattgtgctggtgttcctgaacaccctgaccatcagcagcgagcactacaaccagcctgactggctgacccagatccaggacatcgccaacaaggtgctgctggccctcttcacctgtgagatgctggtgaagatgtacagcctgggcctgcaggcctactttgtgtccctcttcaacagatttgactgctttgtggtgtgtggcggcatcacagagaccatcctggtggagctggagatcatgagccccctgggcatcagcgtcttccgctgtgtgcggctgctgcgcatcttcaaggtgaccaggcactggaccagcctgagcaacctggtggccagcctgctgaacagcatgaagagcatcgccagcctgctgctgctgctcttcctgttcatcatcatcttcagcctgctgggcatgcagctgtttggaggcaagttcaactttgatgagacccagaccaagaggagcacctttgacaacttcccccaggccctgctgactgtgttccagatcctgactggagaggactggaatgctgtgatgtatgatggcatcatggcctacggcggccccagcagcagcggcatgattgtgtgcatctacttcatcatcctcttcatctgtggcaactacatcctgctgaatgtgttcctggccatcgctgtggacaacctggctgatgctgagagcctgaacacagcccagaaggaggaggccgaggagaaggagaggaagaagatcgccaggaaggagagcctggagaacaagaagaacaacaagccagaggtgaaccagatcgccaacagcgacaacaaggtgaccattgatgactaccgggaggaggatgaggacaaggacccctacccaccctgtgatgtgcctgtgggggaggaggaggaggaggaggaggaggatgagcctgaggtgcctgctggcccccggccccggcgcatcagcgagctgaacatgaaggagaagatcgcccccatccctgagggcagcgccttcttcatcctgagcaagaccaaccccatccgggtgggctgccacaagctgatcaaccaccacatcttcaccaacctgatcctggtgttcatcatgctgagcagcgctgccctggccgctgaggaccccatccgcagccacagcttcaggaacaccatcctgggctactttgattatgccttcaccgccatcttcaccgtggagatcctgctgaagatgaccacctttggagccttcctgcacaagggggccttctgcaggaactacttcaacctgctggacatgctggtggtgggcgtgtccctggtgtcctttggcatccagagcagcgccatctctgtggtgaagatcctgcgggtgctgcgggtgctgcggcccctgcgggccatcaacagagccaagggcctgaagcacgtggtgcagtgtgtgtttgtggccatccgcaccatcggcaacatcatgattgtgaccaccctgctgcagttcatgtttgcctgcatcggcgtgcagctgttcaagggcaagttctaccgctgcacagatgaggccaagagcaaccctgaggagtgccggggcctcttcatcctgtacaaggatggagatgtggacagccctgtggtgcgggagcgcatctggcagaacagcgacttcaactttgacaacgtgctgagcgccatgatggccctcttcaccgtgtccacctttgagggctggccagccctgctgtacaaggccatcgacagcaatggagagaacatcggccccatctacaaccaccgggtggagatcagcatcttcttcatcatctacatcatcatcgtggccttcttcatgatgaacatctttgtgggcttcgtcatcgtgaccttccaggagcagggcgagaaggagtacaagaactgtgagctggacaagaaccagaggcagtgtgtggagtatgccctgaaggcccggcccctgcggcgctacatccccaagaacccctaccagtacaagttctggtacgtggtgaacagcagcccctttgagtacatgatgtttgtgctgatcatgctgaacaccctgtgcctggccatgcagcactatgagcagagcaagatgtttaatgatgccatggacatcctgaacatggtgttcaccggggtcttcaccgtggagatggtgctgaaggtgattgccttcaagcccaagggctacttcagtgatgcctggaacacctttgacagcctcatcgtcatcggcagcatcattgatgtggccctgtctgaggccgaccccacagaaagtgaaaatgtgcctgtgcccacagccaccccaggcaacagcgaggagagcaaccgcatcagcatcaccttcttccgcctcttccgggtgatgaggctggtgaagctgctgagcagaggagagggcatccgcaccctgctgtggaccttcatcaagagcttccaggccctgccctacgtggccctgctgattgccatgctgttcttcatctatgctgtgattggcatgcagatgtttgggaaggtggccatgagggacaacaaccagatcaacagaaacaacaacttccagaccttcccccaggccgtgctgctgctcttccgctgtgccaccggggaggcctggcaggagatcatgctggcctgcctgcccgggaagctgtgtgaccctgagagtgactacaaccctggagaggagtacacctgtggcagcaactttgccatcgtgtacttcatctccttctacatgctgtgtgccttcctgatcatcaacctgtttgtggccgtcatcatggacaactttgactacctgacccgggactggagcatcctgggcccccaccacctggatgagttcaagaggatctggagcgaatatgaccctgaggccaagggccgcatcaagcacctggatgtggtgaccctgctgcggcgcatccagccccccctgggctttgggaagctgtgcccccaccgggtggcctgcaagaggctggtggccatgaacatgcccctgaacagtgatggcaccgtgatgtttaatgccaccctgtttgccctggtgaggacagccctgaagatcaagacagagggcaacctggagcaggccaatgaggagctgcgggctgtgatcaagaagatctggaagaagacctccatgaagctgctggaccaggtggtgcccccagctggagatgatgaggtgacagtgggcaagttctacgccaccttcctgatccaggactacttcaggaagttcaagaagaggaaggagcagggcctggtgggcaagtacccagccaagaacaccaccatcgccctgcaggccggcctgcggaccctgcatgacatcggccctgagatcagaagagccatcagctgtgacctgcaggatgatgagcctgaggagaccaagcgggaggaggaggatgatgtgttcaagagaaatggagccctgctgggcaaccacgtgaaccacgtgaacagcgacagaagagacagcctgcagcagaccaacaccacccaccggcccctgcacgtgcagaggcccagcatccccccagccagtgacacagagaagcccctcttccccccagctggcaacagcgtgtgccacaaccaccacaaccacaacagcatcggcaagcaggtgcccaccagcaccaatgccaacctgaacaatgccaacatgagcaaggccgcccacggcaagaggcccagcatcggcaacctggagcacgtgtctgaaaatggccaccacagcagccacaagcatgaccgggagccccagaggaggagctctgtgaagaggacccgctactatgagacctacatccgcagtgacagcggagatgagcagctgcccaccatctgccgggaggaccctgagatccacggctacttccgggacccccactgcctgggggagcaggagtacttcagcagcgaggagtgctatgaagatgacagcagccccacctggagccggcagaactacggctactacagccgctacccaggcaggaacatcgacagcgagcggccccggggctaccaccacccccagggcttcctggaggatgatgacagccctgtgtgctatgacagcagaagaagcccccggcggcggctgctgccccccaccccagccagccacagaagaagcagcttcaactttgagtgcctgcggcggcagagcagccaggaggaggtgcccagcagccccatcttcccccacaggacagccctgcccctgcacctgatgcagcagcagatcatggctgtggccggcctggacagcagcaaggcccagaagtacagccccagccacagcaccaggtcctgggccaccccaccagccaccccaccctacagagactggaccccctgctacacccccctcatccaggtggagcagagcgaggccctggaccaggtgaatggcagcctgcccagcctgcacaggagctcctggtacacagatgagccagacatctcctaccgcaccttcaccccagccagcctgactgtgcccagcagcttcaggaacaagaacagcgacaagcagaggtctgctgacagcctggtggaggccgtgctgatcagcgagggcctgggccgctatgcccgggaccccaagtttgtgtctgccaccaagcatgaaattgctgatgcctgtgacctgaccattgatgagatggagagcgctgccagcaccctgctgaatggaaatgtgcggccccgggccaatggagatgtgggccccctgagccaccggcaggactatgagctgcaggactttggacctggctacagtgatgaggagccagaccccggcagagatgaggaggacctggctgatgagatgatctgcatcaccaccctgtag

SEQ ID NO: 46506 - DNA, 6486 bp, Artificial Sequence
  derived and/or modified sequence
atgatgatgatgatgatgatgaagaagatgcagcaccagcggcagcagcaggctgatcacgccaacgaggcaaattacgccagaggcactcgcttaccactttccggcgagggtcccacttctcagcccaactcgagcaagcagacagtcctatcctggcaagctgccatcgacgcggctaggcaggccaaagcagcccagacgatgtcaacaagcgcgccccctccagtcggaagcctttctcagcgcaaaaggcagcagtatgccaagtctaagaaacagggaaactcgtccaattctaggccggcaagggccctgttttgtcttagcctgaataatcccatccggcgggcctgcatctcaatcgttgaatggaaaccgtttgacatcttcatcttactggccatatttgctaactgtgtcgccctcgcaatttacataccttttcccgaagacgattcgaacagcacaaaccacaacttggagaaggtggaatacgcgttcctcattatttttaccgtggaaacgttcctcaaaatcattgcttacggactgctactgcatcccaacgcgtatgttagaaatgggtggaacctgctggactttgtaatcgtgatcgtgggattattctcggtcatcctcgagcaactaactaaagaaacggaaggtggcaatcacagctctggaaagagtggtggtttcgacgttaaagcactgagggcattccgggtgctgaggccacttcgactcgtcagtggagtgcccagcctccaggttgtacttaattccatcattaaagccatggtacccctgctgcacattgctcttcttgtgttgttcgtcatcattatttatgctattattggtctggaactctttattggcaagatgcacaaaacttgcttcttcgccgacagtgatattgtagctgaggaagatccggcaccttgcgcattttccgggaacgggcgccaatgcactgctaacgggaccgaatgcagatctggttgggtcggcccaaatgggggtatcacaaattttgacaactttgcgttcgcaatgctgacagtgttccagtgtataactatggagggctggacagatgtactgtactggatgaatgacgctatgggctttgagcttccctgggtgtattttgtcagccttgtgattttcggctcttttttcgttttgaacctggtgctcggagtattgtctggggaattcagcaaggaacgtgaaaaagccaaagctagaggggattttcagaagttacgcgaaaagcagcaactagaggaggatctgaagggctacctggactggatcacccaggcagaggacatcgatccagaaaacgaggaagagggtggggaggagggcaagcgtaacacatccatgcctacatcagagacagagtccgtgaataccgaaaatgtatcaggagagggagaaaatcggggctgctgtggttccttgtgccaggctatctccaaatctaagctgtcccggcgctggcgtagatggaaccggtttaacaggcggcggtgccgcgcagctgtgaaaagtgtaacattctattggttagttatagtcctggtgtttctaaacactcttaccatctcatcagaacattacaatcagcctgactggttgacccagatacaagacatcgctaacaaggtactgcttgccctcttcacctgtgaaatgctagtgaagatgtattcccttggtctgcaggcttattttgtgtctctgttcaaccgattcgactgtttcgtggtatgcggtgggataaccgagaccatcctggtagagctggaaatcatgtcccccctgggcatatccgtgttccggtgcgtgcggttactacgaatcttcaaagtgacaaggcactggactagcctgtctaacctagtggcctcgttgctgaacagcatgaaatcaattgcctccctgctgctgttgctgttcctgttcatcattatcttttccttactgggaatgcagttgtttggcggaaagtttaacttcgatgagacgcagacaaagcgttccacatttgacaactttccacaggcgctcttgactgtctttcaaatcctcactggggaagattggaacgccgtgatgtacgatggaatcatggcatacggtggcccctcatcaagtggtatgatcgtgtgcatttacttcattatactattcatctgtggaaattatattttgcttaacgtgtttttagctattgccgtggataatttagcggacgctgaaagcctgaacaccgctcagaaggaagaggctgaagagaaggagcggaaaaagatagcccggaaggagagcctggaaaacaagaagaataataagcccgaggtcaatcagattgcaaattccgacaacaaggtgacgatcgatgactatcgagaggaagacgaagacaaggacccgtacccaccatgcgacgttccagtgggagaggaggaagaagaggaggaggaggacgagcccgaagtccctgcaggccccaggccacgaagaatctcagagcttaacatgaaagagaaaattgcccccattcctgaaggttctgctttttttatcctgtcgaaaaccaatcctatacgggtgggctgccacaagctaatcaatcatcacatattcacaaacctcattctggtgttcatcatgctgtccagtgccgctttggccgcggaggatccaatccgatctcactcattcagaaatactattcttggttattttgactatgcttttacggccatatttaccgttgaaattctccttaaaatgacaacctttggcgccttcctgcataagggggcgttctgtcgtaactattttaatctgctggacatgctggtggttggggtctctttggtcagctttggaatccaatctagcgccatctcagtggtaaagatactgcgcgtcctccgggttctgagacctctgcgtgcaataaaccgagcaaaaggcctgaaacacgtcgtgcagtgtgtgtttgtcgccattcgtacaattggtaatattatgatcgtcaccactctcctgcagttcatgtttgcctgtattggagtgcagctcttcaaaggcaagttttaccgctgtaccgacgaggcaaaatccaatccagaggagtgcagaggactctttatcctgtacaaggatggagacgtggattccccagtggtgagggagcggatctggcagaattctgacttcaactttgacaacgtgctgtcagccatgatggcactgtttactgtgagtaccttcgaaggctggcccgccctcctgtataaggccatcgactccaacggagaaaacatcggccctatctataaccatcgggttgagatctctattttttttattatatacatcatcattgtggctttcttcatgatgaacatttttgtcggcttcgtgatcgtgacctttcaggaacagggggaaaaagagtataagaattgtgagctggacaaaaatcagcgacagtgcgtggagtatgctctcaaggctaggcctttaaggagatatattcccaaaaacccatatcagtacaagttctggtatgtggtgaattcatctcctttcgagtacatgatgttcgtgctgataatgttaaataccttgtgtcttgcaatgcagcactacgaacagagtaagatgtttaatgatgcaatggatatcctcaatatggttttcaccggagtgttcacagtcgaaatggttctcaaggtcattgcctttaaacccaaaggttacttctctgacgcttggaatacatttgactcacttatcgtgataggctctatcatcgacgtggcactcagcgaggctgaccccacagaatccgaaaatgtgcccgtgccaacagcaacacccggcaattccgaggagagcaacagaatttccattacattttttcggctctttagagtcatgcgcctcgtgaaactcctgagcagaggggaaggtattaggacactgttgtggacattcattaagtcatttcaggcactaccttatgtggcgctgctgatcgccatgctctttttcatttatgcagtgattgggatgcagatgttcggcaaggtggcaatgagagataacaaccagatcaatcgcaacaacaactttcagacatttccacaggccgtgcttctgcttttcagatgtgccaccggagaggcctggcaggagattatgttagcctgtttgcccggcaaactctgcgaccctgagtctgattacaatccgggagaagaatacacctgcggtagcaatttcgccatcgtgtatttcatcagcttctacatgttatgtgccttcctcattatcaacctattcgtcgccgtaatcatggacaatttcgactacctgactagggactggagcatcttgggtccccatcacctcgacgagttcaagcgaatctggagtgagtatgacccagaagccaaagggcgtatcaagcaccttgacgtagtgacactcctgcgccgaattcagccccctctcggtttcgggaagctgtgtccccatagagtggcatgtaagagattggtcgctatgaacatgccgctgaattctgatggcaccgtgatgtttaacgccacccttttcgcactcgtgcgaactgctctcaagattaaaactgagggcaacctcgagcaggctaatgaggaactgagggcagtcatcaaaaagatatggaagaagacaagcatgaagctgctggatcaggtcgtgccacccgctggtgatgacgaagttaccgttggtaaattctacgccaccttcttgattcaggactattttaggaaattcaagaaaaggaaagagcagggacttgttggcaagtacccagcaaagaacacaacaattgctctgcaggcaggactgcgcacacttcacgacattggtccagagatccggagggctatatcttgcgacctccaggacgacgagcctgaggagaccaagagagaagaagaggacgatgtgtttaagcgcaatggcgcactactggggaatcacgtgaatcatgtaaattctgaccggcgcgacagcctgcagcagacaaatacaactcatcgacctctgcacgttcagcgcccgagtattccgccggctagcgatacagaaaagcccttgttcccccctgctgggaattcggtgtgccataaccatcacaaccataactccattggaaagcaggtacctacgtctacaaacgccaatctcaataacgctaacatgagcaaggccgcccatgggaagagaccctcgataggcaatctggagcacgtctcggaaaatggccaccactccagccataagcatgatagggagccccagagaaggagctctgtcaaaagaacacggtactatgagacctacatcagatctgacagcggagacgagcagttaccaaccatttgtagggaggatccggagatccacggttacttcagagacccccattgtcttggagagcaggagtacttctcgtcagaagaatgctatgaggacgattcctccccaacttggtcgcggcaaaactacggatactacagtcggtacccaggacggaacattgattccgagaggcccagaggttatcatcatccccagggctttctggaagatgacgactctcctgtgtgctacgatagtaggaggagcccccggcgcagactccttcctcccacccctgcctcacaccgacgcagcagtttcaattttgaatgcctcaggcggcagagctcacaagaagaggtcccaagcagtcctatttttcctcatcgaactgccttgcccctgcacctgatgcaacagcaaatcatggccgtggctggcctggactctagtaaggcccagaagtatagcccgagccactcgactagaagttgggcgaccccccctgccacccccccatacagagattggaccccttgttacacccccctgatccaggtggaacagtctgaagccctcgaccaggtgaacggatcccttccctcgttgcatcgctcatcttggtacaccgacgagcccgatatcagttataggacattcacgccagcaagcctgaccgtgccctcgtccttcaggaataagaactcagacaaacaacgaagcgccgattctcttgtcgaggccgtacttatcagtgagggattaggccggtacgctcgggacccaaagtttgtatccgcgactaaacatgagattgcggacgcttgcgatctgactatcgacgaaatggagtctgctgcgtccaccctccttaacggaaatgtcaggcctcgagccaacggagacgtcggacccctgtcccacagacaagattacgaactgcaagacttcgggcccggatacagcgacgaagaaccagatcctggacgggatgaggaggacctggccgacgagatgatctgtatcactactctgtag

SEQ ID NO: 46507 - DNA, 6485 bp, Artificial Sequence
  derived and/or modified sequence
atgatgatgatgatgatgatgaagaagatgcagcaccagcgccaacaacaggcggatcatgcgaatgaggccaactacgcacgcggaactcgtctcccactgagcggcgaaggacccacttcacagccaaattctagcaaacagactgtgctctcctggcaggccgctattgacgctgccagacaagccaaggccgcacagaccatgagcaccagtgctcctccccctgtaggttctctctcgcaaagaaagcggcaacagtacgccaaatcaaaaaagcaaggtaatagctcaaattctcggccagcaagagccctgttttgtctttcactgaataatcctattcggagagcttgcatttcaattgtcgaatggaaaccatttgatatctttatcctgcttgccatctttgccaactgcgtggccttagcaatctatatcccattcccagaagatgacagcaatagcactaaccacaatctcgagaaagtcgagtatgctttccttattatttttacagttgagacctttctcaagatcatagcctatggcctgctgctgcaccccaatgcttacgtgcgcaacggctggaacctgttagattttgtcatcgttatcgtgggactgttttccgtgatactggagcagctgaccaaggagaccgaagggggtaatcattccagtggcaagtccgggggattcgatgtcaaagccctgcgcgctttccgggtgctccggcctcttaggctggtcagcggcgtcccatctctgcaggtggtcctgaatagtatcatcaaagcaatggtgcctctgttgcacatcgcactgttagttctcttcgtgattatcatttatgccataatcgggttggagcttttcatcggaaaaatgcacaagacttgtttctttgcggacagtgatatcgtggcagaggaagaccccgctccctgtgcattctccgggaatggcagacagtgcacagccaacggcactgagtgccgaagcggctgggttgggccaaacgggggaattacaaacttcgataacttcgccttcgcaatgttaacagttttccagtgtatcacaatggagggctggaccgatgttctgtactggatgaacgatgcgatgggctttgagttgccctgggtttacttcgtgtctttggtgattttcgggagtttcttcgtgcttaacttggtgctgggggtgttatctggggaatttagcaaagagcgcgagaaggctaaggccaggggtgatttccagaaattgcgcgaaaaacagcagctcgaagaagacctcaagggttatctagattggataacccaggctgaggatattgacccagaaaacgaagaggagggcggagaagaagggaagcgcaacacctcgatgcctacctccgagactgaaagtgtcaataccgagaatgtctctggggaaggagaaaataggggctgttgcggaagcctgtgccaggctattagtaagtccaagctttccagaaggtggagacgttggaacaggtttaacagacgcaggtgcagagccgcagtgaaatccgtgaccttttactggctcgtaatagtgctcgttttcctgaacactctgacgatctcatctgagcattataatcagccagattggctcacccagattcaggatattgccaacaaagtcctgctggccctttttacctgcgagatgttggtgaagatgtattcgctcggcttgcaggcatactttgtgtccctgtttaatagatttgactgttttgtagtctgtggaggaataaccgagacgattctggtagagctcgaaataatgagcccgctcgggatttctgtgttccggtgtgtcaggctgctgcgaatctttaaggtaacaagacactggaccagcttgtctaacctcgtggcatcactgctcaactctatgaagtctatagcctccctgctgctcttactcttcttgttcatcattatcttttcactcctgggtatgcagctgtttgggggaaagtttaacttcgacgagacccaaaccaagagatctacattcgacaactttccccaggctcttctgaccgtttttcagatcttaaccggagaggactggaacgccgtcatgtacgacggaatcatggcttatggaggtccgtcctccagcggtatgattgtctgcatttacttcatcatactgtttatttgtgggaactatattcttctgaatgtgttcttagccattgcggtcgacaacctggctgacgcggaatcacttaacacagcccagaaggaagaagccgaggaaaaggagaggaagaaaatcgcacgcaaagagtcacttgaaaataagaagaacaataagcctgaggtcaaccagattgctaactcagacaacaaagtgacaatcgacgactatagagaggaggacgaggacaaggatccctatcctccctgtgacgtgcctgtgggggaggaggaggaggaggaggaggaggacgagcctgaagtgcctgcaggtccccgacccagacgaatcagcgaattaaatatgaaagaaaaaatcgctccgattcctgaaggaagcgcctttttcatcttatctaaaactaatcccatccgcgttggatgccataagcttataaaccatcatatttttacgaacctcatactggttttcattatgctttcctctgcagccttagctgctgaagaccccattcgcagtcattctttccgtaacaccatcctgggatattttgattatgccttcaccgctattttcactgtcgaaatcctactgaaaatgaccacttttggcgcattcttacacaaaggcgcattttgcaggaactacttcaaccttctggacatgctggtcgtaggggtctctctagtgtcctttggcatccaatccagtgcaatttctgtggtgaagatccttcgcgtgctgcgagtactgcggccactgagagcgattaatagggcaaaggggctgaagcatgtcgtgcagtgcgtgttcgtggctatcagaaccattggtaatattatgatagtaacaactctgctgcagttcatgttcgcatgtatcggtgttcagctcttcaaaggcaaattttacagatgcactgatgaggcaaaatcaaatccagaggagtgccgcggactgtttatcttgtataaggacggtgacgttgacagtcctgtagtccgcgaacgaatctggcagaatagcgacttcaacttcgataacgtcctgagcgcgatgatggccctgtttactgtttccacctttgaaggttggcctgccctgctgtacaaagcgattgactccaacggggaaaatatcggtcctatttacaatcaccgtgttgagattagtattttcttcataatctacattatcattgtggcgttcttcatgatgaatatttttgtcggttttgtgatcgtgacgttccaggagcagggagagaaagaatacaagaactgcgagttggacaagaaccagaggcagtgcgtggaatatgccctgaaggctaggcctctgcgtcgctatatccccaaaaatccctaccagtacaaattctggtatgtcgtgaactccagccctttcgaatatatgatgtttgtgcttatcatgctgaacactctatgtttggcgatgcagcactacgaacagtcaaaaatgtttaatgatgcaatggatattttgaatatggtgttcactggcgtgttcaccgtagaaatggtgcttaaggtgatcgcattcaagcctaagggatacttctcagacgcctggaacacatttgactcactcatcgtgattggctcgataatcgacgtggctctcagcgaagccgaccctactgaaagtgaaaacgtgcccgtcccaactgcaaccccagggaactctgaggagtcaaatcggatttctatcaccttttttcgtctctttcgcgtcatgaggcttgttaagttgctgtcacgaggcgagggaatccgtacattattatggaccttcattaagtcttttcaagcgctcccatacgtggccctccttatagcgatgctttttttcatttacgccgttatcggaatgcagatgtttggcaaggttgctatgagggacaataatcagataaataggaacaataacttccagacatttccccaggcagtgttgctcctatttagatgtgccaccggcgaagcatggcaggaaatcatgctggcgtgccttcctgggaagctgtgtgaccctgaatctgattacaacccaggggaagagtatacttgcggaagcaacttcgctattgtttactttattagtttttacatgctctgcgcattcctgatcatcaacctcttcgttgctgtcataatggataatttcgattacctgacccgggattggagcatcctcgggccacatcatctagatgaatttaagcgaatttggagtgaatatgacccagaggccaaggggagaatcaagcatctggatgtcgttaccttgttgagacgcattcaaccacccctgggatttggtaagctttgccctcatcgggtggcatgcaaacgcttggtcgcaatgaatatgcccctcaacagcgacggcaccgttatgtttaatgcaaccctgtttgctctggtcagaactgcactgaaaattaagaccgaaggcaatctcgaacaggccaacgaagagctaagagcagttattaagaagatatggaaaaaaacgagcatgaagttgcttgatcaggtcgtgccacctgccggtgacgatgaagtcacggtcggaaagttctacgctaccttcctcatccaggactactttcggaagttcaagaaacggaaagaacagggtctggtcggaaaatatccagccaaaaacaccactattgctttacaagctggcctgcgcacgctacatgacataggccctgagattagacgggcaattagctgtgacctgcaagatgacgaacctgaggagaccaaacgtgaggaggaggatgacgtcttcaaacgcaacggcgctctcctgggcaatcatgtaaatcacgtgaactccgatagacgtgatagtttacagcaaaccaatacaacccaccggccacttcacgtccaaaggccttcgatccctccagcttctgatactgaaaagcctttgtttccaccagccggtaactctgtgtgccacaaccatcacaatcacaattccattggaaagcaggtgccaacctcgactaacgctaatcttaataacgcaaatatgtctaaggccgctcatgggaagcgcccttctataggtaacttggagcacgtctctgagaatgggcatcatagttctcataaacacgaccgcgaaccccaacggcgaagtagtgtcaaaagaacacggtattacgagacgtacatccgctctgacagcggcgacgaacaattgcccactatatgcagggaagaccctgaaatccacgggtacttccgggacccccattgcctaggagaacaagagtattttagcagtgaagagtgttatgaggacgactcatctcccacctggtctcgacagaattacggttattattctcgctacccaggcaggaacattgactccgaaagacctcggggttaccatcacccacaggggttcctggaggatgatgattcccctgtgtgctacgattcccgccgatcccccagaagacggctgctccccccaacacctgccagccaccgtcggtcgagtttcaacttcgagtgtctcagaagacaatccagtcaggaggaggtgccttcttcaccaattttcccacaccggacagcgctgcctctccatttaatgcaacagcagattatggcagtggccggtctggatagcagtaaagcccaaaaatattctccgtcacacagcactcggagttgggccacccccccagctacccctccatacagggactggacaccatgctacactcccctcatccaagttgaacaatcagaggccttggaccaggtcaacggttcactccctagcttacaccgaagttcctggtatacggacgagcccgatatcagctaccgtaccttcactcccgcttcccttacggtcccctcgtctttcagaaataaaaattccgacaagcagcggagcgccgacagcctggtggaagccgtgttgatttctgagggtctgggtaggtatgccagggatccaaagttcgtgtcagctacgaagcacgaaatcgctgacgcttgcgatctgaccatagacgagatggagtccgccgcaagtactctcctgaatgggaacgtccggccacgcgcaaatggcgatgtgggacccctgtcccaccggcaggactacgagttgcaggatttcgggcctggttattctgatgaggagcctgatccaggacgggacgaggaggacctggctgatgagatgatttgtattaccaccctata

SEQ ID NO: 46508 - DNA, 7636 bp, Artificial Sequence
  derived and/or modified sequence
gggcgagcgcctccgtccccggatgtgagctccggctgcccgcggtcccgagccagcggcggcgcgggcggcggcggcgggcaccgggcaccgcggcgggcgggcagacgggcgggcatggggggagcgccgagcggccccggcggccgggccggcatcaccgcggcgtctctccgctagaggaggggacaagccagttctcctttgcagcaaaaaattacatgtatatattattaagataatatatacattggattttatttttttaaaaagtttattttgctccatttttgaaaaagagagagcttgggtggcgagcggttttttttttaaatcaattatccttattttctgttatttgtccccgtccctccccacccccctgctgaagcgagaataagggcagggaccgcggctcctacctcttggtgatccccttccccattccgcccccgcctcaacgcccagcacagtgccctgcacacagtagtcgctcaataaatgttcgtggatgatgatgatgatgatgatgaaaaaaatgcagcatcaacggcagcagcaagcggaccacgcgaacgaggcaaactatgcaagaggcaccagacttcctctttctggtgaaggaccaacttctcagccgaatagctccaagcaaactgtcctgtcttggcaagctgcaatcgatgctgctagacaggccaaggctgcccaaactatgagcacctctgcacccccacctgtaggatctctctcccaaagaaaacgtcagcaatacgccaagagcaaaaaacagggtaactcgtccaacagccgacctgcccgcgcccttttctgtttatcactcaataaccccatccgaagagcctgcattagtatagtggaatggaaaccatttgacatatttatattattggctatttttgccaattgtgtggccttagctatttacatcccattccctgaagatgattctaattcaacaaatcataacttggaaaaagtagaatatgccttcctgattatttttacagtcgagacatttttgaagattatagcgtatggattattgctacatcctaatgcttatgttaggaatggatggaatttactggattttgttatagtaatagtaggattgtttagtgtaattttggaacaattaaccaaagaaacagaaggcgggaaccactcaagcggcaaatctggaggctttgatgtcaaagccctccgtgcctttcgagtgttgcgaccacttcgactagtgtcaggagtgcccagtttacaagttgtcctgaactccattataaaagccatggttcccctccttcacatagcccttttggtattatttgtaatcataatctatgctattataggattggaactttttattggaaaaatgcacaaaacatgtttttttgctgactcagatatcgtagctgaagaggacccagctccatgtgcgttctcagggaatggacgccagtgtactgccaatggcacggaatgtaggagtggctgggttggcccgaacggaggcatcaccaactttgataactttgcctttgccatgcttactgtgtttcagtgcatcaccatggagggctggacagatgtgctctactggatgaatgatgctatgggatttgaattgccctgggtgtattttgtcagtctcgtcatctttgggtcatttttcgtactaaatcttgtacttggtgtattgagcggagaattctcaaaggaaagagagaaggcaaaagcacggggagatttccagaagctccgggagaagcagcagctggaggaggatctaaagggctacttggattggatcacccaagctgaggacatcgatccggagaatgaggaagaaggaggagaggaaggcaaacgaaatactagcatgcccaccagcgagactgagtctgtgaacacagagaacgtcagcggtgaaggcgagaaccgaggctgctgtggaagtctctgtcaagccatctcaaaatccaaactcagccgacgctggcgtcgctggaaccgattcaatcgcagaagatgtagggccgccgtgaagtctgtcacgttttactggctggttatcgtcctggtgtttctgaacaccttaaccatttcctctgagcactacaatcagccagattggttgacacagattcaagatattgccaacaaagtcctcttggctctgttcacctgcgagatgctggtaaaaatgtacagcttgggcctccaagcatatttcgtctctcttttcaaccggtttgattgcttcgtggtgtgtggtggaatcactgagacgatcttggtggaactggaaatcatgtctcccctggggatctctgtgtttcggtgtgtgcgcctcttaagaatcttcaaagtgaccaggcactggacttccctgagcaacttagtggcatccttattaaactccatgaagtccatcgcttcgctgttgcttctgctttttctcttcattatcatcttttccttgcttgggatgcagctgtttggcggcaagtttaattttgatgaaacgcaaaccaagcggagcacctttgacaatttccctcaagcacttctcacagtgttccagatcctgacaggcgaagactggaatgctgtgatgtacgatggcatcatggcttacgggggcccatcctcttcaggaatgatcgtctgcatctacttcatcatcctcttcatttgtggtaactatattctactgaatgtcttcttggccatcgctgtagacaatttggctgatgctgaaagtctgaacactgctcagaaagaagaagcggaagaaaaggagaggaaaaagattgccagaaaagagagcctagaaaataaaaagaacaacaaaccagaagtcaaccagatagccaacagtgacaacaaggttacaattgatgactatagagaagaggatgaagacaaggacccctatccgccttgcgatgtgccagtaggggaagaggaagaggaagaggaggaggatgaacctgaggttcctgccggaccccgtcctcgaaggatctcggagttgaacatgaaggaaaaaattgcccccatccctgaagggagcgctttcttcattcttagcaagaccaacccgatccgcgtaggctgccacaagctcatcaaccaccacatcttcaccaacctcatccttgtcttcatcatgctgagcagcgctgccctggccgcagaggaccccatccgcagccactccttccggaacacgatactgggttactttgactatgccttcacagccatctttactgttgagatcctgttgaagatgacaacttttggagctttcctccacaaaggggccttctgcaggaactacttcaatttgctggatatgctggtggttggggtgtctctggtgtcatttgggattcaatccagtgccatctccgttgtgaagattctgagggtcttaagggtcctgcgtcccctcagggccatcaacagagcaaaaggacttaagcacgtggtccagtgcgtcttcgtggccatccggaccatcggcaacatcatgatcgtcaccaccctcctgcagttcatgtttgcctgtatcggggtccagttgttcaaggggaagttctatcgctgtacggatgaagccaaaagtaaccctgaagaatgcaggggacttttcatcctctacaaggatggggatgttgacagtcctgtggtccgtgaacggatctggcaaaacagtgatttcaacttcgacaacgtcctctctgctatgatggcgctcttcacagtctccacgtttgagggctggcctgcgttgctgtataaagccatcgactcgaatggagagaacatcggcccaatctacaaccaccgcgtggagatctccatcttcttcatcatctacatcatcattgtagctttcttcatgatgaacatctttgtgggctttgtcatcgttacatttcaggaacaaggagaaaaagagtataagaactgtgagctggacaaaaatcagcgtcagtgtgttgaatacgccttgaaagcacgtcccttgcggagatacatccccaaaaacccctaccagtacaagttctggtacgtggtgaactcttcgcctttcgaatacatgatgtttgtcctcatcatgctcaacacactctgcttggccatgcagcactacgagcagtccaagatgttcaatgatgccatggacattctgaacatggtcttcaccggggtgttcaccgtcgagatggttttgaaagtcatcgcatttaagcctaaggggtattttagtgacgcctggaacacgtttgactccctcatcgtaatcggcagcattatagacgtggccctcagcgaagcagacccaactgaaagtgaaaatgtccctgtcccaactgctacacctgggaactctgaagagagcaatagaatctccatcacctttttccgtcttttccgagtgatgcgattggtgaagcttctcagcaggggggaaggcatccggacattgctgtggacttttattaagtcctttcaggcgctcccgtatgtggccctcctcatagccatgctgttcttcatctatgcggtcattggcatgcagatgtttgggaaagttgccatgagagataacaaccagatcaataggaacaataacttccagacgtttccccaggcggtgctgctgctcttcaggtgtgcaacaggtgaggcctggcaggagatcatgctggcctgtctcccagggaagctctgtgaccctgagtcagattacaaccccggggaggagtatacatgtgggagcaactttgccattgtctatttcatcagtttttacatgctctgtgcatttctgatcatcaatctgtttgtggctgtcatcatggataatttcgactatctgacccgggactggtctattttggggcctcaccatttagatgaattcaaaagaatatggtcagaatatgaccctgaggcaaagggaaggataaaacaccttgatgtggtcactctgcttcgacgcatccagcctcccctggggtttgggaagttatgtccacacagggtagcgtgcaagagattagttgccatgaacatgcctctcaacagtgacgggacagtcatgtttaatgcaaccctgtttgctttggttcgaacggctcttaagatcaagaccgaagggaacctggagcaagctaatgaagaacttcgggctgtgataaagaaaatttggaagaaaaccagcatgaaattacttgaccaagttgtccctccagctggtgatgatgaggtaaccgtggggaagttctatgccactttcctgatacaggactactttaggaaattcaagaaacggaaagaacaaggactggtgggaaagtaccctgcgaagaacaccacaattgccctacaggcgggattaaggacactgcatgacattgggccagaaatccggcgtgctatatcgtgtgatttgcaagatgacgagcctgaggaaacaaaacgagaagaagaagatgatgtgttcaaaagaaatggtgccctgcttggaaaccatgtcaatcatgttaatagtgataggagagattcccttcagcagaccaataccacccaccgtcccctgcatgtccaaaggccttcaattccacctgcaagtgatactgagaaaccgctgtttcctccagcaggaaattcggtgtgtcataaccatcataaccataattccataggaaagcaagttcccacctcaacaaatgccaatctcaataatgccaatatgtccaaagctgcccatggaaagcggcccagcattgggaaccttgagcatgtgtctgaaaatgggcatcattcttcccacaagcatgaccgggagcctcagagaaggtccagtgtgaaaagaacccgctattatgaaacttacattaggtccgactcaggagatgaacagctcccaactatttgccgggaagacccagagatacatggctatttcagggacccccactgcttgggggagcaggagtatttcagtagtgaggaatgctacgaggatgacagctcgcccacctggagcaggcaaaactatggctactacagcagatacccaggcagaaacatcgactctgagaggccccgaggctaccatcatccccaaggattcttggaggacgatgactcgcccgtttgctatgattcacggagatctccaaggagacgcctactacctcccaccccagcatcccaccggagatcctccttcaactttgagtgcctgcgccggcagagcagccaggaagaggtcccgtcgtctcccatcttcccccatcgcacggccctgcctctgcatctaatgcagcaacagatcatggcagttgccggcctagattcaagtaaagcccagaagtactcaccgagtcactcgacccggtcgtgggccacccctccagcaacccctccctaccgggactggacaccgtgctacacccccctgatccaagtggagcagtcagaggccctggaccaggtgaacggcagcctgccgtccctgcaccgcagctcctggtacacagacgagcccgacatctcctaccggactttcacaccagccagcctgactgtccccagcagcttccggaacaaaaacagcgacaagcagaggagtgcggacagcttggtggaggcagtcctgatatccgaaggcttgggacgctatgcaagggacccaaaatttgtgtcagcaacaaaacacgaaatcgctgatgcctgtgacctcaccatcgacgagatggagagtgcagccagcaccctgcttaatgggaacgtgcgtccccgagccaacggggatgtgggccccctctcacaccggcaggactatgagctacaggactttggtcctggctacagcgacgaagagccagaccctgggagggatgaggaggacctggcggatgaaatgatatgcatcaccaccttgtagcccccagcgaggggcagactggctctggcctcaggtggggcgcaggagagccaggggaaaagtgcctcatagttaggaaagtttaggcactagttgggagtaatattcaattaattagacttttgtataagagatgtcatgcctcaagaaagccataaacctggtaggaacaggtcccaagcggttgagcctggcagagtaccatgcgctcggccccagctgcaggaaacagcaggccccgccctctcacagaggatgggtgaggaggccagacctgccctgccccattgtccagatgggcactgctgtggagtctgcttctcccatgtaccagggcaccaggcccacccaactgaaggcatggcggcggggtgcaggggaaagttaaaggtgatgacgatcatcacacctgtgtcgttacctcagccatcggtctagcatatcagtcactgggcccaacatatccatttttaaaccctttcccccaaatacactgcgtcctggttcctgtttagctgttctgaaatacggtgtgtaagtaagtcagaacccagctaccagtgattattgcgagggcaatgggacctcataaataaggttttctgtgatgtgacgccagtttacataagagaatatcac

SEQ ID NO: 46509 - DNA, 6486 bp, Artificial Sequence
  derived and/or modified sequence
atgatgatgatgatgatgatgaagaagatgcagcaccagagacagcagcaggccgaccacgccaacgaggccaactacgccagaggcaccagactgcccctgagcggcgagggccccaccagccagcccaacagcagcaagcagaccgtgctgagctggcaggccgccatcgacgccgccagacaggccaaggccgcccagaccatgagcaccagcgcccccccccccgtgggcagcctgagccagagaaagagacagcagtacgccaagagcaagaagcagggcaacagcagcaacagcagacccgccagagccctgttctgcctgagcctgaacaaccccatcagaagagcctgcatcagcatcgtggagtggaagcccttcgacatcttcatcctgctggccatcttcgccaactgcgtggccctggccatctacatccccttccccgaggacgacagcaacagcaccaaccacaacctggagaaggtggagtacgccttcctgatcatcttcaccgtggagaccttcctgaagatcatcgcctacggcctgctgctgcaccccaacgcctacgtgagaaacggctggaacctgctggacttcgtgatcgtgatcgtgggcctgttcagcgtgatcctggagcagctgaccaaggagaccgagggcggcaaccacagcagcggcaagagcggcggcttcgacgtgaaggccctgagagccttcagagtgctgagacccctgagactggtgagcggcgtgcccagcctgcaggtggtgctgaacagcatcatcaaggccatggtgcccctgctgcacatcgccctgctggtgctgttcgtgatcatcatctacgccatcatcggcctggagctgttcatcggcaagatgcacaagacctgcttcttcgccgacagcgacatcgtggccgaggaggaccccgccccctgcgccttcagcggcaacggcagacagtgcaccgccaacggcaccgagtgcagaagcggctgggtgggccccaacggcggcatcaccaacttcgacaacttcgccttcgccatgctgaccgtgttccagtgcatcaccatggagggctggaccgacgtgctgtactggatgaacgacgccatgggcttcgagctgccctgggtgtacttcgtgagcctggtgatcttcggcagcttcttcgtgctgaacctggtgctgggcgtgctgagcggcgagttcagcaaggagagagagaaggccaaggccagaggcgacttccagaagctgagagagaagcagcagctggaggaggacctgaagggctacctggactggatcacccaggccgaggacatcgaccccgagaacgaggaggagggcggcgaggagggcaagagaaacaccagcatgcccaccagcgagaccgagagcgtgaacaccgagaacgtgagcggcgagggcgagaacagaggctgctgcggcagcctgtgccaggccatcagcaagagcaagctgagcagaagatggagaagatggaacagattcaacagaagaagatgcagagccgccgtgaagagcgtgaccttctactggctggtgatcgtgctggtgttcctgaacaccctgaccatcagcagcgagcactacaaccagcccgactggctgacccagatccaggacatcgccaacaaggtgctgctggccctgttcacctgcgagatgctggtgaagatgtacagcctgggcctgcaggcctacttcgtgagcctgttcaacagattcgactgcttcgtggtgtgcggcggcatcaccgagaccatcctggtggagctggagatcatgagccccctgggcatcagcgtgttcagatgcgtgagactgctgagaatcttcaaggtgaccagacactggaccagcctgagcaacctggtggccagcctgctgaacagcatgaagagcatcgccagcctgctgctgctgctgttcctgttcatcatcatcttcagcctgctgggcatgcagctgttcggcggcaagttcaacttcgacgagacccagaccaagagaagcaccttcgacaacttcccccaggccctgctgaccgtgttccagatcctgaccggcgaggactggaacgccgtgatgtacgacggcatcatggcctacggcggccccagcagcagcggcatgatcgtgtgcatctacttcatcatcctgttcatctgcggcaactacatcctgctgaacgtgttcctggccatcgccgtggacaacctggccgacgccgagagcctgaacaccgcccagaaggaggaggccgaggagaaggagagaaagaagatcgccagaaaggagagcctggagaacaagaagaacaacaagcccgaggtgaaccagatcgccaacagcgacaacaaggtgaccatcgacgactacagagaggaggacgaggacaaggacccctaccccccctgcgacgtgcccgtgggcgaggaggaggaggaggaggaggaggacgagcccgaggtgcccgccggccccagacccagaagaatcagcgagctgaacatgaaggagaagatcgcccccatccccgagggcagcgccttcttcatcctgagcaagaccaaccccatcagagtgggctgccacaagctgatcaaccaccacatcttcaccaacctgatcctggtgttcatcatgctgagcagcgccgccctggccgccgaggaccccatcagaagccacagcttcagaaacaccatcctgggctacttcgactacgccttcaccgccatcttcaccgtggagatcctgctgaagatgaccaccttcggcgccttcctgcacaagggcgccttctgcagaaactacttcaacctgctggacatgctggtggtgggcgtgagcctggtgagcttcggcatccagagcagcgccatcagcgtggtgaagatcctgagagtgctgagagtgctgagacccctgagagccatcaacagagccaagggcctgaagcacgtggtgcagtgcgtgttcgtggccatcagaaccatcggcaacatcatgatcgtgaccaccctgctgcagttcatgttcgcctgcatcggcgtgcagctgttcaagggcaagttctacagatgcaccgacgaggccaagagcaaccccgaggagtgcagaggcctgttcatcctgtacaaggacggcgacgtggacagccccgtggtgagagagagaatctggcagaacagcgacttcaacttcgacaacgtgctgagcgccatgatggccctgttcaccgtgagcaccttcgagggctggcccgccctgctgtacaaggccatcgacagcaacggcgagaacatcggccccatctacaaccacagagtggagatcagcatcttcttcatcatctacatcatcatcgtggccttcttcatgatgaacatcttcgtgggcttcgtgatcgtgaccttccaggagcagggcgagaaggagtacaagaactgcgagctggacaagaaccagagacagtgcgtggagtacgccctgaaggccagacccctgagaagatacatccccaagaacccctaccagtacaagttctggtacgtggtgaacagcagccccttcgagtacatgatgttcgtgctgatcatgctgaacaccctgtgcctggccatgcagcactacgagcagagcaagatgttcaacgacgccatggacatcctgaacatggtgttcaccggcgtgttcaccgtggagatggtgctgaaggtgatcgccttcaagcccaagggctacttcagcgacgcctggaacaccttcgacagcctgatcgtgatcggcagcatcatcgacgtggccctgagcgaggccgaccccaccgagagcgagaacgtgcccgtgcccaccgccacccccggcaacagcgaggagagcaacagaatcagcatcaccttcttcagactgttcagagtgatgagactggtgaagctgctgagcagaggcgagggcatcagaaccctgctgtggaccttcatcaagagcttccaggccctgccctacgtggccctgctgatcgccatgctgttcttcatctacgccgtgatcggcatgcagatgttcggcaaggtggccatgagagacaacaaccagatcaacagaaacaacaacttccagaccttcccccaggccgtgctgctgctgttcagatgcgccaccggcgaggcctggcaggagatcatgctggcctgcctgcccggcaagctgtgcgaccccgagagcgactacaaccccggcgaggagtacacctgcggcagcaacttcgccatcgtgtacttcatcagcttctacatgctgtgcgccttcctgatcatcaacctgttcgtggccgtgatcatggacaacttcgactacctgaccagagactggagcatcctgggcccccaccacctggacgagttcaagagaatctggagcgagtacgaccccgaggccaagggcagaatcaagcacctggacgtggtgaccctgctgagaagaatccagccccccctgggcttcggcaagctgtgcccccacagagtggcctgcaagagactggtggccatgaacatgcccctgaacagcgacggcaccgtgatgttcaacgccaccctgttcgccctggtgagaaccgccctgaagatcaagaccgagggcaacctggagcaggccaacgaggagctgagagccgtgatcaagaagatctggaagaagaccagcatgaagctgctggaccaggtggtgccccccgccggcgacgacgaggtgaccgtgggcaagttctacgccaccttcctgatccaggactacttcagaaagttcaagaagagaaaggagcagggcctggtgggcaagtaccccgccaagaacaccaccatcgccctgcaggccggcctgagaaccctgcacgacatcggccccgagatcagaagagccatcagctgcgacctgcaggacgacgagcccgaggagaccaagagagaggaggaggacgacgtgttcaagagaaacggcgccctgctgggcaaccacgtgaaccacgtgaacagcgacagaagagacagcctgcagcagaccaacaccacccacagacccctgcacgtgcagagacccagcatcccccccgccagcgacaccgagaagcccctgttcccccccgccggcaacagcgtgtgccacaaccaccacaaccacaacagcatcggcaagcaggtgcccaccagcaccaacgccaacctgaacaacgccaacatgagcaaggccgcccacggcaagagacccagcatcggcaacctggagcacgtgagcgagaacggccaccacagcagccacaagcacgacagagagccccagagaagaagcagcgtgaagagaaccagatactacgagacctacatcagaagcgacagcggcgacgagcagctgcccaccatctgcagagaggaccccgagatccacggctacttcagagacccccactgcctgggcgagcaggagtacttcagcagcgaggagtgctacgaggacgacagcagccccacctggagcagacagaactacggctactacagcagataccccggcagaaacatcgacagcgagagacccagaggctaccaccacccccagggcttcctggaggacgacgacagccccgtgtgctacgacagcagaagaagccccagaagaagactgctgccccccacccccgccagccacagaagaagcagcttcaacttcgagtgcctgagaagacagagcagccaggaggaggtgcccagcagccccatcttcccccacagaaccgccctgcccctgcacctgatgcagcagcagatcatggccgtggccggcctggacagcagcaaggcccagaagtacagccccagccacagcaccagaagctgggccaccccccccgccacccccccctacagagactggaccccctgctacacccccctgatccaggtggagcagagcgaggccctggaccaggtgaacggcagcctgcccagcctgcacagaagcagctggtacaccgacgagcccgacatcagctacagaaccttcacccccgccagcctgaccgtgcccagcagcttcagaaacaagaacagcgacaagcagagaagcgccgacagcctggtggaggccgtgctgatcagcgagggcctgggcagatacgccagagaccccaagttcgtgagcgccaccaagcacgagatcgccgacgcctgcgacctgaccatcgacgagatggagagcgccgccagcaccctgctgaacggcaacgtgagacccagagccaacggcgacgtgggccccctgagccacagacaggactacgagctgcaggacttcggccccggctacagcgacgaggagcccgaccccggcagagacgaggaggacctggccgacgagatgatctgcatcaccaccctgtag

SEQ ID NO: 46510 - protein, 369 aa, Artificial Sequence
  derived and/or modified sequence
MNKNEKHDDKLVMFTNQSEDSERCESMELDKKIQDLIERNASPHPKRFTPEAMPTHRNLCSLKTPGKTASMAHFVQGTSRMIAAESSTEHKECAEPSTRKNLMNSLEQKIRCLEKQRKELLEVNQQWDQQFRSMKELYERKVAELKTKLDAAERFLSTREKDPHQRQRKDDRQREDDRQRDLTRDRLQREEKEKERLNEELHELKEENKLLKGKNTLANKEKEHYECEIKRLNKALQDALNIKCSFSEDCLRKSRVEFCHEEMRTEMEVLKQQVQIYEEDFKKERSDRERLNQEKEELQQINETSQSQLNRLNSQIKACQMEKEKLEKQLKQMYCPPCNCGLVFHLQDPWVPTGPGAVQKQREHPVYPQ

SEQ ID NO: 46511 - DNA, 1110 bp, Artificial Sequence
  derived and/or modified sequence
atgaacaagaacgagaagcacgacgacaagctggtgatgttcaccaaccagagcgaggacagcgagagatgcgagagcatggagctggacaagaagatccaggacctgatcgagagaaacgccagcccccaccccaagagattcacccccgaggccatgcccacccacagaaacctgtgcagcctgaagacccccggcaagaccgccagcatggcccacttcgtgcagggcaccagcagaatgatcgccgccgagagcagcaccgagcacaaggagtgcgccgagcccagcaccagaaagaacctgatgaacagcctggagcagaagatcagatgcctggagaagcagagaaaggagctgctggaggtgaaccagcagtgggaccagcagttcagaagcatgaaggagctgtacgagagaaaggtggccgagctgaagaccaagctggacgccgccgagagattcctgagcaccagagagaaggacccccaccagagacagagaaaggacgacagacagagagaggacgacagacagagagacctgaccagagacagactgcagagagaggagaaggagaaggagagactgaacgaggagctgcacgagctgaaggaggagaacaagctgctgaagggcaagaacaccctggccaacaaggagaaggagcactacgagtgcgagatcaagagactgaacaaggccctgcaggacgccctgaacatcaagtgcagcttcagcgaggactgcctgagaaagagcagagtggagttctgccacgaggagatgagaaccgagatggaggtgctgaagcagcaggtgcagatctacgaggaggacttcaagaaggagagaagcgacagagagagactgaaccaggagaaggaggagctgcagcagatcaacgagaccagccagagccagctgaacagactgaacagccagatcaaggcctgccagatggagaaggagaagctggagaagcagctgaagcagatgtactgccccccctgcaactgcggcctggtgttccacctgcaggacccctgggtgcccaccggccccggcgccgtgcagaagcagagagagcaccccgtgtacccccagtag

SEQ ID NO: 46512 - DNA, 1110 bp, Artificial Sequence
  derived and/or modified sequence
atgaataagaacgagaaacacgacgataaactcgttatgttcactaatcaaagcgaggactctgagagatgcgaatcgatggagctggacaaaaaaatacaggatctgatcgaacgcaacgcttccccccaccctaaacggtttacccctgaggctatgcccacccaccgcaacttatgcagcctcaaaacacctggcaagacggcatcaatggcccattttgtgcaaggcacctcacgcatgattgctgcagagagcagcactgaacataaagagtgcgctgagccaagcactcggaaaaacctgatgaacagcttggagcagaagattaggtgcctggaaaagcaaaggaaagaactgctggaggtgaaccagcagtgggaccagcagttcagatccatgaaggagctgtatgaacgtaaagtggcagaactgaagaccaagctcgatgcagccgagcgctttctctccactcgcgaaaaggaccctcaccaaaggcaacgcaaagacgacagacaaagagaagatgaccggcaacgcgaccttaccagggacagattgcaaagagaagaaaaggagaaagaaaggctcaatgaggagctgcatgagcttaaagaggagaacaagcttcttaaagggaaaaatacacttgccaacaaagagaaagagcattacgagtgcgagatcaagcgcctgaacaaggcccttcaggatgccttgaatatcaagtgttctttctccgaggactgcctccgtaagtctcgggtggagttttgccacgaagagatgcgaaccgagatggaagttttgaaacagcaggtgcagatttacgaggaggacttcaagaaagagaggtctgaccgagaaaggcttaaccaggagaaggaggaacttcagcagatcaacgagacctctcagagccagttgaaccgcctgaattcgcagattaaggcgtgtcagatggagaaggaaaagctggagaagcaacttaagcagatgtattgcccaccctgtaactgtggacttgtgttccatctccaggacccctgggtgccaaccggccccggcgccgtacagaaacagcgagaacaccccgtgtacccacagtag

SEQ ID NO: 46513 - DNA, 1110 bp, Artificial Sequence
  derived and/or modified sequence
atgaacaagaatgagaagcatgatgacaagctggtgatgttcaccaaccagagtgaagattctgagcgctgtgagagcatggagctggacaagaagatccaggacctgattgaaagaaatgccagcccccaccccaagcgcttcaccccagaggccatgcccacccacaggaacctgtgcagcctgaagaccccaggcaagacagcctccatggcccactttgtgcagggcaccagcaggatgattgctgctgagagcagcacagagcacaaggaatgtgccgagcccagcaccaggaagaacctgatgaacagcctggagcagaagatccgctgcctggagaagcagaggaaggagctgctggaggtgaaccagcagtgggaccagcagttccgctccatgaaggagctgtatgaaaggaaggtggccgagctgaagaccaagctggatgctgctgagcgcttcctgagcacccgggagaaggacccccaccagaggcagaggaaggatgaccggcagagagaagatgaccggcagagggacctgacccgggaccggctgcagcgggaggagaaggagaaggagcggctgaatgaggagctgcacgagctgaaggaggagaacaagctgctgaagggcaagaacaccctggccaacaaggagaaggagcactatgaatgtgagatcaagaggctgaacaaggccctgcaggatgccctgaacatcaagtgcagcttcagcgaggactgcctgaggaagagccgggtggagttctgccacgaggagatgaggacagagatggaggtgctgaagcagcaggtgcagatctatgaggaggacttcaagaaggagaggagtgaccgggagcggctgaaccaggagaaggaggagctgcagcagatcaatgagaccagccagagccagctgaaccggctgaacagccagatcaaggcctgccagatggagaaggagaagctggagaagcagctgaagcagatgtactgccccccctgcaactgtggcctggtgttccacctgcaggacccctgggtgcccactggacctggagctgtgcagaagcagcgggagcaccctgtgtacccccagtag

SEQ ID NO: 46514 - DNA, 1110 bp, Artificial Sequence
  derived and/or modified sequence
atgaacaagaacgagaagcacgacgacaagctggtgatgttcaccaaccagagcgaggattctgaaagatgcgaaagcatggaactggacaaaaagatacaggacctcattgagagaaacgcttctccccatcccaagcgcttcacccccgaagctatgccaactcatcgtaacctgtgctctctcaagactcccggcaaaactgcttcaatggctcatttcgtccagggtacctcccgcatgattgcggccgagtcttcaaccgaacataaggagtgtgcggagccctcaacccggaaaaacttaatgaactctcttgaacagaagatcagatgtctagaaaagcagcggaaagagttattggaggtgaaccaacaatgggatcagcaattcaggtccatgaaagagctgtatgagcggaaggttgccgagctgaaaaccaaactcgacgccgccgaacgcttcctcagtactagggaaaaagacccgcatcaacggcagagaaaggacgatcgccagcgcgaggacgataggcagagggatctcacacgtgaccgtttgcagagagaggagaaagaaaaggagcgcctgaatgaagagctgcacgagctcaaagaagagaataagttgcttaagggcaagaacaccttggcaaacaaggaaaaagagcactatgagtgtgagataaagaggttgaataaagctctgcaggacgcccttaacatcaaatgtagcttcagtgaggactgtcttaggaaatctcgggttgaattctgccacgaagagatgcgtactgagatggaggtgctaaagcaacaggtccagatatatgaggaggatttcaagaaggagaggtctgacagggaacggttgaaccaggagaaggaggagctccagcagattaacgagaccagccagagccaattgaatcggttaaactcacagattaaggcatgtcagatggaaaaggaaaagcttgagaaacaattaaagcaaatgtactgccctccatgtaactgcggtcttgtgtttcacctacaggacccctgggtgcctaccgggccaggcgctgtgcagaagcagcgggaacatccggtgtacccccagtag

SEQ ID NO: 46515 - DNA, 1110 bp, Artificial Sequence
  derived and/or modified sequence
atgaacaagaacgagaagcatgacgacaaactcgtaatgttcacaaatcaatcggaagacagcgagcgatgtgagtccatggagctcgataaaaagatccaggaccttatcgaacgaaacgccagtcctcaccccaaacgctttacgccagaagccatgccaacacatcggaacctttgcagcttgaaaacacctggcaaaacagcgtctatggcacacttcgtccagggcactagcagaatgattgcagccgagtcctcaaccgagcacaaagaatgcgccgaaccatcaactaggaagaatctcatgaactcattagagcaaaaaatcagatgtttggagaagcagcgcaaagagctccttgaagtgaaccagcagtgggaccaacagtttcgctctatgaaggagttgtacgagagaaaagtcgccgagctgaagacaaagctggacgccgctgagagattcctttccacaagggaaaaggaccctcatcagcgccagcggaaggacgaccggcagagagaggacgatcggcagagagacttaacaagagatagactgcaacgcgaggagaaggagaaagagcggcttaatgaggaattacacgagctgaaggaggagaacaagctcctgaagggtaagaacacgttggccaacaaggagaaggagcattatgagtgtgaaatcaagaggctgaataaagcactgcaagacgcactgaatatcaagtgctctttctcggaagattgtctgcgcaaaagcagggtcgaattctgccacgaggagatgcgcacagagatggaggtcctcaaacagcaggttcagatctacgaagaggacttcaagaaggaaagaagcgaccgcgagaggttgaatcaagagaaagaggagctgcaacagataaacgagacatcacaaagtcagcttaaccgcttaaatagtcaaatcaaggcctgccagatggaaaaagagaagctagagaaacaactgaaacagatgtactgtcctccatgtaactgcggcctggtttttcatctccaggatccttgggtcccaaccggtcccggagccgtccagaagcagcgggagcacccagtgtatccccagtag

SEQ ID NO: 46516 - protein, 1647 aa, Artificial Sequence
  derived and/or modified sequence
MSTPDPPLGGTPRPGPSPGPGPSPGAMLGPSPGPSPGSAHSMMGPSPGPPSAGHPIPTQGPGGYPQDNMHQMHKPMESMHEKGMSDDPRYNQMKGMGMRSGGHAGMGPPPSPMDQHSQGYPSPLGGSEHASSPVPASGPSSGPQMSSGPGGAPLDGADPQALGQQNRGPTPFNQNQLHQLRAQIMAYKMLARGQPLPDHLQMAVQGKRPMPGMQQQMPTLPPPSVSATGPGPGPGPGPGPGPGPAPPNYSRPHGMGGPNMPPPGPSGVPPGMPGQPPGGPPKPWPEGPMANAAAPTSTPQKLIPPQPTGRPSPAPPAVPPAASPVMPPQTQSPGQPAQPAPMVPLHQKQSRITPIQKPRGLDPVEILQEREYRLQARIAHRIQELENLPGSLAGDLRTKATIELKALRLLNFQRQLRQEVVVCMRRDTALETALNAKAYKRSKRQSLREARITEKLEKQQKIEQERKRRQKHQEYLNSILQHAKDFKEYHRSVTGKIQKLTKAVATYHANTEREQKKENERIEKERMRRLMAEDEEGYRKLIDQKKDKRLAYLLQQTDEYVANLTELVRQHKAAQVAKEKKKKKKKKKAENAEGQTPAIGPDGEPLDETSQMSDLPVKVIHVESGKILTGTDAPKAGQLEAWLEMNPGYEVAPRSDSEESGSEEEEEEEEEEQPQAAQPPTLPVEEKKKIPDPDSDDVSEVDARHIIENAKQDVDDEYGVSQALARGLQSYYAVAHAVTERVDKQSALMVNGVLKQYQIKGLEWLVSLYNNNLNGILADEMGLGKTIQTIALITYLMEHKRINGPFLIIVPLSTLSNWAYEFDKWAPSVVKVSYKGSPAARRAFVPQLRSGKFNVLLTTYEYIIKDKHILAKIRWKYMIVDEGHRMKNHHCKLTQVLNTHYVAPRRLLLTGTPLQNKLPELWALLNFLLPTIFKSCSTFEQWFNAPFAMTGEKVDLNEEETILIIRRLHKVLRPFLLRRLKKEVEAQLPEKVEYVIKCDMSALQRVLYRHMQAKGVLLTDGSEKDKKGKGGTKTLMNTIMQLRKICNHPYMFQHIEESFSEHLGFTGGIVQGLDLYRASGKFELLDRILPKLRATNHKVLLFCQMTSLMTIMEDYFAYRGFKYLRLDGTTKAEDRGMLLKTFNEPGSEYFIFLLSTRAGGLGLNLQSADTVIIFDSDWNPHQDLQAQDRAHRIGQQNEVRVLRLCTVNSVEEKILAAAKYKLNVDQKVIQAGMFDQKSSSHERRAFLQAILEHEEQDESRHCSTGSGSASFAHTAPPPAGVNPDLEEPPLKEEDEVPDDETVNQMIARHEEEFDLFMRMDLDRRREEARNPKRKPRLMEEDELPSWIIKDDAEVERLTCEEEEEKMFGRGSRHRKEVDYSDSLTEKQWLKAIEEGTLEEIEEEVRQKKSSRKRKRDSDAGSSTPTTSTRSRDKDDESKKQKKRGRPPAEKLSPNPPNLTKKMKKIVDAVIKYKDSSSGRQLSEVFIQLPSRKELPEYYELIRKPVDFKKIKERIRNHKYRSLNDLEKDVMLLCQNAQTFNLEGSLIYEDSIVLQSVFTSVRQKIEKEDDSEGEESEEEEEGEEEGSESESRSVKVKIKLGRKEKAQDRLKGGRRRPSRGSRAKPVVSDDDSEEEQEEDRSGSGSEED

SEQ ID NO: 46517 - DNA, 5703 bp, Artificial Sequence
  derived and/or modified sequence
ggagaggccgccgcggtgctgagggggaggggagccggcgagcgcgcgcgcagcgggggcgcgggtggcgcgcgtgtgtgtgaagggggggcggtggccgaggcgggcgggcgcgcgcgcgaggcttcccctcgtttggcggcggcggcggcttctttgtttcgtgaagagaagcgagacgcccattctgcccccggccccgcgcggaggggcgggggaggcgccgggaagtcgacggcgccggcggctcctgcaggaggccactgtctgcagctcccgtgaagatgtccactccagacccacccctgggcggaactcctcggccaggtccttccccgggccctggcccttcccctggagccatgctgggccctagcccgggtccctcgccgggctccgcccacagcatgatggggcccagcccagggccgccctcagcaggacaccccatccccacccaggggcctggagggtaccctcaggacaacatgcaccagatgcacaagcccatggagtccatgcatgagaagggcatgtcggacgacccgcgctacaaccagatgaaaggaatggggatgcggtcagggggccatgctgggatggggcccccgcccagccccatggaccagcactcccaaggttacccctcgcccctgggtggctctgagcatgcctctagtccagttccagccagtggcccgtcttcggggccccagatgtcttccgggccaggaggtgccccgctggatggtgctgacccccaggccttggggcagcagaaccggggcccaaccccatttaaccagaaccagctgcaccagctcagagctcagatcatggcctacaagatgctggccagggggcagcccctccccgaccacctgcagatggcggtgcagggcaagcggccgatgcccgggatgcagcagcagatgccaacgctacctccaccctcggtgtccgcaacaggacccggccctggccctggccctggccccggcccgggtcccggcccggcacctccaaattacagcaggcctcatggtatgggagggcccaacatgcctcccccaggaccctcgggcgtgccccccgggatgccaggccagcctcctggagggcctcccaagccctggcctgaaggacccatggcgaatgctgctgcccccacgagcacccctcagaagctgattcccccgcagccaacgggccgcccttcccccgcgccccctgccgtcccacccgccgcctcgcccgtgatgccaccgcagacccagtcccccgggcagccggcccagcccgcgcccatggtgccactgcaccagaagcagagccgcatcacccccatccagaagccgcggggcctcgaccctgtggagatcctgcaggagcgcgagtacaggctgcaggctcgcatcgcacaccgaattcaggaacttgaaaaccttcccgggtccctggccggggatttgcgaaccaaagcgaccattgagctcaaggccctcaggctgctgaacttccagaggcagctgcgccaggaggtggtggtgtgcatgcggagggacacagcgctggagacagccctcaatgctaaggcctacaagcgcagcaagcgccagtccctgcgcgaggcccgcatcactgagaagctggagaagcagcagaagatcgagcaggagcgcaagcgccggcagaagcaccaggaatacctcaatagcattctccagcatgccaaggatttcaaggaatatcacagatccgtcacaggcaaaatccagaagctgaccaaggcagtggccacgtaccatgccaacacggagcgggagcagaagaaagagaacgagcggatcgagaaggagcgcatgcggaggctcatggctgaagatgaggaggggtaccgcaagctcatcgaccagaagaaggacaagcgcctggcctacctcttgcagcagacagacgagtacgtggctaacctcacggagctggtgcggcagcacaaggctgcccaggtcgccaaggagaaaaagaagaaaaagaaaaagaagaaggcagaaaatgcagaaggacagacgcctgccattgggccggatggcgagcctctggacgagaccagccagatgagcgacctcccggtgaaggtgatccacgtggagagtgggaagatcctcacaggcacagatgcccccaaagccgggcagctggaggcctggctcgagatgaacccggggtatgaagtagctccgaggtctgatagtgaagaaagtggctcagaagaagaggaagaggaggaggaggaagagcagccgcaggcagcacagcctcccaccctgcccgtggaggagaagaagaagattccagatccagacagcgatgacgtctctgaggtggacgcgcggcacatcattgagaatgccaagcaagatgtcgatgatgaatatggcgtgtcccaggcccttgcacgtggcctgcagtcctactatgccgtggcccatgctgtcactgagagagtggacaagcagtcagcgcttatggtcaatggtgtcctcaaacagtaccagatcaaaggtttggagtggctggtgtccctgtacaacaacaacctgaacggcatcctggccgacgagatgggcctggggaagaccatccagaccatcgcgctcatcacgtacctcatggagcacaaacgcatcaatgggcccttcctcatcatcgtgcctctctcaacgctgtccaactgggcgtacgagtttgacaagtgggccccctccgtggtgaaggtgtcttacaagggatccccagcagcaagacgggcctttgtcccccagctccggagtgggaagttcaacgtcttgctgacgacgtacgagtacatcatcaaagacaagcacatcctcgccaagatccgttggaagtacatgattgtggacgaaggtcaccgcatgaagaaccaccactgcaagctgacgcaggtgctcaacacgcactatgtggcaccccgccgcctgctgctgacgggcacaccgctgcagaacaagcttcccgagctctgggcgctgctcaacttcctgctgcccaccatcttcaagagctgcagcaccttcgagcagtggtttaacgcaccctttgccatgaccggggaaaaggtggacctgaatgaggaggaaaccattctcatcatccggcgtctccacaaagtgctgcggcccttcttgctccgacgactcaagaaggaagtcgaggcccagttgcccgaaaaggtggagtacgtcatcaagtgcgacatgtctgcgctgcagcgagtgctctaccgccacatgcaggccaagggcgtgctgctgactgatggctccgagaaggacaagaagggcaaaggcggcaccaagaccctgatgaacaccatcatgcagctgcggaagatctgcaaccacccctacatgttccagcacatcgaggagtccttttccgagcacttggggttcactggcggcattgtccaagggctggacctgtaccgagcctcgggtaaatttgagcttcttgatagaattcttcccaaactccgagcaaccaaccacaaagtgctgctgttctgccaaatgacctccctcatgaccatcatggaagattactttgcgtatcgcggctttaaatacctcaggcttgatggaaccacgaaggcggaggaccggggcatgctgctgaaaaccttcaacgagcccggctctgagtacttcatcttcctgctcagcacccgggctggggggctcggcctgaacctccagtcggcagacactgtgatcatttttgacagcgactggaatcctcaccaggacctgcaagcgcaggaccgagcccaccgcatcgggcagcagaacgaggtgcgtgtgctccgcctctgcaccgtcaacagcgtggaggagaagatcctagctgcagccaagtacaagctcaacgtggaccagaaggtgatccaggccggcatgttcgaccagaagtcctccagccatgagcggcgcgccttcctgcaggccatcctggagcacgaggagcaggatgagagcagacactgcagcacgggcagcggcagtgccagcttcgcccacactgcccctccgccagcgggcgtcaaccccgacttggaggagccacctctaaaggaggaagacgaggtgcccgacgacgagaccgtcaaccagatgatcgcccggcacgaggaggagtttgatctgttcatgcgcatggacctggaccgcaggcgcgaggaggcccgcaaccccaagcggaagccgcgcctcatggaggaggacgagctcccctcgtggatcatcaaggacgacgcggaggtggagcggctgacctgtgaggaggaggaggagaagatgttcggccgtggctcccgccaccgcaaggaggtggactacagcgactcactgacggagaagcagtggctcaaggccatcgaggagggcacgctggaggagatcgaagaggaggtccggcagaagaaatcatcacggaagcgcaagcgagacagcgacgccggctcctccaccccgaccaccagcacccgcagccgcgacaaggacgacgagagcaagaagcagaagaagcgcgggcggccgcctgccgagaaactctcccctaacccacccaacctcaccaagaagatgaagaagattgtggatgccgtgatcaagtacaaggacagcagcagtggacgtcagctcagcgaggtcttcatccagctgccctcgcgaaaggagctgcccgagtactacgagctcatccgcaagcccgtggacttcaagaagataaaggagcgcattcgcaaccacaagtaccgcagcctcaacgacctagagaaggacgtcatgctcctgtgccagaacgcacagaccttcaacctggagggctccctgatctatgaagactccatcgtcttgcagtcggtcttcaccagcgtgcggcagaaaatcgagaaggaggatgacagtgaaggcgaggagagtgaggaggaggaagagggcgaggaggaaggctccgaatccgaatctcggtccgtcaaagtgaagatcaagcttggccggaaggagaaggcacaggaccggctgaagggcggccggcggcggccgagccgagggtcccgagccaagccggtcgtgagtgacgatgacagtgaggaggaacaagaggaggaccgctcaggaagtggcagcgaagaagactgagccccgacattccagtctcgaccccgagcccctcgttccagagctgagatggcataggccttagcagtaacgggtagcagcagatgtagtttcagacttggagtaaaactgtataaacaaaagaatcttccatatttatacagcagagaagctgtaggactgtttgtgactggccctgtcctggcatcagtagcatctgtaacagcattaactgtcttaaagagagagagagagaattccgaattggggaacacacgatacctgtttttcttttccgttgctggcagtactgttgcgccgcagtttggagtcactgtagttaagtgtggatgcatgtgcgtcaccgtccactcctcctactgtattttattggacaggtcagactcgccgggggcccggcgagggtatgtcagtgtcactggatgtcaaacagtaataaattaaaccaacaacaaaacgcacagccaaaaaaaaa

SEQ ID NO: 46518 - DNA, 4944 bp, Artificial Sequence
  derived and/or modified sequence
atgagcacccccgacccccccctgggcggcacccccagacccggccccagccccggccccggccccagccccggcgccatgctgggccccagccccggccccagccccggcagcgcccacagcatgatgggccccagccccggcccccccagcgccggccaccccatccccacccagggccccggcggctacccccaggacaacatgcaccagatgcacaagcccatggagagcatgcacgagaagggcatgagcgacgaccccagatacaaccagatgaagggcatgggcatgagaagcggcggccacgccggcatgggccccccccccagccccatggaccagcacagccagggctaccccagccccctgggcggcagcgagcacgccagcagccccgtgcccgccagcggccccagcagcggcccccagatgagcagcggccccggcggcgcccccctggacggcgccgacccccaggccctgggccagcagaacagaggccccacccccttcaaccagaaccagctgcaccagctgagagcccagatcatggcctacaagatgctggccagaggccagcccctgcccgaccacctgcagatggccgtgcagggcaagagacccatgcccggcatgcagcagcagatgcccaccctgcccccccccagcgtgagcgccaccggccccggccccggccccggccccggccccggccccggccccggccccgccccccccaactacagcagaccccacggcatgggcggccccaacatgcccccccccggccccagcggcgtgccccccggcatgcccggccagccccccggcggcccccccaagccctggcccgagggccccatggccaacgccgccgcccccaccagcaccccccagaagctgatccccccccagcccaccggcagacccagccccgccccccccgccgtgccccccgccgccagccccgtgatgcccccccagacccagagccccggccagcccgcccagcccgcccccatggtgcccctgcaccagaagcagagcagaatcacccccatccagaagcccagaggcctggaccccgtggagatcctgcaggagagagagtacagactgcaggccagaatcgcccacagaatccaggagctggagaacctgcccggcagcctggccggcgacctgagaaccaaggccaccatcgagctgaaggccctgagactgctgaacttccagagacagctgagacaggaggtggtggtgtgcatgagaagagacaccgccctggagaccgccctgaacgccaaggcctacaagagaagcaagagacagagcctgagagaggccagaatcaccgagaagctggagaagcagcagaagatcgagcaggagagaaagagaagacagaagcaccaggagtacctgaacagcatcctgcagcacgccaaggacttcaaggagtaccacagaagcgtgaccggcaagatccagaagctgaccaaggccgtggccacctaccacgccaacaccgagagagagcagaagaaggagaacgagagaatcgagaaggagagaatgagaagactgatggccgaggacgaggagggctacagaaagctgatcgaccagaagaaggacaagagactggcctacctgctgcagcagaccgacgagtacgtggccaacctgaccgagctggtgagacagcacaaggccgcccaggtggccaaggagaagaagaagaagaagaagaagaagaaggccgagaacgccgagggccagacccccgccatcggccccgacggcgagcccctggacgagaccagccagatgagcgacctgcccgtgaaggtgatccacgtggagagcggcaagatcctgaccggcaccgacgcccccaaggccggccagctggaggcctggctggagatgaaccccggctacgaggtggcccccagaagcgacagcgaggagagcggcagcgaggaggaggaggaggaggaggaggaggagcagccccaggccgcccagccccccaccctgcccgtggaggagaagaagaagatccccgaccccgacagcgacgacgtgagcgaggtggacgccagacacatcatcgagaacgccaagcaggacgtggacgacgagtacggcgtgagccaggccctggccagaggcctgcagagctactacgccgtggcccacgccgtgaccgagagagtggacaagcagagcgccctgatggtgaacggcgtgctgaagcagtaccagatcaagggcctggagtggctggtgagcctgtacaacaacaacctgaacggcatcctggccgacgagatgggcctgggcaagaccatccagaccatcgccctgatcacctacctgatggagcacaagagaatcaacggccccttcctgatcatcgtgcccctgagcaccctgagcaactgggcctacgagttcgacaagtgggcccccagcgtggtgaaggtgagctacaagggcagccccgccgccagaagagccttcgtgccccagctgagaagcggcaagttcaacgtgctgctgaccacctacgagtacatcatcaaggacaagcacatcctggccaagatcagatggaagtacatgatcgtggacgagggccacagaatgaagaaccaccactgcaagctgacccaggtgctgaacacccactacgtggcccccagaagactgctgctgaccggcacccccctgcagaacaagctgcccgagctgtgggccctgctgaacttcctgctgcccaccatcttcaagagctgcagcaccttcgagcagtggttcaacgcccccttcgccatgaccggcgagaaggtggacctgaacgaggaggagaccatcctgatcatcagaagactgcacaaggtgctgagacccttcctgctgagaagactgaagaaggaggtggaggcccagctgcccgagaaggtggagtacgtgatcaagtgcgacatgagcgccctgcagagagtgctgtacagacacatgcaggccaagggcgtgctgctgaccgacggcagcgagaaggacaagaagggcaagggcggcaccaagaccctgatgaacaccatcatgcagctgagaaagatctgcaaccacccctacatgttccagcacatcgaggagagcttcagcgagcacctgggcttcaccggcggcatcgtgcagggcctggacctgtacagagccagcggcaagttcgagctgctggacagaatcctgcccaagctgagagccaccaaccacaaggtgctgctgttctgccagatgaccagcctgatgaccatcatggaggactacttcgcctacagaggcttcaagtacctgagactggacggcaccaccaaggccgaggacagaggcatgctgctgaagaccttcaacgagcccggcagcgagtacttcatcttcctgctgagcaccagagccggcggcctgggcctgaacctgcagagcgccgacaccgtgatcatcttcgacagcgactggaacccccaccaggacctgcaggcccaggacagagcccacagaatcggccagcagaacgaggtgagagtgctgagactgtgcaccgtgaacagcgtggaggagaagatcctggccgccgccaagtacaagctgaacgtggaccagaaggtgatccaggccggcatgttcgaccagaagagcagcagccacgagagaagagccttcctgcaggccatcctggagcacgaggagcaggacgagagcagacactgcagcaccggcagcggcagcgccagcttcgcccacaccgcccccccccccgccggcgtgaaccccgacctggaggagccccccctgaaggaggaggacgaggtgcccgacgacgagaccgtgaaccagatgatcgccagacacgaggaggagttcgacctgttcatgagaatggacctggacagaagaagagaggaggccagaaaccccaagagaaagcccagactgatggaggaggacgagctgcccagctggatcatcaaggacgacgccgaggtggagagactgacctgcgaggaggaggaggagaagatgttcggcagaggcagcagacacagaaaggaggtggactacagcgacagcctgaccgagaagcagtggctgaaggccatcgaggagggcaccctggaggagatcgaggaggaggtgagacagaagaagagcagcagaaagagaaagagagacagcgacgccggcagcagcacccccaccaccagcaccagaagcagagacaaggacgacgagagcaagaagcagaagaagagaggcagaccccccgccgagaagctgagccccaacccccccaacctgaccaagaagatgaagaagatcgtggacgccgtgatcaagtacaaggacagcagcagcggcagacagctgagcgaggtgttcatccagctgcccagcagaaaggagctgcccgagtactacgagctgatcagaaagcccgtggacttcaagaagatcaaggagagaatcagaaaccacaagtacagaagcctgaacgacctggagaaggacgtgatgctgctgtgccagaacgcccagaccttcaacctggagggcagcctgatctacgaggacagcatcgtgctgcagagcgtgttcaccagcgtgagacagaagatcgagaaggaggacgacagcgagggcgaggagagcgaggaggaggaggagggcgaggaggagggcagcgagagcgagagcagaagcgtgaaggtgaagatcaagctgggcagaaaggagaaggcccaggacagactgaagggcggcagaagaagacccagcagaggcagcagagccaagcccgtggtgagcgacgacgacagcgaggaggagcaggaggaggacagaagcggcagcggcagcgaggaggactag

SEQ ID NO: 46519 - DNA, 4944 bp, Artificial Sequence
  derived and/or modified sequence
atgagtacacctgatcccccactgggagggacccccaggccaggtccatctccggggccgggcccctctcccggcgctatgctgggacctagccccggcccatctcctggaagcgcccatagcatgatggggcccagcccggggcctccaagcgctggtcaccctatccctactcaggggcccgggggctacccacaggataacatgcatcaaatgcataaacccatggaaagtatgcatgaaaagggtatgagcgacgatcctcgctacaatcagatgaagggcatgggcatgcggagcggtggccacgcaggaatggggccccctcccagcccaatggatcaacattcccaagggtacccatcccccctgggcggtagcgagcacgctagcagtccagttcccgctagtggacctagctccggacctcagatgagttccggcccggggggagcccctctggatggagcggacccccaggccttgggacagcagaaccgcggcccaacaccatttaatcagaatcagcttcaccagctgagggcccagataatggcctataaaatgctggcacgggggcaaccgctccccgatcatctgcagatggccgtccagggcaaacgccccatgccaggaatgcagcagcagatgccaactcttccacccccgagtgtctccgctaccggcccaggtcccggaccggggccgggacctggacccggacctggccccgcaccccccaactattcaagaccacacggcatgggggggcctaatatgccccccccggggccttctggggtgccccccgggatgccggggcaaccaccaggtggcccgccaaagccgtggccagaggggcccatggctaatgcagcagcccccaccagcacaccccagaagcttatccctccccagccaacaggcaggccctcaccagccccgccagctgtccctccagcggcctccccagtcatgccaccccaaacccagtccccagggcagccagctcagccagcgcctatggtccccctgcaccagaagcagagtagaattacgcccatccagaagccacggggattggaccccgttgagatcctgcaggagcgcgaatacagacttcaagccagaatcgcacaccgtatccaggaactggaaaacctcccaggatcattggcaggtgacttaagaactaaggccacaatagagttgaaagccctgagactcctgaactttcaaaggcagttgcgacaggaagtggtcgtctgcatgcggcgagatactgccctcgaaacagctctgaacgccaaagcatataaaagatcgaaaaggcagagtctgagagaggctcgcataaccgagaagctggaaaagcagcagaaaattgagcaggaacggaaacgtagacagaagcatcaggaatatctgaatagcatcctgcaacatgctaaagactttaaggagtatcacaggagtgtcacgggaaaaatacagaaacttacaaaggcagttgccacctatcatgcaaacaccgagagggagcagaaaaaggagaatgagagaatcgagaaagaacgcatgagacgactgatggcggaagatgaggaagggtaccggaagctgatagaccagaaaaaggacaagaggcttgcctacctgttgcagcaaacagacgagtacgtcgccaacctgacagaactcgtgcgccagcataaggcagcccaggtagctaaggaaaagaagaaaaagaagaaaaagaagaaagcagaaaatgccgaagggcagaccccagccatcggtcccgatggggaacccctggacgagacaagccaaatgtctgacctgcccgtgaaagttattcacgttgagtccggcaaaattctcaccgggaccgatgctcctaaggccggacagttggaggcatggctcgagatgaacccgggttatgaggttgccccaaggtctgactccgaggagtcagggtccgaggaggaggaggaggaagaagaggaggagcagccccaagccgcccagccccccacattgcctgtggaagagaagaagaagataccggatcctgactcagatgatgtgtctgaggtggatgcccgtcacataatagagaatgcgaagcaggatgtggacgacgagtatggcgtttcccaggccctcgccaggggactacagagttattacgccgtggcacacgcagtgacagagcgagttgataaacaatccgctctgatggttaacggagtattgaaacagtatcagatcaaggggctagagtggctagtgtcattgtataacaataacctgaatggcatactggccgatgaaatgggactgggcaaaaccatccagactattgccttgatcacctacttgatggagcacaagaggatcaacggaccatttctcattattgtgcctctcagcactctgagtaattgggcatatgaattcgataaatgggccccatcagtggttaaagtaagctacaaaggttctcccgccgccaggagagcctttgtcccacagcttaggagtggaaagttcaacgtgctgctcactacatacgagtatatcattaaagacaaacacattctggctaagataagatggaagtacatgatcgttgacgaagggcaccggatgaagaatcaccactgcaagctgacccaggtcctgaacacccactacgtcgctcccagacgtctactactcaccggcactccccttcagaataagctgcctgagctgtgggccctacttaactttctccttccgaccatcttcaagtcttgctcgaccttcgagcagtggtttaacgcgcctttcgcaatgaccggagagaaggtggatctcaacgaggaggaaactattctgataattaggcgactgcacaaagtgctgcggccatttttattacgacgactgaaaaaggaagtcgaggcccagcttccggaaaaggtggaatatgtaataaagtgtgatatgtctgcactgcagcgggtactttaccgtcacatgcaggcgaagggggttctacttacagatggatctgaaaaagacaagaagggcaaaggggggacgaaaactttgatgaacaccatcatgcagctcagaaagatctgtaaccatccttacatgttccagcacattgaggaatcattttccgagcaccttgggttcaccgggggcatagtacaggggctggacctctacagagcctcagggaagttcgaattgttggatcgcatcctgcccaagctgcgcgctaccaatcataaagttctgctgttctgtcaaatgacctccctgatgaccatcatggaagattacttcgcatatcggggcttcaagtacttgcggttggacggcaccactaaggccgaggataggggaatgctgctcaagacctttaatgagcctgggtccgagtacttcatcttcttgctctccacacgcgcgggaggccttggactgaacttgcaatcagccgatacagtcatcatttttgacagtgattggaacccccatcaggacctgcaggcacaagacagggcacaccggatcggccagcagaatgaagtgcgtgtgctcagactttgtacagtgaattctgtggaagagaaaattctggcagccgctaagtataagctgaacgtggatcagaaggtgatccaggcaggcatgtttgaccagaaaagtagtagtcatgagcggagagccttcttacaggccatactcgagcacgaggagcaagacgagtcacgccattgcagtactggctccggctcagcgagttttgcccacacagctcccccacctgccggcgttaatcccgacctcgaagagccccccctgaaggaggaggatgaggtgcccgacgatgaaactgtgaaccagatgatagcgaggcatgaggaagaatttgatttatttatgagaatggacctggaccgacggagagaagaagcgagaaaccccaaacggaaacccagactcatggaggaagacgagctgccatcctggatcatcaaggatgatgccgaggtggagcgcctaacatgcgaggaggaagaagaaaagatgttcggtcgaggctcacgacataggaaggaagttgactactctgattcactcactgagaaacagtggctgaaggccatcgaagaaggtactctggaagagattgaggaggaagttaggcagaagaaatcatctcggaagaggaaaagagactcagacgcaggaagctcaacaccgaccactagcacacgctccagagacaaggatgacgagagcaagaagcagaagaagcgggggcgacctccagcagagaagctctccccgaatcccccgaatttgactaaaaagatgaaaaaaatagttgacgcagtgatcaaatacaaggactcctctagcggcagacagttgagtgaggtatttatccaactgccaagtcgcaaggagttgcccgaatactatgagctgatccggaagccagtcgatttcaaaaagatcaaggagcgcattaggaatcataaataccgatcattgaatgatctggagaaggatgtaatgcttctgtgtcagaatgcccagacatttaacctggaaggatctctaatatatgaggacagcattgtcctccaaagcgtattcacgtccgtaagacagaagatcgaaaaggaagacgactccgaaggagaagaatccgaagaagaggaagagggggaggaggagggcagcgagtccgagtccaggtcagtcaaggttaagatcaagctcgggcgtaaagaaaaagcccaggatcgccttaagggtggcagaagaaggccttctcgcgggagtagggcaaagcctgtcgtttccgacgatgatagcgaagaagaacaggaggaggacagatccggatcaggctccgaggaagactag

SEQ ID NO: 46520 - DNA, 4944 bp, Artificial Sequence
  derived and/or modified sequence
atgtcgacccccgatccccccttgggcgggactcctcggccaggtccgtctcctggccccggtccttcccctggagcaatgttggggccgtcacctggaccctcccctggaagcgcgcattcaatgatggggcccagtcccgggccacctagtgctggccaccctatccccactcagggtccaggcggatatccgcaagacaatatgcaccaaatgcataagccaatggaatccatgcatgagaaagggatgtctgacgatccccgttacaatcagatgaaggggatgggtatgaggtcgggcgggcacgcaggcatggggccacctccgtctcccatggaccagcactctcagggttacccatcccccctaggaggatctgaacatgcctccagtcctgtgccagcttctggacccagcagtgggccacaaatgtctagtggccccggaggagcaccgttggatggtgctgacccacaggctctcgggcagcagaataggggccctacaccttttaatcagaaccagctccaccagctacgcgctcagataatggcctataaaatgctggcaagaggacagcccttgccggatcacctacagatggccgtgcagggcaagagaccaatgcccggcatgcagcagcagatgccaaccctaccaccaccgtctgtctcggcaactggacctggtcccggccccgggccagggcccgggcctggtccaggccccgccccccctaactattctcggccccacggcatgggaggacctaacatgcctccccccggacccagcggcgtgccgccaggtatgcctggacagccaccaggcggcccacccaagccttggcccgagggccctatggctaacgccgccgccccaacgtcaaccccccaaaagttaatccccccacagccaactggaaggccgtctccagcaccacctgctgtcccaccggcagcctctcccgtcatgcctccccagactcaaagccctggtcaacccgctcagccggccccaatggtgcctcttcaccagaaacagagcaggatcacgcctatacagaagcccaggggtttagaccctgttgagatcctgcaggagcgggaatatcgcctgcaggccagaatcgctcacaggattcaggagcttgagaaccttccagggagtttggcgggcgatcttcggacaaaggcgaccatcgaactaaaagctctgagactcttaaatttccagagacagctgcggcaggaagtagtggtttgcatgcgcagggacactgcactggagacggccctgaatgccaaggcctataagcgctctaagagacagagcctccgggaggcccgtattactgagaaattggaaaagcaacagaaaatcgaacaggagcggaaacgtaggcagaaacaccaggagtatctgaacagcattttgcaacatgcaaaagacttcaaggaataccatcgatcggttactggcaaaatccaaaagctgaccaaggccgtggccacctaccatgcgaacactgagcgagagcaaaagaaagagaacgaacgcattgagaaggaacgtatgaggcgtctgatggctgaggacgaagaggggtacaggaagctaatagaccagaaaaaagacaagcgcttggcatacctgcttcagcaaacagacgagtacgttgccaacttaaccgaacttgtccgacagcataaagctgcacaggtcgcgaaagagaaaaaaaagaaaaaaaagaagaagaaggcagagaacgccgagggtcaaacaccagccatcggacctgacggagaaccgctggatgaaacatcacagatgtccgatctgccagtgaaggtcatccacgtcgagtccggtaagatcctgacggggacggatgcccccaaggcaggtcagctcgaggcctggctcgagatgaacccaggttacgaggtcgctccccgcagtgactctgaagaatcaggatccgaggaggaggaagaagaggaagaagaggaacagccacaggcagctcagccgcctacactgcctgtagaagagaaaaagaaaatcccagaccccgacagcgatgatgtgtcggaggtcgatgccaggcacatcattgagaatgctaagcaggacgtggatgatgagtatggcgtgagccaagccctcgcccgaggcctccagagttattacgccgttgcacacgccgtaacagagagggtggataagcaaagcgctctaatggtgaacggggtgctaaagcaataccagattaaaggattggagtggctggtatccctttataacaacaaccttaatggaattttagcggatgagatgggcctagggaagactatacagacaatcgctcttataacttacttaatggagcataaaaggattaatggccctttcctgattatcgttccacttagtacattgagtaattgggcttatgagttcgataagtgggcacccagcgtggtgaaagtcagctacaaagggtcacctgcggcccgacgagccttcgttccccaactgaggtccggcaaatttaatgtgctgctgaccacttacgagtacatcatcaaagataagcacattcttgctaaaatccgatggaagtatatgatcgtggacgagggtcaccgaatgaaaaatcatcactgcaaactcacccaggtgttaaatacacattatgtcgcgcctcggcgattgttgttgaccgggaccccactgcagaacaaacttccagaactgtgggcattactgaactttcttcttcctaccatctttaagtcgtgttctacgttcgaacagtggttcaatgcccctttcgctatgacaggggagaaagtggatctaaacgaggaagagactatcctgatcattagacgcttgcacaaggtgctcagaccgtttcttctccgaaggctgaagaaagaggttgaagcacagctccccgagaaagtagagtacgtgataaagtgcgacatgagtgcactgcaaagggttttgtatagacacatgcaggctaagggcgtgctgctgacggacggtagtgaaaaagacaagaaaggcaaagggggcaccaaaactttgatgaatacaattatgcagctgcgaaaaatctgtaatcacccgtacatgttccagcacattgaagaatctttctctgagcacctcggtttcacaggtggaatagtccagggccttgacctctaccgtgcttcgggcaagttcgagttactggacaggatattgcctaaattgagggccaccaaccacaaagtgctcctcttttgccagatgacgagcctcatgactataatggaagactattttgcatatcgagggtttaagtaccttagattggacggcacgacaaaggcagaagaccggggcatgctcctcaaaacctttaacgagcccgggtctgaatactttatctttttgctgagcacacgcgcaggcgggcttggcttgaaccttcagagcgccgacacagtgattatctttgacagtgactggaacccacatcaagatctccaagctcaggatcgcgcccaccgaatcggacaacagaacgaggtgagagttctgcggttgtgcaccgtaaattccgtcgaagagaaaattctagcagccgctaaatataaactcaacgtcgatcagaaggttatacaggcagggatgttcgaccaaaagtctagtagtcacgagcgacgcgcctttctgcaagcgatattggaacatgaagaacaagatgaaagccgtcactgtagcaccggctcagggagcgctagctttgcccatactgcccctccacctgctggtgtaaatccagatctcgaagaacccccactcaaggaagaggacgaagtgcctgacgatgagactgttaaccaaatgattgcccgtcacgaggaagagtttgacttatttatgcgcatggacctggataggagacgcgaagaggcccgtaaccctaaacggaagccccgcttaatggaagaagacgagctgccttcatggatcattaaagacgacgccgaagtcgaaaggctgacctgcgaggaggaagaggaaaaaatgtttggtagggggagtcggcatcggaaggaagtcgactattccgactcactcacggagaaacaatggctaaaagctatcgaagaagggacactagaggaaatcgaagaggaagtccggcagaagaaatccagccggaagaggaagcgagattccgatgcgggtagctcaacccccaccacaagcacgaggagccgtgacaaggacgacgaatccaagaagcagaaaaagaggggtagacctccagccgagaagctgtccccgaaccccccaaacttaactaaaaaaatgaagaaaatcgttgacgccgttataaaatataaggattcatccagcggtagacagctgagcgaggtttttattcagctgccctcgcgcaaggaattgcctgagtactacgaattgatacggaaacctgtggatttcaagaagataaaggagcgcataagaaaccataaatatcgctctctcaacgacctggaaaaagatgtgatgttgctttgccagaatgcgcaaacttttaacctcgagggctctctcatttacgaagacagcatcgttctccagtccgttttcactagcgtgcggcaaaagattgaaaaagaggatgactccgaaggagaggagtcagaggaggaagaagagggggaggaggaaggtagcgaatctgagtccagatcggtaaaagtaaaaatcaaattgggaaggaaagaaaaggcccaggaccggctcaagggcgggaggcgccgacctagccgcggctctagagcaaagccagtagtctcagacgatgattcagaagaagagcaggaagaggatagaagcgggtccggtagcgaagaagactag

SEQ ID NO: 46521 - DNA, 4944 bp, Artificial Sequence
  derived and/or modified sequence
atgagcaccccagacccccccctgggcggcaccccccggcccggccccagccctggccctggccccagccctggggccatgctgggccccagccctggccccagccctggcagcgcccacagcatgatgggccccagccctggccccccatctgctggccaccccatccccacccagggccctgggggctacccccaggacaacatgcaccagatgcacaagcccatggagagcatgcatgagaagggcatgtctgatgacccccgctacaaccagatgaagggcatgggcatgaggtctgggggccacgccggcatgggccccccacccagccccatggaccagcacagccagggctaccccagccccctgggcggcagcgagcacgccagcagccctgtgcctgccagcggccccagcagcggcccccagatgagcagcggccctggaggagcccccctggatggagctgacccccaggccctgggccagcagaacagaggccccacccccttcaaccagaaccagctgcaccagctgcgggcccagatcatggcctacaagatgctggcccggggccagcccctgcctgaccacctgcagatggctgtgcagggcaagaggcccatgcctggcatgcagcagcagatgcccaccctgcccccacccagcgtgtctgccaccggccctggccctggccctggccctggccctggccctggccctggccctgccccacccaactacagccggccccacggcatgggcggccccaacatgcctcctcctggccccagcggcgtgcccccaggcatgcctggccagcccccaggcggcccccccaagccctggccagagggccccatggccaatgctgctgcccccaccagcaccccccagaagctgatccccccccagcccaccggccggcccagccctgcccctcctgctgtgcccccagctgccagccctgtgatgccaccccagacccagagccctggccagcctgcccagcctgcccccatggtgcccctgcaccagaagcagagccgcatcacccccatccagaagccccggggcctggaccctgtggagatcctgcaggagcgggagtaccgcctgcaggcccgcatcgcccaccgcatccaggagctggagaacctgcccggcagcctggccggggacctgcggaccaaggccaccatcgagctgaaggccctgcggctgctgaacttccagaggcagctgcggcaggaggtggtggtgtgcatgagaagagacacagccctggagacagccctgaatgccaaggcctacaagaggagcaagaggcagagcctgcgggaggcccgcatcacagagaagctggagaagcagcagaagattgagcaggagaggaagaggcggcagaagcaccaggagtacctgaacagcatcctgcagcacgccaaggacttcaaggagtaccacaggtctgtgacaggcaagatccagaagctgaccaaggctgtggccacctaccacgccaacacagagcgggagcagaagaaggaaaatgaaagaattgagaaggagaggatgaggcggctgatggctgaagatgaggagggctacaggaagctgattgaccagaagaaggacaagaggctggcctacctgctgcagcagacagatgaatatgtggccaacctgacagagctggtgcggcagcacaaggccgcccaggtggccaaggagaagaagaagaagaagaagaagaagaaggccgagaatgctgagggccagaccccagccatcggcccagatggagagcccctggatgagaccagccagatgtctgacctgcctgtgaaggtgattcatgtggagagcggcaagatcctgactggaacagatgcccccaaggccggccagctggaggcctggctggagatgaaccctggctatgaggtggcccccaggagtgacagcgaggagagcggcagcgaggaggaggaggaggaggaggaggaggagcagccccaggccgcccagccccccaccctgcctgtggaggagaagaagaagatcccagaccctgacagtgatgatgtgtctgaggtggatgcccggcacatcattgaaaatgccaagcaggatgtggatgatgaatatggagtgtcccaggccctggcccggggcctgcagagctactatgctgtggcccatgctgtgacagagcgggtggacaagcagagcgccctgatggtgaatggagtgctgaagcagtaccagatcaagggcctggagtggctggtgtccctgtacaacaacaacctgaatggcatcctggctgatgagatgggcctgggcaagaccatccagaccatcgccctgatcacctacctgatggagcacaagaggatcaatggccccttcctgatcatcgtgcccctgagcaccctgagcaactgggcctatgaatttgacaagtgggcccccagcgtggtgaaggtgtcctacaagggcagccctgctgcccggcgggcctttgtgccccagctgcggagcggcaagttcaacgtgctgctgaccacctatgagtacatcatcaaggacaagcacatcctggccaagatccgctggaagtacatgattgtggatgagggccacaggatgaagaaccaccactgcaagctgacccaggtgctgaacacccactacgtggccccccggcggctgctgctgaccggcacccccctgcagaacaagctgcctgagctgtgggccctgctgaacttcctgctgcccaccatcttcaagagctgcagcacctttgagcagtggttcaatgccccctttgccatgaccggggagaaggtggacctgaatgaggaggagaccatcctgatcatccggcggctgcacaaggtgctgcggcccttcctgctgcggcggctgaagaaggaggtggaggcccagctgcctgagaaggtggagtatgtgatcaagtgtgacatgtctgccctgcagagggtgctgtaccgccacatgcaggccaagggcgtgctgctgacagatggcagcgagaaggacaagaagggcaaaggaggcaccaagaccctgatgaacaccatcatgcagctgaggaagatctgcaaccacccctacatgttccagcacatcgaggagagcttcagcgagcacctgggcttcaccggcggcatcgtgcagggcctggacctgtaccgggccagcggcaagtttgagctgctggaccgcatcctgcccaagctgcgggccaccaaccacaaggtgctgctcttctgccagatgaccagcctgatgaccatcatggaggactactttgcctaccggggcttcaagtacctgcggctggatggcaccaccaaggcagaagatcggggcatgctgctgaagaccttcaatgaacctggcagcgagtacttcatcttcctgctgagcacccgggccggcggcctgggcctgaacctgcagagcgctgacaccgtcatcatctttgacagcgactggaacccccaccaggacctgcaggcccaggaccgggcccacagaattggccagcagaatgaggtgcgggtgctgcggctgtgcaccgtgaacagcgtggaggagaagatcctggccgccgccaagtacaagctgaatgtggaccagaaggtgatccaggccggcatgtttgaccagaagagcagcagccatgaaagaagagccttcctgcaggccatcctggagcacgaggagcaggatgagagccgccactgcagcacaggcagcggcagcgccagctttgcccacacagcccctcctcctgctggggtgaacccagacctggaggagccccccctgaaggaggaggatgaggtgcctgatgatgaaacagtgaaccagatgattgcccggcatgaggaggagtttgacctcttcatgaggatggacctggacagaagaagagaggaggccaggaaccccaagaggaagccccggctgatggaggaggatgagctgcccagctggatcatcaaggatgatgctgaggtggagcggctgacctgtgaggaggaggaggagaagatgtttggccggggcagccgccacaggaaggaggtggactacagcgacagcctgacagagaagcagtggctgaaggccatcgaggagggcaccctggaggagattgaggaggaggtgcggcagaagaagagcagcaggaagaggaagagggacagtgatgctggcagcagcacccccaccaccagcaccaggagccgggacaaggatgatgagagcaagaagcagaagaagaggggccggcccccagctgagaagctgagccccaacccccccaacctgaccaagaagatgaagaagatcgtggatgctgtgatcaagtacaaggacagcagcagcggccggcagctgtctgaggtgttcatccagctgcccagcaggaaggagctgcctgagtactatgagctgatcaggaagcctgtggacttcaagaagatcaaggagcgcatccggaaccacaagtaccgcagcctgaatgacctggagaaggatgtgatgctgctgtgccagaatgcccagaccttcaacctggagggcagcctcatctatgaggacagcatcgtgctgcagagcgtcttcacctctgtgcggcagaagattgagaaggaggatgacagcgagggggaggagagcgaggaggaggaggagggggaggaggagggcagcgagagcgagagccgctctgtgaaggtgaagatcaagctgggcaggaaggagaaggcccaggaccggctgaagggcggcagaagaagacccagccggggcagccgggccaagcctgtggtgtctgatgatgattctgaggaggagcaggaggaggacaggagcggcagcggcagcgaggaggactag

SEQ ID NO: 46522 - DNA, 4944 bp, Artificial Sequence
  derived and/or modified sequence
atgagcacccccgacccccccctgggcggcaccccccggcccggcccttcgcctggccctggcccctcaccaggtgcgatgttgggcccatctcctggcccatctccaggttcagctcacagtatgatgggccccagcccagggccaccgtctgccggccatcccatacccacacaggggccagggggatatccacaagataacatgcatcagatgcacaaaccaatggaaagtatgcacgagaaagggatgagcgatgatccaaggtacaaccagatgaaggggatgggaatgagatctggcggccacgcaggtatgggccccccaccgagcccgatggatcagcactcccagggctatcctagccccttgggcggaagcgaacatgcatcctctccggtgcctgcctctggacctagttccggaccacagatgtcttctggtcctggcggcgccccgctggacggagccgaccctcaggccttgggccagcagaatcgcggccccactcccttcaaccagaaccagctacatcaactgcgagctcaaatcatggcttacaaaatgctggccagaggacagccactgcccgaccacctgcagatggccgtgcagggaaaacgtccaatgcccggtatgcagcagcagatgcccaccctcccgcctccatcggtctcagcaaccggtcctggaccagggccagggccggggcccggaccgggccctggcccggccccgcccaattattcacgcccacatggtatgggtggccccaacatgcctccgccagggccatccggagtgcccccaggtatgccaggacaaccccccgggggccctccgaagccctggccagagggacccatggccaatgccgctgctcccacatcaacgcctcagaaactgatacctccgcagccaacagggaggcccagccctgcaccccctgcggtacctcctgctgcgagtcctgtgatgcccccccagacacaaagtcctggacagcctgcacagccggcaccaatggtgcctttgcatcagaaacagagccgcatcaccccaattcagaaacccagaggtcttgatccagtggaaatcttgcaggagagagaatacagactccaggccagaatcgcacacagaatacaagagctcgaaaacctgcccggctccctagcaggggacttgcgaactaaggctacaatagaactcaaggctctgaggctcctgaatttccaaaggcaactgcgccaagaagttgtagtgtgtatgcggagagacactgcactggaaactgccttgaacgcgaaagcgtacaaacggagtaaacgccagtccctgagagaagcacggatcactgaaaagctggaaaagcaacagaaaattgaacaagagagaaagaggcgccagaaacatcaagagtacctaaacagtatactccagcatgccaaggacttcaaggagtaccatcgttctgtaaccggcaaaatccaaaaattgactaaggcggtcgctacatatcacgctaataccgagcgggaacagaagaaggagaatgagagaatcgagaaagagcgcatgaggaggctaatggccgaggacgaggaaggttatcgtaagctcattgaccaaaagaaggacaaacgcctggcgtatcttctgcaacagacagacgagtacgtggcaaacttgactgagttggtgcgccagcacaaagctgcccaggtggccaaggaaaaaaagaagaagaaaaaaaagaaaaaagccgaaaatgcagagggccagaccccagccataggacccgatggcgagccgcttgacgagacaagtcagatgagcgacctgcctgtcaaggtaatccacgttgagagtggaaaaattcttactgggacagatgcgcctaaagctgggcagctggaggcatggctagagatgaaccctggttacgaagtagccccaagaagcgatagcgaggaaagcggctcagaagaagaagaggaagaagaggaggaagagcagcctcaggcagcacagccaccgaccctcccagttgaagaaaaaaaaaaaattccagaccctgactccgatgatgtgagtgaagtcgatgccaggcatatcatcgaaaacgctaagcaggatgtcgatgatgaatatggagtttcacaggccctagcaagaggacttcagtcctattacgctgtggcccacgctgtgaccgaacgtgtcgataaacagtccgccctgatggtcaacggtgtcctgaaacagtaccaaatcaaaggactagagtggctagtgagtctatataataataacctgaacgggatccttgccgatgaaatggggctgggaaagaccattcaaaccattgccctgatcacctatttaatggagcataaacgaattaacggtccattccttattatcgtcccactaagcacgctgagtaactgggcgtatgaatttgataaatgggcccccagtgtagtgaaggtttcctataagggttcccccgcggcccgcagggcattcgtgcctcaactgcggtcaggcaaatttaacgtactgctgacgacatacgaatatatcatcaaagacaaacacatcctcgcaaagatccgctggaagtatatgatcgtggacgagggccacaggatgaaaaaccaccactgcaagctcacgcaggtgctgaatactcattatgtggcccctcggcgactgcttctgactggcactccactgcaaaataagcttcccgagctttgggctctgcttaattttctcctacccacaatctttaaatcttgctcaacatttgaacaatggtttaatgcccctttcgccatgaccggggagaaggtcgatttaaatgaggaggagaccattttaattattagaagactacacaaggtgctgcgccctttcctcctgcggaggctcaagaaggaagtggaagctcagttgccagaaaaagtggaatatgtcataaagtgtgacatgtccgccctgcaacgcgtcctctataggcacatgcaagcaaaaggcgtgcttctgaccgatgggtctgagaaggataaaaaaggaaaaggtgggacgaaaaccctcatgaacactatcatgcagctgcggaaaatttgcaatcatccctacatgtttcagcacattgaggagagctttagtgaacacctgggcttcactggaggtatcgtgcaaggcttagacctataccgggcgtctgggaagtttgagcttctggatcggattctccccaagttacgggccactaaccataaggtccttctgttttgccagatgacatctcttatgactatcatggaagactacttcgcttatcgggggttcaaatatcttagactggatggcaccacaaaggccgaggacagggggatgctgcttaagacatttaatgagcctggaagcgagtatttcatttttctcctctctacaagggccggtggactcggcctgaacctgcaatccgcagatacagtgatcatcttcgactccgactggaaccctcaccaggacctgcaggcccaagatagagctcacaggataggccagcagaatgaggtaagagtgctgcgtttgtgcaccgttaactcagtggaagagaagatacttgccgctgcgaaatacaagctgaatgtagaccagaaggtgatccaggccggtatgttcgatcaaaaatcatccagccacgagcgcagagccttcctgcaagcaatccttgaacatgaagaacaagacgagtcacggcactgcagcactgggtccggctccgccagttttgcacacacggccccgccacccgcaggagtgaatccagatctggaagagcctccccttaaagaggaagacgaggtgccggatgatgagacagtgaatcagatgattgcccgccatgaagaagagtttgacctgtttatgcgaatggatctggacaggagacgagaagaggccagaaatcccaaaagaaagcccagattaatggaagaggacgagctcccgtcctggattatcaaagatgatgcagaagtggagcgcctcacatgtgaggaggaagaagagaagatgtttggcaggggatctcggcaccgcaaggaggtcgattactccgacagcctcacagagaagcagtggctgaaggccatcgaggagggtactctcgaggaaattgaagaggaagttcgacagaagaaatctagccgcaagcggaagcgagattccgacgccgggagcagcactcctaccacatccaccagaagccgcgacaaggatgatgaaagcaaaaagcagaagaaaagaggtcgaccaccagctgagaagctttctcccaacccaccgaacttgacaaaaaagatgaaaaagattgtcgacgccgtgatcaagtataaggacagcagtagtggaaggcaattgagcgaggtgtttatccaactaccttccaggaaagagctgcccgagtattatgagctgattcgcaagccagtcgatttcaaaaaaatcaaagagagaattaggaatcacaagtatcggtccttgaatgatctggagaaggacgtgatgctcctgtgtcagaatgctcagacgttcaatctggaaggttctctaatatacgaggacagcatcgtcctgcagtccgtattcaccagcgttagacagaagattgagaaagaagatgattcagaaggcgaagagtcagaggaagaggaagagggcgaagaagaaggcagcgaaagcgagtctcggtctgtcaaggtgaagattaagctggggagaaaggagaaggcacaggatcggctaaagggtgggaggaggagaccctctagaggctccagggctaaacctgtagtgagcgatgacgactccgaagaggagcaagaagaggatcgatcgggatccggcagcgaggaagattag

SEQ ID NO: 46523 - DNA, 4944 bp, Artificial Sequence
  derived and/or modified sequence
atgagcacccccgacccccccctgggcggcaccccccggcccggcccctccccaggtccgggcccatctcctggcgccatgctcgggccttctccaggcccatcgccaggcagcgcccattccatgatgggtccgtcacctggaccaccaagcgccggacatccaatacctacacagggacctggtggctacccacaagacaacatgcatcagatgcacaaacctatggaatcaatgcacgaaaaaggaatgagcgacgatcccagatacaatcaaatgaaggggatgggaatgcgatctgggggacatgctgggatggggccacctccctctccgatggatcagcactctcagggctacccaagtccactgggcggaagcgagcatgcctcatccccagtgccagcgagcggcccttcctctggaccgcagatgagttccgggcctgggggtgcacctctagacggcgccgacccacaggctctgggacagcagaatagaggacctaccccttttaatcagaaccaattacatcagttgagagcgcagattatggcttacaaaatgctagcccggggacagcctctcccagaccatcttcagatggctgtgcaagggaagcgtccaatgcctgggatgcaacagcagatgcccactctgccccccccaagcgtgtccgctaccggccctgggccgggcccaggtccagggcctggcccgggccccggcccagccccacccaactactctagaccccatggaatgggaggtcccaatatgcccccgcctgggccctcgggcgtgccaccagggatgcccggccagccacccggcgggccccctaaaccatggcccgagggtccaatggccaatgctgctgccccaacaagtacaccacaaaagctgataccaccccaacccacgggtagacccagtcccgccccacctgctgtccctccggccgctagtcctgtaatgcctccccagacccagagcccagggcagcctgctcaacctgcccctatggtccccctgcaccagaaacagtctcgaatcactcccattcagaagcccaggggcctggacccagttgaaattctgcaggagagagaatatagattgcaggccagaattgcccatcggatccaggagctggagaatttgcctgggagtctggccggagacttgcggactaaggccaccattgagttgaaagcgctgagactcttgaacttccaacggcagctcagacaggaagtagtcgtctgcatgcgccgtgacacagccctggagactgcgctgaacgctaaggcctacaagagatccaagcggcagtctctccgggaggccagaataactgagaaattggaaaagcagcagaagattgaacaggaacggaagcgacggcaaaagcatcaagaatatcttaacagcatactgcagcacgccaaagactttaaggaataccacagatccgtgaccggcaagatccagaaacttactaaagccgtcgcaacctaccatgccaatacagagagggagcaaaagaaagaaaacgagcggattgaaaaggagaggatgcgtcgattgatggctgaagacgaggagggatacagaaaactgatcgatcaaaagaaagacaagaggctagcctatcttctgcagcagacggacgagtacgtggccaacttgacagagcttgtcaggcagcacaaagccgcacaggttgccaaggaaaagaagaaaaaaaaaaaaaagaaaaaagcggagaatgccgaggggcagacaccagccatcgggcccgacggggagccgctcgatgagacaagtcagatgagcgatttgcccgtgaaggtaatccacgtagaatccggtaagattcttacaggcaccgacgctccaaaagcgggccagctggaggcctggctcgaaatgaatcctgggtatgaggttgcacctcgctcagattctgaggaatcggggtctgaggaagaggaagaagaggaggaggaggagcaaccccaagccgcccagcctcccacgctgcctgtggaggaaaaaaaaaaaattcccgatcctgatagcgacgacgttagtgaggtggatgcacgccatatcatcgaaaacgccaagcaggacgtagacgatgagtatggagtctcccaggccctggctagggggctacagtcctattacgctgtcgcccatgctgtgacagagagagtcgacaagcagagcgctcttatggtaaatggcgtgctgaaacagtatcagatcaaagggctcgaatggctggtgagcctctataacaacaaccttaacggtatactcgcagacgagatgggactcggtaagaccatccagaccatagctcttattacctatctcatggagcacaaacgtattaatgggccattcttgattatagtcccactttcgaccctgtctaactgggcctacgagtttgacaagtgggcccctagcgtagtgaaagtctcctataagggttcacctgctgccagaagggccttcgtgccgcagctaagatcaggtaaattcaatgtgctactgaccacatatgagtacataattaaagacaaacacattctggccaaaatacgttggaaatatatgattgtcgatgagggtcatcgtatgaaaaaccaccattgcaagctgacgcaagtgttgaatactcattatgttgcgccccgcaggctgctgctgactggaactccactccagaataaactgccagaactctgggcattgctgaacttcttactccccacaatttttaaaagctgctcaacgtttgagcagtggtttaatgccccctttgcaatgactggggaaaaggtggacctgaacgaggaagaaacgatcctgattatcagaagattacacaaggtccttaggccattcctcctgagaaggctcaagaaagaagtcgaggcccaactaccagaaaaagtggaatatgtcatcaaatgcgacatgtctgcccttcagcgcgtgctgtatcggcacatgcaggccaaaggagtgttgctgactgatggttctgagaaggacaagaagggcaaaggtgggaccaaaactttaatgaatacaattatgcagcttcgcaaaatatgcaaccacccatacatgttccaacacattgaggaaagcttctcggagcatctggggttcactggcggcatcgtccagggcctggacctgtaccgcgcgtcaggcaagtttgagctccttgataggatcctgcccaagttgagggcaaccaatcacaaggtgcttctcttctgccagatgacaagtctgatgactataatggaagactacttcgcataccgcggatttaagtatctgcggctcgatggcacaaccaaggcggaggatcgcgggatgctgctgaaaacttttaacgaaccagggtcagaatattttatctttctgctaagtacacgggccggcggactcggactgaacctccagagtgccgacacagtgatcatttttgattcggattggaaccctcatcaagatttgcaagcccaggatagggctcacagaatcggacagcagaacgaggtcagggtcctgcgactttgtactgttaattcggttgaggaaaagatactggccgctgcaaaatacaagctaaacgttgaccaaaaggtgatccaggcggggatgttcgaccagaaatccagttcccatgagcggcgagcttttctccaggccattttagagcatgaagagcaagatgaaagccggcattgttcaacaggatccggatccgcctcatttgcacacaccgctcctccacctgcgggggtgaatcccgacctcgaggaaccccctctgaaagaggaggacgaagtgccggacgacgagacagtgaaccagatgatcgcacgccatgaagaagaattcgacctgttcatgcggatggatcttgaccggcgtagagaggaagctcgtaatcccaagaggaaaccaagactgatggaggaggacgagttgccctcctggatcataaaagacgatgccgaggttgagcggctgacatgcgaagaggaggaagaaaaaatgtttggacgtgggtccaggcatagaaaggaggtcgactacagtgattcattgacagagaagcagtggctcaaggcaatcgaggaaggtacactggaggagatcgaggaggaagtgagacaaaaaaaatctagcaggaaacggaaacgggactccgacgccggaagcagtactccaaccacttcgacaaggtccagggacaaggatgatgaatctaagaagcaaaagaagaggggccggcctcctgctgagaagctatccccaaatcccccaaatctgactaagaagatgaaaaaaatagttgatgccgtcataaaatacaaggattcaagctcaggtaggcagctgagcgaagtctttatacagctgccttcaagaaaagaactccctgagtattatgaactgatacggaaacctgtggatttcaagaaaatcaaggaaagaatcagaaatcacaagtatcgcagcctgaacgatctggaaaaggacgtgatgctgctctgccagaacgcccagacatttaacttggagggatccctgatttatgaggactctattgtgcttcagagcgtgtttacctctgtgcggcagaagatagaaaaggaagacgactccgagggcgaggagagtgaagaggaggaggagggagaagaggagggctcagagtccgaaagtagatctgtcaaagtcaaaattaaacttgggaggaaagagaaggcacaggatcgactcaaaggggggcggcggaggccctcgagaggcagtcgggccaagccagtggttagtgacgacgactctgaagaagagcaagaggaagacagatctgggtcaggatctgaggaggactag

SEQ ID NO: 46524 - DNA, 4944 bp, Artificial Sequence
  derived and/or modified sequence
atgtccacacctgatcctccactaggaggtaccccaagaccagggccatcaccaggccctgggcctagcccaggcgctatgctcggaccgtcgcccggaccttccccaggttccgcccatagcatgatggggccatcaccagggccacccagcgcaggacacccaatccctacccaggggcctggaggttatccccaagataatatgcatcagatgcacaaacccatggaaagcatgcatgaaaaaggcatgtccgatgaccccaggtataatcaaatgaaaggtatgggcatgaggagcggaggacacgccggaatgggtcccccaccctccccgatggaccagcactctcaggggtacccatcacccctgggcggaagtgaacatgcttcaagtcccgtgccggcatccggcccaagttcggggccacaaatgagctcaggacctggaggcgcacccctggacggagctgatccccaggcgttgggtcagcaaaacagagggccaacccctttcaatcagaatcagttacatcagcttagggcccagatcatggcttataagatgctggctagaggccagcccctgcccgatcacttgcagatggctgttcagggaaagcggcctatgcctggtatgcaacagcagatgcctactctgcctccgcctagtgtcagcgccacaggtccgggaccgggacccggtcctgggcctgggcctggccctggcccagccccaccaaattattcacgcccacatgggatgggaggccctaacatgccgccacccggtccatccggagtgcccccagggatgcccggacaaccaccgggagggccacctaaaccctggccagaaggtcctatggctaacgcggcagctcccacttctactccacagaagctcattcctccccagccaacaggcaggccatcgcctgcgccaccagccgtcccacctgctgcttctcccgtcatgccaccgcagacccaatccccaggacaacctgcacagcctgctcctatggtcccacttcatcagaagcagtcaaggattacacccattcagaaacctcgcggactcgaccctgtagagattctgcaagaacgggagtatagactccaggcacgaatcgcacacaggattcaggagctcgaaaacctcccaggttcactggccggagacttgcggactaaagccactatagagctgaaggccctgcggcttttaaatttccagagacaattgagacaagaggttgtcgtgtgcatgcggcgtgacacggcattggaaactgcactgaatgctaaggcgtacaaaaggagtaaacgtcagtcccttcgcgaagctaggatcactgaaaaactagagaagcagcagaaaatcgaacaggagcgtaagcgaaggcaaaaacaccaggagtacctcaactctatattgcagcacgccaaagattttaaggaataccatcgcagtgtaaccggtaaaatacaaaaattgaccaaggcagtggctacttaccacgctaacactgaaagggagcagaaaaaggaaaatgaaagaattgaaaaggaaaggatgcgacggctgatggcagaggatgaagagggatatcggaaattaatcgatcagaagaaggacaagcgtctcgcttatctcttacagcagaccgatgaatatgtggccaatctgactgagctggtccgacaacacaaggcagctcaagttgccaaagaaaagaaaaagaaaaaaaaaaagaaaaaggcagagaacgctgagggccagacacccgctatcggaccagatggggaaccgctcgacgagactagccagatgagtgatcttcccgtaaaggtcattcatgtggaaagtggcaagattctcaccggtacagatgcaccaaaggcagggcaactggaggcgtggttggagatgaatcccggttatgaggtggccccacgatctgacagtgaagaatccgggtctgaggaagaagaggaggaggaagaagaagaacaaccccaggccgcacagcctcctaccttgcctgtggaggagaagaaaaagatacccgaccctgatagcgatgacgtgtcggaagtggacgccaggcacattatcgaaaacgccaagcaagatgtggatgatgagtacggagtctcgcaggcattggcaaggggtttgcagtcatactacgccgtggcccacgccgtgactgagcgggtggataagcaatccgccctgatggtaaatggcgtactgaaacagtaccagataaaaggactggaatggctcgtttccctatataacaacaatctcaatgggattctcgctgacgagatgggcctggggaagactatccagacaattgcacttataacctatctaatggagcacaaacggattaacggccctttcctaatcatcgtgccactgtcgacactgagcaattgggcctacgagtttgacaaatgggcgccttctgtggtgaaggtgtcttataagggcagtcctgcagcccgaagggcattcgtccctcagttgcggtccggcaaattcaacgtcttactgaccacctacgaatacattatcaaggataagcatattctcgccaaaattaggtggaagtacatgatcgtggacgaggggcacagaatgaaaaatcaccattgcaaactgacacaggtgcttaacacccactacgtcgcgcctagacggctgctactgacaggcacacctttacagaacaaactgccagaactatgggctttgctcaacttcttactgcctaccatctttaaatcatgcagcactttcgaacagtggttcaatgccccattcgccatgacaggggagaaggtggacctaaatgaggaagagactatcctgataattcgccgactccataaggtgcttcggccttttctgttgcgacgcctcaaaaaggaggttgaggcccagctgcctgagaaggtggaatatgtgattaaatgcgatatgtctgcactccagcgcgtcttgtacaggcatatgcaggccaagggcgtactacttaccgacggttctgaaaaggacaagaagggaaagggcggaacaaagaccctaatgaacaccatcatgcaactgaggaagatttgcaaccatccctatatgtttcaacacattgaggaaagtttctcagagcatctgggctttactggcggtatcgtgcaagggttggatctgtacagggctagcggtaaattcgagctgctcgaccggattctgcctaagctgcgagccaccaaccataaggttttgctgttttgccagatgactagcctcatgaccatcatggaggattacttcgcctatcgaggatttaaatatttacgtctggacggcaccaccaaggcggaggacagggggatgttgctgaagactttcaatgaacccggatcagagtacttcatcttcttactgagcactcgagccggtggattaggccttaatttgcaatctgctgatactgtaattatctttgatagcgattggaatccccaccaagaccttcaagctcaagatcgcgctcaccgcatcgggcagcagaacgaagtcagagtacttcgactgtgcacagtcaacagcgtagaagagaagatcctcgccgcagctaaatataaactcaacgtggatcaaaaagtcatccaagcaggcatgttcgatcagaagtcgtcgtctcatgagcggcgtgcctttctgcaggcaatcctagaacatgaagagcaagatgaatcacggcactgctccactggatcaggcagtgccagcttcgctcacacagccccaccaccagcgggtgtgaatcccgacctcgaggagcctccgctgaaggaggaggatgaggtgcccgacgatgagacggtgaatcaaatgattgcaaggcacgaggaagagttcgatctgttcatgcgtatggacctcgacaggaggcgagaggaggctcgcaaccctaaacgcaaacctcggcttatggaggaggacgaattaccttcatggattattaaagacgacgcagaagtggaacggttaacttgtgaggaggaggaagagaagatgtttggacggggtagcaggcaccgaaaggaggtcgactactcagattctctgaccgagaagcagtggcttaaggctatcgaggagggaacccttgaagaaattgaggaggaagtaaggcagaaaaagtctagccgaaaaagaaagcgggactcagacgccggatcgtccacccccacaacttccacgaggagtcgtgacaaagatgacgagagtaaaaaacaaaaaaaacggggacgaccccctgccgagaagctgagtcccaatccaccgaacctgaccaagaagatgaaaaagattgttgacgccgtgatcaagtacaaagactcctcctctggtagacagctgtccgaggtcttcattcagctgccatcacgcaaggaacttcccgagtactatgagctcataagaaaaccagtcgatttcaagaagattaaagagcgtattcgtaaccataagtataggtccttgaacgatcttgagaaagatgtaatgctgctgtgtcagaacgcgcaaacgttcaacctggagggcagtctgatctatgaagattcaatcgtgctgcagtctgtctttacctctgtgcggcagaagattgaaaaggaggacgactctgagggcgaagaaagtgaagaggaagaggagggcgaggaagaggggtcggagagcgagtcaagatcagtgaaggttaagatcaagctgggacgtaaggaaaaggcccaagatcgcctgaaaggcggacgcaggcgcccatccagggggagccgggctaagccggtggtctcagacgatgacagtgaagaagagcaagaggaagatcggtccggaagcggaagtgaagaagattag

SEQ ID NO: 46525 - DNA, 4944 bp, Artificial Sequence
  derived and/or modified sequence
atgagtacacccgacccacccttgggtgggaccccgaggcctggtccaagtccaggtcctgggcctagccctggcgctatgcttggccctagccctggaccgagcccgggtagtgcccattccatgatgggtccatcacccggacccccatctgccggtcaccctatccccactcaggggccagggggatatccgcaagataatatgcaccagatgcataaacctatggagagcatgcacgaaaaggggatgtcagacgaccccaggtataaccagatgaaaggcatgggcatgcgcagtgggggtcacgcaggcatgggtcccccacccagtccaatggatcagcactcccagggatatccatcacccttaggaggatccgagcacgcgtcgagtcctgttccagccagcggcccttcaagtggtccacagatgtcttccgggccaggcggagccccactggacggagccgatccccaagcacttggccagcaaaatagagggcctacaccatttaatcagaaccaactccaccaattaagagcacagatcatggcatataagatgctcgcacgaggccagcctttgcctgatcacctccagatggccgtccaaggtaaaagacctatgcctgggatgcagcagcagatgcccaccctgcccccaccatctgtgtctgctacaggaccgggacctggaccaggacctggaccgggtccgggacctgggccagctcctcccaattatagcagaccgcacggcatgggcggtccaaacatgcctccacccggtccatctggcgttccacctgggatgccgggacagccacccggaggacccccaaagccgtggccagagggtccgatggccaatgcagcagcccctacttccactcctcaaaagctgattccaccacagcccaccgggcgaccatcaccggcaccacctgctgtgcccccagcagctagtccggtcatgccaccacagacccagtccccaggacagcccgctcagccagcccctatggtccctctacatcaaaaacagtctaggatcacccctatacagaaacccagggggcttgacccagtggagattctgcaggagcgggaatatagactccaagctaggatcgctcatagaattcaggagctcgaaaatctcccagggagtctggctggtgaccttaggaccaaagccactattgagctcaaagccctcaggcttctgaactttcaacgccagttgcgccaggaggtagtggtttgtatgcggcgtgacactgccctggagaccgctttaaatgcaaaggcttacaagcggtctaagcgtcagtctctccgagaggctcgcatcacagagaaactagagaagcagcagaagatcgagcaagaacgcaaaaggcgccaaaaacaccaggaatatctgaacagcatcctgcaacacgcaaaggattttaaagagtatcacagatctgtgacagggaaaatccagaaacttaccaaggcagtggcaacttatcacgcgaatacagaacgagagcagaagaaggaaaacgagcgtattgagaaggagcgcatgaggaggcttatggctgaggacgaagaaggctatcgaaagctgatcgatcaaaaaaaggataagcggctggcataccttttgcagcaaaccgacgagtacgtggcaaacttgactgagctggtgcgtcagcacaaagcagcccaagttgccaaggagaagaagaaaaagaaaaaaaagaaaaaagccgagaacgccgaagggcaaacgcccgcaattggcccagacggggaacccctagacgagacatcacaaatgagcgacttgcctgtgaaggtaatccacgttgaatcaggaaagatcttgacaggcacagatgcgcctaaggctggccaactggaagcttggctggagatgaatcctggctatgaagtagcgcctcggtccgattcagaggagtcagggtcagaagaagaggaggaggaggaagaggaggaacaacctcaggcagcgcagccccctaccctccctgtggaggagaaaaagaagatcccagatccggactctgacgatgtgtctgaggtggacgccagacacattattgagaacgccaagcaggacgtggacgatgaatacggcgtctctcaggctttggcgagaggtttacagagctactacgccgtggcccatgctgttacagagcgggtagacaaacaatccgccctgatggtgaatggtgtcctgaagcagtatcagattaagggtctggagtggttagtatctctatacaacaataatctgaacgggatcctcgcagacgaaatgggattggggaagaccattcaaacaatcgccttaattacttacttgatggagcacaagcgcataaacggcccttttctgataatagtccccttaagcacgctctccaattgggcatacgagttcgataaatgggctccttcggtcgtgaaagtttcttataaggggtcaccggcagcgaggcgcgctttcgttccccagttaagatcaggtaaatttaatgtcctgttaaccacatacgaatacattatcaaagataaacacatactggcaaaaattaggtggaaatacatgatcgtggatgaaggccaccggatgaagaaccatcattgcaagctgactcaggtactcaatacgcactacgtggctccgagaaggctgctgctgaccggtactccactgcaaaataagctgcccgagctctgggccttgttgaatttcttgttaccaaccattttcaagagctgctcaacattcgaacagtggttcaacgcgccatttgccatgacaggcgagaaagttgacctgaacgaagaggaaacaatcctaataatacgtcgtctccacaaagtattgagaccgtttctgctgcggagattaaagaaagaagttgaggctcagctccccgagaaagtcgaatatgtgattaagtgtgatatgtcagcattacagagagttctgtacagacacatgcaggctaagggggtgctgttaaccgatggatcagaaaaagataaaaaaggcaagggcggtacaaaaacactgatgaacacaattatgcagttgcgtaaaatctgcaaccacccctacatgttccagcacatcgaggaaagctttagtgagcacctcgggttcacggggggaattgtgcagggcctagatctctaccgggcaagtggcaagtttgagctgctggacaggattctgccgaagcttcgagccactaaccacaaagtgctcctgttctgtcaaatgacgtcattgatgacaataatggaggactatttcgcctacagaggcttcaagtatctaaggttggacggaactacgaaggccgaggaccggggtatgcttttaaagaccttcaatgaacccggatctgagtacttcatcttcctgctctcaacgcgcgcagggggactgggactaaacctgcagtcggccgacacagtcattatcttcgacagcgattggaaccctcaccaagatctgcaggcgcaagatagggcacacaggattgggcagcagaatgaggttagggtgcttcggctgtgtaccgtcaactcagtagaagaaaagattctggctgctgcaaaatataaactgaatgtggatcagaaagtgatacaggcgggaatgtttgaccagaaatcctctagccacgagcgcagggcatttctccaggctattctggagcacgaagaacaggatgagtcacggcactgctcaaccggctccgggtctgcgtccttcgcccacactgcccctccacccgctggagtgaatcccgacctcgaagagcctccgctcaaggaggaagatgaggtccccgatgatgaaacagtcaaccagatgatcgcacgccatgaggaggagtttgacttattcatgcgaatggatctcgacaggcgacgagaagaggctcggaatcctaagaggaaaccacgactgatggaagaagacgagcttccctcttggattatcaaagacgacgcggaggttgagagactgacctgcgaagaagaagaggaaaaaatgtttggacgcggatctcgtcacaggaaagaggtggattattctgattcccttacagagaagcagtggctcaaggccattgaagaaggcaccttggaggaaatcgaagaagaggtgagacagaaaaaaagcagcagaaaaagaaaaagagacagcgacgcaggtagttctaccccaaccacctctacaagatcacgggataaggatgacgagagcaaaaaacagaagaaaagaggccgacctccggctgaaaaacttagtcctaacccccctaacctcaccaagaaaatgaaaaaaattgttgacgcggtgattaaatataaggatagttcatccggtcgccagctctctgaggtatttatacagctaccaagtagaaaagagctccctgagtattacgagttgatcagaaaacctgtggactttaaaaaaatcaaagagcggataagaaaccacaagtataggagcttgaacgatctggagaaggatgtcatgttactatgtcagaatgcccagacctttaatctggaaggatcgctcatctacgaagactccattgtgttgcagagtgttttcacaagtgtccgccagaagatcgagaaggaagacgattctgagggcgaggaatcagaggaagaggaggagggcgaagaggaaggatctgaatctgaatcgaggagtgttaaggtcaaaatcaagctgggcaggaaagaaaaggcccaggaccgtctgaagggcggacggagaagaccctctagaggctctcgcgctaaacccgtggtcagtgacgatgactctgaggaggaacaggaagaagatcggagcggatctggcagcgaagaggactag

SEQ ID NO: 46526 - DNA, 5392 bp, Artificial Sequence
  derived and/or modified sequence
gtgaagggggggcggtggccgaggcgggcgggcgcgcgcgcgaggcttcccctcgtttggcggcggcggcggcttctttgtttcgtgaagagaagcgagacgcccattctgcccccggccccgcgcggaggggcgggggaggcgccgggaagtcgacggcgccggcggctcctgcaggaggccactgtctgcagctcccgtgaagatgtccactccagacccacccctgggcggaactcctcggccaggtccttccccgggccctggcccttcccctggagccatgctgggccctagcccgggtccctcgccgggctccgcccacagcatgatggggcccagcccagggccgccctcagcaggacaccccatccccacccaggggcctggagggtaccctcaggacaacatgcaccagatgcacaagcccatggagtccatgcatgagaagggcatgtcggacgacccgcgctacaaccagatgaaaggaatggggatgcggtcagggggccatgctgggatggggcccccgcccagccccatggaccagcactcccaaggttacccctcgcccctgggtggctctgagcatgcctctagtccagttccagccagtggcccgtcttcggggccccagatgtcttccgggccaggaggtgccccgctggatggtgctgacccccaggccttggggcagcagaaccggggcccaaccccatttaaccagaaccagctgcaccagctcagagctcagatcatggcctacaagatgctggccagggggcagcccctccccgaccacctgcagatggcggtgcagggcaagcggccgatgcccgggatgcagcagcagatgccaacgctacctccaccctcggtgtccgcaacaggacccggccctggccctggccctggccccggcccgggtcccggcccggcacctccaaattacagcaggcctcatggtatgggagggcccaacatgcctcccccaggaccctcgggcgtgccccccgggatgccaggccagcctcctggagggcctcccaagccctggcctgaaggacccatggcgaatgctgctgcccccacgagcacccctcagaagctgattcccccgcagccaacgggccgcccttcccccgcgccccctgccgtcccacccgccgcctcgcccgtgatgccaccgcagacccagtcccccgggcagccggcccagcccgcgcccatggtgccactgcaccagaagcagagccgcatcacccccatccagaagccgcggggcctcgaccctgtggagatcctgcaggagcgcgagtacaggctgcaggctcgcatcgcacaccgaattcaggaacttgaaaaccttcccgggtccctggccggggatttgcgaaccaaagcgaccattgagctcaaggccctcaggctgctgaacttccagaggcagctgcgccaggaggtggtggtgtgcatgcggagggacacagcgctggagacagccctcaatgctaaggcctacaagcgcagcaagcgccagtccctgcgcgaggcccgcatcactgagaagctggagaagcagcagaagatcgagcaggagcgcaagcgccggcagaagcaccaggaatacctcaatagcattctccagcatgccaaggatttcaaggaatatcacagatccgtcacaggcaaaatccagaagctgaccaaggcagtggccacgtaccatgccaacacggagcgggagcagaagaaagagaacgagcggatcgagaaggagcgcatgcggaggctcatggctgaagatgaggaggggtaccgcaagctcatcgaccagaagaaggacaagcgcctggcctacctcttgcagcagacagacgagtacgtggctaacctcacggagctggtgcggcagcacaaggctgcccaggtcgccaaggagaaaaagaagaaaaagaaaaagaagaaggcagaaaatgcagaaggacagacgcctgccattgggccggatggcgagcctctggacgagaccagccagatgagcgacctcccggtgaaggtgatccacgtggagagtgggaagatcctcacaggcacagatgcccccaaagccgggcagctggaggcctggctcgagatgaacccggggtatgaagtagctccgaggtctgatagtgaagaaagtggctcagaagaagaggaagaggaggaggaggaagagcagccgcaggcagcacagcctcccaccctgcccgtggaggagaagaagaagattccagatccagacagcgatgacgtctctgaggtggacgcgcggcacatcattgagaatgccaagcaagatgtcgatgatgaatatggcgtgtcccaggcccttgcacgtggcctgcagtcctactatgccgtggcccatgctgtcactgagagagtggacaagcagtcagcgcttatggtcaatggtgtcctcaaacagtaccagatcaaaggtttggagtggctggtgtccctgtacaacaacaacctgaacggcatcctggccgacgagatgggcctggggaagaccatccagaccatcgcgctcatcacgtacctcatggagcacaaacgcatcaatgggcccttcctcatcatcgtgcctctctcaacgctgtccaactgggcgtacgagtttgacaagtgggccccctccgtggtgaaggtgtcttacaagggatccccagcagcaagacgggcctttgtcccccagctccggagtgggaagttcaacgtcttgctgacgacgtacgagtacatcatcaaagacaagcacatcctcgccaagatccgttggaagtacatgattgtggacgaaggtcaccgcatgaagaaccaccactgcaagctgacgcaggtgctcaacacgcactatgtggcaccccgccgcctgctgctgacgggcacaccgctgcagaacaagcttcccgagctctgggcgctgctcaacttcctgctgcccaccatcttcaagagctgcagcaccttcgagcagtggtttaacgcaccctttgccatgaccggggaaaaggtggacctgaatgaggaggaaaccattctcatcatccggcgtctccacaaagtgctgcggcccttcttgctccgacgactcaagaaggaagtcgaggcccagttgcccgaaaaggtggagtacgtcatcaagtgcgacatgtctgcgctgcagcgagtgctctaccgccacatgcaggccaagggcgtgctgctgactgatggctccgagaaggacaagaagggcaaaggcggcaccaagaccctgatgaacaccatcatgcagctgcggaagatctgcaaccacccctacatgttccagcacatcgaggagtccttttccgagcacttggggttcactggcggcattgtccaagggctggacctgtaccgagcctcgggtaaatttgagcttcttgatagaattcttcccaaactccgagcaaccaaccacaaagtgctgctgttctgccaaatgacctccctcatgaccatcatggaagattactttgcgtatcgcggctttaaatacctcaggcttgatggaaccacgaaggcggaggaccggggcatgctgctgaaaaccttcaacgagcccggctctgagtacttcatcttcctgctcagcacccgggctggggggctcggcctgaacctccagtcggcagacactgtgatcatttttgacagcgactggaatcctcaccaggacctgcaagcgcaggaccgagcccaccgcatcgggcagcagaacgaggtgcgtgtgctccgcctctgcaccgtcaacagcgtggaggagaagatcctagctgcagccaagtacaagctcaacgtggaccagaaggtgatccaggccggcatgttcgaccagaagtcctccagccatgagcggcgcgccttcctgcaggccatcctggagcacgaggagcaggatgagagcagacactgcagcacgggcagcggcagtgccagcttcgcccacactgcccctccgccagcgggcgtcaaccccgacttggaggagccacctctaaaggaggaagacgaggtgcccgacgacgagaccgtcaaccagatgatcgcccggcacgaggaggagtttgatctgttcatgcgcatggacctggaccgcaggcgcgaggaggcccgcaaccccaagcggaagccgcgcctcatggaggaggacgagctcccctcgtggatcatcaaggacgacgcggaggtggagcggctgacctgtgaggaggaggaggagaagatgttcggccgtggctcccgccaccgcaaggaggtggactacagcgactcactgacggagaagcagtggctcaaggccatcgaggagggcacgctggaggagatcgaagaggaggtccggcagaagaaatcatcacggaagcgcaagcgagacagcgacgccggctcctccaccccgaccaccagcacccgcagccgcgacaaggacgacgagagcaagaagcagaagaagcgcgggcggccgcctgccgagaaactctcccctaacccacccaacctcaccaagaagatgaagaagattgtggatgccgtgatcaagtacaaggacagcagcagtggacgtcagctcagcgaggtcttcatccagctgccctcgcgaaaggagctgcccgagtactacgagctcatccgcaagcccgtggacttcaagaagataaaggagcgcattcgcaaccacaagtaccgcagcctcaacgacctagagaaggacgtcatgctcctgtgccagaacgcacagaccttcaacctggagggctccctgatctatgaagactccatcgtcttgcagtcggtcttcaccagcgtgcggcagaaaatcgagaaggaggatgacagtgaaggcgaggagagtgaggaggaggaagagggcgaggaggaaggctccgaatccgaatctcggtccgtcaaagtgaagatcaagcttggccggaaggagaaggcacaggaccggctgaagggcggccggcggcggccgagccgagggtcccgagccaagccggtcgtgagtgacgatgacagtgaggaggaacaagaggaggaccgctcaggaagtggcagcgaagaagactgagccccgacattccagtctcgaccccgagcccctcgttccagagctgagatggcataggccttagcagtaacgggtagcagcagatgtagtttcagacttggagtaaaactgtataaacaaaagaatcttccatatttatacagcagagaagctgtaggactgtttgtgactggccctgtcctggcatcagtagcatctgtaacagcattaactgtcttaaagagagagagagagaattccgaa

SEQ ID NO: 46527 - DNA, 5770 bp, Artificial Sequence
  derived and/or modified sequence
ggagaggccgccgcggtgctgagggggaggggagccggcgagcgcgcgcgcagcgggggcgcgggtggcgcgcgtgtgtgtgaagggggggcggtggccgaggcgggcgggcgcgcgcgcgaggcttcccctcgtttggcggcggcggcggcttctttgtttcgtgaagagaagcgagacgcccattctgcccccggccccgcgcggaggggcgggggaggcgccgggaagtcgacggcgccggcggctcctgcgtctcgcccttttgcccaggctagagtgcagtggtgcggtcatggttcactgcagcctcaacctcctggactcagcaggaggccactgtctgcagctcccgtgaagatgtccactccagacccacccctgggcggaactcctcggccaggtccttccccgggccctggcccttcccctggagccatgctgggccctagcccgggtccctcgccgggctccgcccacagcatgatggggcccagcccagggccgccctcagcaggacaccccatccccacccaggggcctggagggtaccctcaggacaacatgcaccagatgcacaagcccatggagtccatgcatgagaagggcatgtcggacgacccgcgctacaaccagatgaaaggaatggggatgcggtcagggggccatgctgggatggggcccccgcccagccccatggaccagcactcccaaggttacccctcgcccctgggtggctctgagcatgcctctagtccagttccagccagtggcccgtcttcggggccccagatgtcttccgggccaggaggtgccccgctggatggtgctgacccccaggccttggggcagcagaaccggggcccaaccccatttaaccagaaccagctgcaccagctcagagctcagatcatggcctacaagatgctggccagggggcagcccctccccgaccacctgcagatggcggtgcagggcaagcggccgatgcccgggatgcagcagcagatgccaacgctacctccaccctcggtgtccgcaacaggacccggccctggccctggccctggccccggcccgggtcccggcccggcacctccaaattacagcaggcctcatggtatgggagggcccaacatgcctcccccaggaccctcgggcgtgccccccgggatgccaggccagcctcctggagggcctcccaagccctggcctgaaggacccatggcgaatgctgctgcccccacgagcacccctcagaagctgattcccccgcagccaacgggccgcccttcccccgcgccccctgccgtcccacccgccgcctcgcccgtgatgccaccgcagacccagtcccccgggcagccggcccagcccgcgcccatggtgccactgcaccagaagcagagccgcatcacccccatccagaagccgcggggcctcgaccctgtggagatcctgcaggagcgcgagtacaggctgcaggctcgcatcgcacaccgaattcaggaacttgaaaaccttcccgggtccctggccggggatttgcgaaccaaagcgaccattgagctcaaggccctcaggctgctgaacttccagaggcagctgcgccaggaggtggtggtgtgcatgcggagggacacagcgctggagacagccctcaatgctaaggcctacaagcgcagcaagcgccagtccctgcgcgaggcccgcatcactgagaagctggagaagcagcagaagatcgagcaggagcgcaagcgccggcagaagcaccaggaatacctcaatagcattctccagcatgccaaggatttcaaggaatatcacagatccgtcacaggcaaaatccagaagctgaccaaggcagtggccacgtaccatgccaacacggagcgggagcagaagaaagagaacgagcggatcgagaaggagcgcatgcggaggctcatggctgaagatgaggaggggtaccgcaagctcatcgaccagaagaaggacaagcgcctggcctacctcttgcagcagacagacgagtacgtggctaacctcacggagctggtgcggcagcacaaggctgcccaggtcgccaaggagaaaaagaagaaaaagaaaaagaagaaggcagaaaatgcagaaggacagacgcctgccattgggccggatggcgagcctctggacgagaccagccagatgagcgacctcccggtgaaggtgatccacgtggagagtgggaagatcctcacaggcacagatgcccccaaagccgggcagctggaggcctggctcgagatgaacccggggtatgaagtagctccgaggtctgatagtgaagaaagtggctcagaagaagaggaagaggaggaggaggaagagcagccgcaggcagcacagcctcccaccctgcccgtggaggagaagaagaagattccagatccagacagcgatgacgtctctgaggtggacgcgcggcacatcattgagaatgccaagcaagatgtcgatgatgaatatggcgtgtcccaggcccttgcacgtggcctgcagtcctactatgccgtggcccatgctgtcactgagagagtggacaagcagtcagcgcttatggtcaatggtgtcctcaaacagtaccagatcaaaggtttggagtggctggtgtccctgtacaacaacaacctgaacggcatcctggccgacgagatgggcctggggaagaccatccagaccatcgcgctcatcacgtacctcatggagcacaaacgcatcaatgggcccttcctcatcatcgtgcctctctcaacgctgtccaactgggcgtacgagtttgacaagtgggccccctccgtggtgaaggtgtcttacaagggatccccagcagcaagacgggcctttgtcccccagctccggagtgggaagttcaacgtcttgctgacgacgtacgagtacatcatcaaagacaagcacatcctcgccaagatccgttggaagtacatgattgtggacgaaggtcaccgcatgaagaaccaccactgcaagctgacgcaggtgctcaacacgcactatgtggcaccccgccgcctgctgctgacgggcacaccgctgcagaacaagcttcccgagctctgggcgctgctcaacttcctgctgcccaccatcttcaagagctgcagcaccttcgagcagtggtttaacgcaccctttgccatgaccggggaaaaggtggacctgaatgaggaggaaaccattctcatcatccggcgtctccacaaagtgctgcggcccttcttgctccgacgactcaagaaggaagtcgaggcccagttgcccgaaaaggtggagtacgtcatcaagtgcgacatgtctgcgctgcagcgagtgctctaccgccacatgcaggccaagggcgtgctgctgactgatggctccgagaaggacaagaagggcaaaggcggcaccaagaccctgatgaacaccatcatgcagctgcggaagatctgcaaccacccctacatgttccagcacatcgaggagtccttttccgagcacttggggttcactggcggcattgtccaagggctggacctgtaccgagcctcgggtaaatttgagcttcttgatagaattcttcccaaactccgagcaaccaaccacaaagtgctgctgttctgccaaatgacctccctcatgaccatcatggaagattactttgcgtatcgcggctttaaatacctcaggcttgatggaaccacgaaggcggaggaccggggcatgctgctgaaaaccttcaacgagcccggctctgagtacttcatcttcctgctcagcacccgggctggggggctcggcctgaacctccagtcggcagacactgtgatcatttttgacagcgactggaatcctcaccaggacctgcaagcgcaggaccgagcccaccgcatcgggcagcagaacgaggtgcgtgtgctccgcctctgcaccgtcaacagcgtggaggagaagatcctagctgcagccaagtacaagctcaacgtggaccagaaggtgatccaggccggcatgttcgaccagaagtcctccagccatgagcggcgcgccttcctgcaggccatcctggagcacgaggagcaggatgagagcagacactgcagcacgggcagcggcagtgccagcttcgcccacactgcccctccgccagcgggcgtcaaccccgacttggaggagccacctctaaaggaggaagacgaggtgcccgacgacgagaccgtcaaccagatgatcgcccggcacgaggaggagtttgatctgttcatgcgcatggacctggaccgcaggcgcgaggaggcccgcaaccccaagcggaagccgcgcctcatggaggaggacgagctcccctcgtggatcatcaaggacgacgcggaggtggagcggctgacctgtgaggaggaggaggagaagatgttcggccgtggctcccgccaccgcaaggaggtggactacagcgactcactgacggagaagcagtggctcaaggccatcgaggagggcacgctggaggagatcgaagaggaggtccggcagaagaaatcatcacggaagcgcaagcgagacagcgacgccggctcctccaccccgaccaccagcacccgcagccgcgacaaggacgacgagagcaagaagcagaagaagcgcgggcggccgcctgccgagaaactctcccctaacccacccaacctcaccaagaagatgaagaagattgtggatgccgtgatcaagtacaaggacagcagcagtggacgtcagctcagcgaggtcttcatccagctgccctcgcgaaaggagctgcccgagtactacgagctcatccgcaagcccgtggacttcaagaagataaaggagcgcattcgcaaccacaagtaccgcagcctcaacgacctagagaaggacgtcatgctcctgtgccagaacgcacagaccttcaacctggagggctccctgatctatgaagactccatcgtcttgcagtcggtcttcaccagcgtgcggcagaaaatcgagaaggaggatgacagtgaaggcgaggagagtgaggaggaggaagagggcgaggaggaaggctccgaatccgaatctcggtccgtcaaagtgaagatcaagcttggccggaaggagaaggcacaggaccggctgaagggcggccggcggcggccgagccgagggtcccgagccaagccggtcgtgagtgacgatgacagtgaggaggaacaagaggaggaccgctcaggaagtggcagcgaagaagactgagccccgacattccagtctcgaccccgagcccctcgttccagagctgagatggcataggccttagcagtaacgggtagcagcagatgtagtttcagacttggagtaaaactgtataaacaaaagaatcttccatatttatacagcagagaagctgtaggactgtttgtgactggccctgtcctggcatcagtagcatctgtaacagcattaactgtcttaaagagagagagagagaattccgaattggggaacacacgatacctgtttttcttttccgttgctggcagtactgttgcgccgcagtttggagtcactgtagttaagtgtggatgcatgtgcgtcaccgtccactcctcctactgtattttattggacaggtcagactcgccgggggcccggcgagggtatgtcagtgtcactggatgtcaaacagtaataaattaaaccaacaacaaaacgcacagcc

SEQ ID NO: 46528 - protein, 308 aa, Artificial Sequence
  derived and/or modified sequence
MTLNGGGSGAGGSRGGGQERERRRGSTPWGPAPPLHRRSMPVDERDLQAALTPGALTAAAAGTGTQGPRLDWPEDSEDSLSSGGSDSDESVYKVLLLGAPGVGKSALARIFGGVEDGPEAEAAGHTYDRSIVVDGEEASLMVYDIWEQDGGRWLPGHCMAMGDAYVIVYSVTDKGSFEKASELRVQLRRARQTDDVPIILVGNKSDLVRSREVSVDEGRACAVVFDCKFIETSAALHHNVQALFEGVVRQIRLRRDSKEANARRQAGTRRRESLGKKAKRFLGRIVARNSRKMAFRAKSKSCHDLSVL

SEQ ID NO: 46529 - DNA, 927 bp, Artificial Sequence
  derived and/or modified sequence
atgactctgaatgggggcgggtctggagctggtggatcccgaggtggaggacaggagagggaacgacgccgcgggtcaacaccatggggacctgcccccccgctgcaccggaggtcaatgccagtggacgagcgagatctgcaggccgctttgacaccgggcgccctcacagccgcggccgcaggcacggggacccaaggacctagattggactggcccgaagattccgaagatagcctgtcttctggaggcagcgactccgatgaatcagtgtataaagtccttctgctcggcgcccctggtgtcggcaaaagcgcccttgcaaggatctttggaggggtggaggacggccctgaggccgaggctgccgggcatacatacgatcgttctatcgttgttgatggcgaggaagcatccctgatggtgtatgatatatgggagcaagacggcgggcggtggttgccaggccattgtatggccatgggcgacgcgtacgtaattgtctattccgtcacagataagggaagcttcgaaaaggcgtcagagcttcgtgtgcagctacgacgggccaggcagactgacgacgtacctatcatcctggtggggaataaatcagatctggtccggagtagggaggttagcgttgacgaggggagagcgtgcgccgtcgtatttgactgtaagttcatcgaaacttccgctgcattgcatcataatgttcaggccctgttcgagggcgtggttcggcagatacggctgaggcgggactcaaaggaagcaaatgctcgaagacaggcaggtacacgccggcgtgagagccttgggaagaaggcaaagaggtttctggggagaattgtcgccaggaattccagaaagatggcctttagagccaagagcaaaagctgtcatgacctgagcgtgttatag

SEQ ID NO: 46530 - DNA, 927 bp, Artificial Sequence
  derived and/or modified sequence
atgacactgaatggcggaggttctggtgctgggggctcgcgaggcggcggtcaggagcgggaaaggagaagaggcagcacaccctggggtccagcaccgcccttacaccggaggtctatgcccgtggatgagagggacctacaggccgcgttaacaccgggagcattgaccgctgccgcagcagggaccggaacccaaggtccccgactggattggcccgaagattcagaggactctctatcaagtggcggctcagattctgatgaaagtgtgtacaaggtgctgctgctcggcgcacccggcgtcggcaagagcgcactggcccggattttcggcggcgtcgaggatgggcctgaggctgaagcagccggccacacctatgaccggtctattgtggttgacggcgaagaggcatctcttatggtctatgatatctgggaacaggatggcggcaggtggctgccaggacactgcatggctatgggggatgcctatgtaattgtttactcggttacagacaagggttcttttgagaaagccagcgagcttagggtacagctcaggagagccaggcagacagacgatgtcccaatcatactcgtaggaaacaaatccgacctcgtaagaagcagagaagtgagcgtggacgagggacgcgcctgtgcagtcgtgtttgactgcaagttcattgagacgtcagctgcgcttcatcacaatgtccaggccctgtttgagggcgtcgttagacagatccgcctgcgacgggactccaaggaggctaacgcacgaaggcaggctggtacacggcgcagagaatctctggggaaaaaagcaaagcgattcctgggccgcatagtggcgagaaattcacgtaagatggcctttcgagcaaagtcaaagagctgccatgatctttccgtgttgtag

SEQ ID NO: 46531 - DNA, 927 bp, Artificial Sequence
  derived and/or modified sequence
atgaccctgaatggaggcggcagcggggccggcggcagcagaggaggcggccaggagcgggagaggagaagaggcagcaccccctggggccctgccccacccctgcacagaagatccatgcctgtggatgagcgggacctgcaggccgccctgacccctggggccctgacagctgctgctgctggcaccggcacccagggcccccggctggactggccagaggacagcgaggacagcctgagcagcggcggcagtgacagtgatgagagcgtgtacaaggtgctgctgctgggcgcccctggggtgggcaagagcgccctggcccgcatctttggaggagtggaggatggccctgaggccgaggccgccggccacacctatgacaggagcatcgtggtggatggagaggaggccagcctgatggtgtatgacatctgggagcaggacggcggccgctggctgcccggccactgcatggccatgggagatgcctacgtgattgtgtacagcgtgacagacaagggcagctttgagaaggccagcgagctgcgggtgcagctgcggcgggcccggcagacagatgatgtgcccatcatcctggtgggcaacaagagtgacctggtgcgcagccgggaggtgtctgtggatgagggccgggcctgtgctgtggtgtttgactgcaagttcatcgagaccagcgctgccctgcaccacaacgtgcaggccctgtttgagggcgtggtgcggcagatccggctgcggcgggacagcaaggaggccaatgcccggcggcaggccggcacccggcggcgggagagcctgggcaagaaggccaagcgcttcctgggcagaattgtggccaggaacagcaggaagatggccttccgggccaagagcaagagctgccacgacctgtctgtgctgtag

SEQ ID NO: 46532 - DNA, 927 bp, Artificial Sequence
  derived and/or modified sequence
atgaccctgaacggcggcggcagcggcgccggcggcagccggggcggcggtcaggaaagggaacgcaggcggggctctaccccttgggggcctgcccccccactgcaccggaggagcatgccagtggacgagagggaccttcaagccgccctgactccaggagctctgacagccgctgccgctggaaccggtactcaaggaccaagactcgactggcccgaagatagcgaggatagtctatcctccggagggagcgacagcgatgaatctgtctataaggtacttttgctgggagcccccggagtcggtaagagtgccttggcccgcatttttggcggggtcgaggatgggcccgaggctgaagccgcaggccatacatacgaccgatccatcgtggtggacggggaagaagcctccctgatggtctatgacatctgggaacaggacggggggcggtggctgcctgggcactgcatggccatgggggacgcttacgtaatcgtgtacagtgtgactgacaaggggtcttttgagaaggcctcagagctgagagtccagcttcgccgtgcgcgccagaccgacgacgtgcccattatcttggtgggcaacaagtcagacctcgtgcgaagcagggaagtaagcgtggacgaggggcgtgcatgcgccgtcgtgtttgactgcaaatttatcgagaccagcgccgccttacaccataatgtgcaggccctcttcgaaggcgtcgttcgacagattagactgaggagagattctaaggaggcgaacgcccgtaggcaggccggcacccgaagacgggagtcgctgggcaagaaagccaagcggtttctcggccggattgttgcaagaaatagcaggaaaatggcattcagagccaagtccaagagctgccacgacttgagcgtactttag

SEQ ID NO: 46533 - DNA, 927 bp, Artificial Sequence
  derived and/or modified sequence
atgaccctgaacggcggcggcagcggcgccggcggcagccggggcggtggacaagaacgtgaacgccgccgcggcagcacaccttggggaccggctccccccctgcaccgccgctcaatgcctgtcgacgagcgggacctgcaggccgctcttactccgggagcgctgaccgctgccgcagccggcactggcacgcagggccctaggctcgactggcccgaggatagtgaggactctctgagctcaggcgggtcagacagcgatgaatctgtgtataaagtgctgttgctgggtgcccctggcgtcgggaaaagcgcactggcacggatttttggcggggtggaggatggcccggaggccgaggcagcagggcatacttacgaccggagcatcgtggtggatggagaggaagcatccctgatggtatatgatatctgggagcaagatggaggaagatggctccccgggcactgtatggctatgggggatgcctatgtgatcgtttactcagtgacggacaaaggatctttcgagaaggcatctgagctgcgggtgcaattgcgtcgtgctcgccagacagatgacgtcccaataattctggtaggtaataaaagcgacctggtgagatctcgggaagtcagtgtggatgagggaagggcctgcgccgtcgtgttcgattgtaaattcatagagacatccgcagcgcttcaccataacgttcaggctctgttcgagggcgtggtgaggcagataaggttacgcagggattcgaaggaggccaacgctcgacggcaggcagggactcggcggagagaatccttaggaaagaaagctaaacggttccttgggaggattgtcgcgagaaattcccggaagatggcttttcgcgccaagtctaagtcctgccacgacctttctgtgctctag

SEQ ID NO: 46534 - DNA, 927 bp, Artificial Sequence
  derived and/or modified sequence
atgacactgaacggcggtgggtctggtgctgggggtagccgcggtggcggacaggaacgggagcgcagaagagggtcgactccatggggccctgcgcctcctctgcatagacggagcatgcctgtcgacgagcgcgacctgcaggctgcattgacccccggagctctgaccgcggctgccgcagggactggtacccagggtccgagacttgattggccagaggactctgaggatagtttaagctccggcggaagcgacagcgatgagtccgtctataaagtcttgctgcttggcgcacccggtgtgggtaagtccgccttagctaggatctttggtggagttgaggacggccctgaggccgaagccgcagggcacacgtatgatcgctccatcgtagtcgatggtgaagaggccagtctaatggtgtatgacatatgggaacaggacggtggccgatggctaccaggtcactgtatggccatgggcgatgcgtacgtcattgtctattccgtcaccgataaaggtagttttgagaaggccagcgaactgagggtgcagctcaggagagcacgccaaacagatgacgtccctattatactggtgggtaacaagagcgatctcgtgcgttcaagagaagtgagcgttgatgaggggcgagcttgcgccgtcgtgtttgattgtaagttcatcgagacgagcgctgcccttcaccataacgtgcaagcattgttcgagggagtggtcaggcaaattcgtcttaggagggacagcaaggaggctaatgcgaggcgtcaagctggaacacgccgacgtgaatcactcggaaaaaaggccaagcggtttctgggcaggattgtagcacggaactcgcggaagatggcgtttcgtgctaagtccaagtcgtgtcatgatctcagtgtgctgtag

SEQ ID NO: 46535 - DNA, 927 bp, Artificial Sequence
  derived and/or modified sequence
atgaccctcaatggtggcggatccggcgcaggaggcagcaggggagggggtcaggaaagggagcgcagaagagggtccaccccgtggggcccagctccccctctgcacagacggagtatgcccgttgacgaacgcgatctgcaggcagccctgacacccggagcgctgacggctgctgccgctggaacaggtacacagggcccaagattggactggcctgaggactccgaagattccttgtcgtctgggggaagcgacagcgatgagtccgtgtataaagtcttacttcttggggctcctggcgtggggaagtctgctttagccaggatatttggtggggttgaggatggcccagaagccgaagctgccggtcacacctacgaccgctccatagttgtggacggcgaagaagcctccttaatggtttacgatatctgggagcaggacggcggtaggtggctgcctggacactgtatggcaatgggggatgcctacgttatcgtctacagcgttactgataagggtagttttgaaaaagcttccgagttacgcgtccagctgaggcgtgcacgccagaccgatgacgtccccataatcctggtagggaataagagtgacctggtgcggtcccgtgaagtgtcagtggacgagggaagagcctgcgcagtcgtttttgactgcaagtttatagagacctctgcagcactccaccataatgtccaggctctgttcgagggcgtcgtcagacagattcgtctaagacgcgattcaaaagaggctaatgccagacgtcaggctgggactagaagaagggaatctctcggcaaaaaggcgaaaagattcctcggcaggatagtcgcccgtaattcccgcaagatggccttcagagctaaatctaagtcttgtcatgacctttctgtgctatag

SEQ ID NO: 46536 - DNA, 1569 bp, Artificial Sequence
  derived and/or modified sequence
attcccctggtgggggtggacagacacgtcagcccccgcagcagcgtggaccgggggcgggagcgggggcgggtggaggcttaaataggcggctctggagccagagcccagtgcgggctgagaaggcggtggctgcagcagcagcggcggcggaaaccctaaagtccgagtccggactacgagtgcgtggcctcctaatccggatcctagtcctgagcgtgtctgtgtgcgagtggacggtcccggacgcgatgaccctgaacggcggcggcagcggagcgggcgggagccgcggtgggggccaggagcgcgagcgccgtcggggcagcacaccctggggccccgccccgccgctgcaccgccgcagcatgccggtggacgagcgcgacctgcaggcggcgctgaccccgggtgccctgacggcggccgcggccgggacggggacccagggtcccaggctggactggcccgaggactccgaggactcgctcagctcagggggcagcgactcagacgagagcgtttacaaggtgctgctgctgggggcgcccggcgtgggcaagagcgccctggcgcgcatcttcggcggtgtggaggacgggcctgaagcagaggcagcagggcacacctatgatcgctccattgtagtggacggagaagaggcatcactcatggtctacgacatttgggagcaggacgggggccgctggttgcccggccactgcatggccatgggggatgcctatgtcattgtgtactcagtgacggacaagggcagcttcgagaaggcctcagaactgcgggtccagctgcggcgtgcacggcaaacagatgatgtgcccatcatcctcgtgggcaacaagagcgacctggtgcgctctcgtgaggtctcggtggatgagggccgggcctgcgcggtggtctttgactgcaagttcattgagacatcagcggcattgcaccacaatgtccaggcgctgtttgaaggtgtcgtgcgccagatacgcctgcgcagggacagcaaagaagccaacgcacgacggcaagcaggcacccggaggcgagagagccttggcaaaaaggcgaagcgcttcttgggccgcatcgtagctcgtaacagccgcaagatggcctttcgcgccaaatccaagtcctgccacgacctctcggttctctaggtcccacccgctcccactatggtgggagacgaacggaagggttggtgggctggcccagccaactgccccgggtgcctcagagcaggctcagactctgggtccctcggagctgccagccgggcacccccaacctcatggtcatggacagatagacagtgctgccctgcgaagtggctctcaggggccagtgagggctgggcccacagagatgcatgcgcaggctcatatgcgtcccaagcagccgcagcgcagccgccgggcaggcctgcgtgccgggagaggactctgccttttttcacagcccgggtgtgcctgccctggagggaggctcttcagtgcggtagctatttgtttacatgcagatttttgtaataaaggctatttcctgata

SEQ ID NO: 46537 - DNA, 1476 bp, Artificial Sequence
  derived and/or modified sequence
cagtgcgggctgagaaggcggtggctgcagcagcagcggcggcggaaaccctaaagtccgagtccggactacgagtgcgtggcctcctaatccggatcctagtcctgagcgtgtctgtgtgcgagtggatcccctagacggtcccggacgcgatgaccctgaacggcggcggcagcggagcgggcgggagccgcggtgggggccaggagcgcgagcgccgtcggggcagcacaccctggggccccgccccgccgctgcaccgccgcagcatgccggtggacgagcgcgacctgcaggcggcgctgaccccgggtgccctgacggcggccgcggccgggacggggacccagggtcccaggctggactggcccgaggactccgaggactcgctcagctcagggggcagcgactcagacgagagcgtttacaaggtgctgctgctgggggcgcccggcgtgggcaagagcgccctggcgcgcatcttcggcggtgtggaggacgggcctgaagcagaggcagcagggcacacctatgatcgctccattgtagtggacggagaagaggcatcactcatggtctacgacatttgggagcaggacgggggccgctggttgcccggccactgcatggccatgggggatgcctatgtcattgtgtactcagtgacggacaagggcagcttcgagaaggcctcagaactgcgggtccagctgcggcgtgcacggcaaacagatgatgtgcccatcatcctcgtgggcaacaagagcgacctggtgcgctctcgtgaggtctcggtggatgagggccgggcctgcgcggtggtctttgactgcaagttcattgagacatcagcggcattgcaccacaatgtccaggcgctgtttgaaggtgtcgtgcgccagatacgcctgcgcagggacagcaaagaagccaacgcacgacggcaagcaggcacccggaggcgagagagccttggcaaaaaggcgaagcgcttcttgggccgcatcgtagctcgtaacagccgcaagatggcctttcgcgccaaatccaagtcctgccacgacctctcggttctctaggtcccacccgctcccactatggtgggagacgaacggaagggttggtgggctggcccagccaactgccccgggtgcctcagagcaggctcagactctgggtccctcggagctgccagccgggcacccccaacctcatggtcatggacagatagacagtgctgccctgcgaagtggctctcaggggccagtgagggctgggcccacagagatgcatgcgcaggctcatatgcgtcccaagcagccgcagcgcagccgccgggcaggcctgcgtgccgggagaggactctgccttttttcacagcccgggtgtgcctgccctggagggaggctcttcagtgcggtagctatttgtttacatgcagatttttgtaataaaggctatttcctgatagtcatg

SEQ ID NO: 46538 - DNA, 927 bp, Artificial Sequence
  derived and/or modified sequence
atgaccctgaacggcggcggcagcggcgccggcggcagcagaggcggcggccaggagagagagagaagaagaggcagcaccccctggggccccgccccccccctgcacagaagaagcatgcccgtggacgagagagacctgcaggccgccctgacccccggcgccctgaccgccgccgccgccggcaccggcacccagggccccagactggactggcccgaggacagcgaggacagcctgagcagcggcggcagcgacagcgacgagagcgtgtacaaggtgctgctgctgggcgcccccggcgtgggcaagagcgccctggccagaatcttcggcggcgtggaggacggccccgaggccgaggccgccggccacacctacgacagaagcatcgtggtggacggcgaggaggccagcctgatggtgtacgacatctgggagcaggacggcggcagatggctgcccggccactgcatggccatgggcgacgcctacgtgatcgtgtacagcgtgaccgacaagggcagcttcgagaaggccagcgagctgagagtgcagctgagaagagccagacagaccgacgacgtgcccatcatcctggtgggcaacaagagcgacctggtgagaagcagagaggtgagcgtggacgagggcagagcctgcgccgtggtgttcgactgcaagttcatcgagaccagcgccgccctgcaccacaacgtgcaggccctgttcgagggcgtggtgagacagatcagactgagaagagacagcaaggaggccaacgccagaagacaggccggcaccagaagaagagagagcctgggcaagaaggccaagagattcctgggcagaatcgtggccagaaacagcagaaagatggccttcagagccaagagcaagagctgccacgacctgagcgtgctgtag

SEQ ID NO: 46539 - protein, 471 aa, Artificial Sequence
  derived and/or modified sequence
MWRGLWTLAAQAARGPRRLCTRRSSGAPAPGSGATIFALSSGQGRCGIAVIRTSGPASGHALRILTAPRDLPLARHASLRLLSDPRSGEPLDRALVLWFPGPQSFTGEDCVEFHVHGGPAVVSGVLQALGSVPGLRPAEAGEFTRRAFANGKLNLTEVEGLADLIHAETEAQRRQALRQLDGELGHLCRGWAETLTKALAHVEAYIDFGEDDNLEEGVLEQADIEVRALQVALGAHLRDARRGQRLRSGVHVVVTGPPNAGKSSLVNLLSRKPVSIVSPEPGTTRDVLETPVDLAGFPVLLSDTAGLREGVGPVEQEGVRRARESCNFLATVVASVGAQSPSDSSQRLLLVLNKSDLLSPEGPGPGPDLPPHLLLSCLTGEGLDGLLEALRKELAAVCGDPSTDPPLLTRARHQHHLQGCLDALGHYKQSKDLALAAEALRVARGHLTRLTGGGGTEEILDIIFQDFCVGK

SEQ ID NO: 46540 - DNA, 456 bp, Artificial Sequence
  derived and/or modified sequence
atgtggagaggcctgtggaccctggccgcccaggccgccagaggccccagaagactgtgcaccagaagaagcagcggcgcccccgcccccggcagcggcgccaccatcttcgccctgagcagcggccagggcagatgcggcatcgccgtgatcagaaccagcggccccgccagcggccacgccctgagaatcctgaccgcccccagagacctgcccctggccagacacgccagcctgagactgctgagcgaccccagaagcggcgagcccctggacagagccctggtgctgtggttccccggcccccagagcttcaccggcgaggactgcgtggagttccacgtgcacggcggccccgccgtggtgagcggcgtgctgcaggccctgggcagcgtgcccggcctgagacccgccgagcccggcgccggcagaggcagcgcccagggctgcacctag

SEQ ID NO: 46541 - DNA, 1416 bp, Artificial Sequence
  derived and/or modified sequence
atgtggagaggcctgtggaccctggccgcccaggccgccagaggccccagaagactgtgcaccagaagaagcagcggcgcccccgcccccggcagcggcgccaccatcttcgccctgagcagcggccagggcagatgcggcatcgccgtgatcagaaccagcggccccgccagcggccacgccctgagaatcctgaccgcccccagagacctgcccctggccagacacgccagcctgagactgctgagcgaccccagaagcggcgagcccctggacagagccctggtgctgtggttccccggcccccagagcttcaccggcgaggactgcgtggagttccacgtgcacggcggccccgccgtggtgagcggcgtgctgcaggccctgggcagcgtgcccggcctgagacccgccgaggccggcgagttcaccagaagagccttcgccaacggcaagctgaacctgaccgaggtggagggcctggccgacctgatccacgccgagaccgaggcccagagaagacaggccctgagacagctggacggcgagctgggccacctgtgcagaggctgggccgagaccctgaccaaggccctggcccacgtggaggcctacatcgacttcggcgaggacgacaacctggaggagggcgtgctggagcaggccgacatcgaggtgagagccctgcaggtggccctgggcgcccacctgagagacgccagaagaggccagagactgagaagcggcgtgcacgtggtggtgaccggcccccccaacgccggcaagagcagcctggtgaacctgctgagcagaaagcccgtgagcatcgtgagccccgagcccggcaccaccagagacgtgctggagacccccgtggacctggccggcttccccgtgctgctgagcgacaccgccggcctgagagagggcgtgggccccgtggagcaggagggcgtgagaagagccagagagagctgcaacttcctggccaccgtggtggccagcgtgggcgcccagagccccagcgacagcagccagagactgctgctggtgctgaacaagagcgacctgctgagccccgagggccccggccccggccccgacctgcccccccacctgctgctgagctgcctgaccggcgagggcctggacggcctgctggaggccctgagaaaggagctggccgccgtgtgcggcgaccccagcaccgacccccccctgctgaccagagccagacaccagcaccacctgcagggctgcctggacgccctgggccactacaagcagagcaaggacctggccctggccgccgaggccctgagagtggccagaggccacctgaccagactgaccggcggcggcggcaccgaggagatcctggacatcatcttccaggacttctgcgtgggcaagtag

SEQ ID NO: 46542 - DNA, 456 bp, Artificial Sequence
  derived and/or modified sequence
atgtggcgcgggctttggacattggccgcacaggcagcccgcgggcctcggcggctgtgtacgagacgctcaagtggagcccccgcacccggctccggagcaaccatcttcgccttgagcagcggtcagggccgctgtggtatcgccgtgatacgtacaagcggccccgcctctgggcacgccctgcgcatcctgacagcacctagggacctgcctctcgctcgccacgctagtcttaggctcctgtctgacccgcgatctggcgaacccctagaccgcgccctggtcctctggttcccaggacctcagagtttcaccggcgaagactgcgttgagtttcacgtgcatggcggtcctgccgtggtgtcgggggttttgcaggctctgggctccgtcccaggtctgaggccagccgagccaggggccgggaggggctcggcacagggctgtacctag

SEQ ID NO: 46543 - DNA, 1416 bp, Artificial Sequence
  derived and/or modified sequence
atgtggcgtggcctctggacgctggccgcacaggctgcgcggggccctcgtaggctgtgtacccgccgatcatcaggggcacctgctcccggatcgggtgctacaatcttcgccctgtcctcaggccaaggccggtgtggtatagccgtgatcaggacctctgggcccgccagtgggcacgccctgcggatcctgactgccccccgggatctaccgctggcacggcacgcttccctccgactgctatccgaccccaggtccggtgagcctctcgatagagccctggtgctctggttcccgggcccacagtctttcaccggggaggactgcgtagaatttcatgtccacggaggccctgccgtagtctcaggcgttctccaggctttgggaagcgtgccagggctcagaccggccgaggcgggtgagtttacacggcgcgccttcgccaacgggaagctgaacctgacagaggttgaaggcttggcggatctgatccatgcagagactgaagctcaacgcaggcaggcactgcggcagctcgatggcgaattggggcatttatgtaggggctgggctgagaccctgaccaaggccctcgctcatgtggaggcttacatagattttggagaggatgacaacttagaggagggggtgttggaacaggctgatatagaagtccgggcgctgcaggtggccttgggggcccatttacgggatgccagaagaggtcagaggcttagatcaggggtgcacgtcgttgtgacaggcccgccaaacgccggtaagtctagtctcgtgaacctgctgtctcggaagcccgtgtccattgtctctcctgagccaggcacgactagggatgtgttggagacccctgtcgacctggcagggttcccggtgctgttgagtgacacagcaggactcagggagggtgtggggcctgtcgagcaggagggagtccggagggctagggaatcctgcaattttctcgccacagtggtcgcctcagtcggggcccagtccccatccgatagctcgcagagactcctcttggtgctgaataaaagcgatctcctgtcccccgagggcccaggaccaggacccgatctgcccccacacctgctgctgtcctgcctcactggagaggggctggacggcttgcttgaggctctcaggaaggagttggctgctgtgtgtggcgaccccagcacagacccgccactcttaacaagagcaaggcatcaacaccatctgcagggctgtctcgatgcgctggggcattacaagcaaagcaaggatctggcactggccgcagaagctttacgagtggcccggggccatctgacaagacttaccggggggggaggaacagaagaaatccttgatattattttccaagacttctgcgtgggcaagtag

SEQ ID NO: 46544 - DNA, 483 bp, Artificial Sequence
  derived and/or modified sequence
ggcaggcgggtcgcaggttgtaaatccatgtggcgggggctttggaccctggcggcccaagcggcacgtgggcctcgcagattgtgcacgcgccggagcagcggcgcaccagcccccggctccggcgccaccatcttcgcgctaagctctggccaaggccgctgcggcatcgcagtgatccggaccagcggccccgccagcggccacgccctccgaattctcacagcaccccgagacctgccccttgctcgccacgccagcctgcgcctgctcagcgatccccgctccggggagcctctggaccgcgcactggtgctctggttcccaggtccccagagtttcaccggtgaggactgcgtggagttccacgtgcatggaggcccggcagtggtgagcggcgtcctgcaggccttgggcagcgtgccagggcttcgaccggcggagccaggcgcgggcagaggctccgctcaggggtgcacgtag

SEQ ID NO: 46545 - DNA, 2493 bp, Artificial Sequence
  derived and/or modified sequence
gcccagacttgaagccacacaggcaggtcgggcaggcgggtcgcaggttgtaaatccatgtggcgggggctttggaccctggcggcccaagcggcacgtgggcctcgcagattgtgcacgcgccggagcagcggcgcaccagcccccggctccggcgccaccatcttcgcgctaagctctggccaaggccgctgcggcatcgcagtgatccggaccagcggccccgccagcggccacgccctccgaattctcacagcaccccgagacctgccccttgctcgccacgccagcctgcgcctgctcagcgatccccgctccggggagcctctggaccgcgcactggtgctctggttcccaggtccccagagtttcaccggtgaggactgcgtggagttccacgtgcatggaggcccggcagtggtgagcggcgtcctgcaggccttgggcagcgtgccagggcttcgaccggcggaggcaggcgagttcaccagacgggcgttcgccaatgggaagctgaacctgaccgaagtggaggggctggcggaccttatccacgcggaaacagaggcgcagcggcggcaggccctcaggcagctggacggagagctgggccacctctgccgtggctgggccgagaccctcaccaaagctctggcccacgtggaggcctatatcgatttcggcgaggatgacaacctggaggagggggtcctggagcaagccgacatcgaagtacgggcactgcaggtggccctgggtgcacatctacgagatgccaggcgcgggcagaggctccgctcaggggtgcacgtagtggtcactggaccccccaatgcgggcaagagcagcctagtgaacctgctcagtcggaagcctgtgtccatcgtgtccccggagccagggaccacccgtgacgtgctggagaccccagtcgacctggccggatttcctgtgctgctgagcgacacggctgggttgcgggagggcgtggggcccgtggagcaggagggcgtgcggcgcgcccgggagagttgcaacttcctggccaccgtcgtagcctctgtgggagcccagagccccagtgacagcagccagcgcctcctcctggtgctgaacaagtcggacctgctgtccccggagggcccaggtcccggtcctgacctgcccccgcacctgctgctgtcctgtctgacgggagaggggctggacggcctcctggaggcgctgaggaaggagctagctgcagtgtgtggggacccgtccacagatcccccgctgctgacccgagcaaggcaccagcaccacctccagggttgcctggatgccctcggccactacaagcagtcaaaagacctggccctggcggcagaggcgctgcgggtggcccggggtcacctgacccggctcacaggtggagggggtaccgaggagatcctggacatcatcttccaggacttctgtgtgggcaagtgacgggatccagggaagtcgcacccaagctgcgtggagacccaggagcctcgggggatctggaaacagtttaggccaattgggattctcattcgcctgggaaagaacttgattctcaaatagtgaagcaacacagctgagaggtagtgagatccctgcagggactccctggagattcaggccctggaatggggctgaatggaggtcccgttcgacccttgatgctggggcatccgggttgggatggagataggaggatctcagtatatttgtttcgtagttttttatttattttgcaaataccaaaggaatgtaaaaaaaactcaggtgatctagaagtgtttattttcttcccttcccttcccttccctttccttttccctttccctttccccttccccttccccttccccttcccctacccttccctcctctgtctattgcccaggctggagtgcagtggtgcgaccttggctcactgcaacctccatctccggggctcaagcgcttctcctgcctcagcctcctgagtagctgggattacaggcatgtgccagcatgcccggctaatttttttctttttttgagacagagtctcgctctgtcacccaggctggagttcagtggtgcgacctcggcttactgcaacctccacctcccgggttcaagtgattctcctgcctcagcctcttgagtagctgggactacaggcgcacaccaccacgccaggctaatttttgtatttttagtagagacaaggtttcaccatgttgaccaggctggtcttgaactccttgacctcaggtaatctgcctaccttggcctcccaaagtgctgggatcacaggcgtgagctatcacacctggccccagaagtgtttcaacatggaaattttccttagcccttctgtggttgtcatggcttaatgtgtgtctttccagaactttgaatgtttgcatacttgtggatgtacctttcaaatatgtttgtcttgtgtatcatatataaatggtattgtgttca

SEQ ID NO: 46546 - DNA, 456 bp, Artificial Sequence
  derived and/or modified sequence
atgtggaggggcctgtggaccctggccgcccaggccgcccggggcccccggcggctgtgcacccggcgcagcagcggggccccagcccctggcagcggggccaccatctttgccctgagcagcggccagggccgctgtggcattgctgtgatccgcaccagcggccctgccagcggccacgccctgcgcatcctgacagccccccgggacctgcccctggcccggcatgccagcctgcggctgctgagtgaccccaggtctggagagcccctggaccgggccctggtgctgtggttccctggcccccagagcttcaccggggaggactgtgtggagttccacgtgcacggcggccctgctgtggtgtctggagtgctgcaggccctgggctctgtgcccggcctgcggcctgctgagcccggggccggccggggcagcgcccagggctgcacctag

SEQ ID NO: 46547 - DNA, 1416 bp, Artificial Sequence
  derived and/or modified sequence
atgtggaggggcctgtggaccctggccgcccaggccgcccggggcccccggcggctgtgcacccggcgcagcagcggggccccagcccctggcagcggggccaccatctttgccctgagcagcggccagggccgctgtggcattgctgtgatccgcaccagcggccctgccagcggccacgccctgcgcatcctgacagccccccgggacctgcccctggcccggcatgccagcctgcggctgctgagtgaccccaggtctggagagcccctggaccgggccctggtgctgtggttccctggcccccagagcttcaccggggaggactgtgtggagttccacgtgcacggcggccctgctgtggtgtctggagtgctgcaggccctgggctctgtgcccggcctgcggcctgctgaggccggggagttcacccggcgggcctttgccaacgggaagctgaacctgacagaggtggagggcctggccgacctgattcatgctgagacagaggcccagaggcggcaggccctgcggcagctggatggagagctgggccacctgtgccggggctgggccgagaccctgaccaaggccctggcccacgtggaggcctacatcgactttggagaagatgacaacctggaggagggcgtgctggagcaggccgacatcgaggtgcgggccctgcaggtggccctgggcgcccacctgagagatgcccggcggggccagaggctgcggtctggagtgcacgtggtggtgactggacctccaaatgctgggaagagcagcctggtgaacctgctgagcaggaagcctgtgtccatcgtgtccccagagcccggcaccaccagagatgtgctggagacccctgtggacctggccggcttccctgtgctgctgagtgacacagctggcctgcgggagggcgtgggccctgtggagcaggagggcgtgcggcgggcccgggagagctgcaacttcctggccaccgtggtggcctctgtgggcgcccagagccccagcgacagcagccagaggctgctgctggtgctgaacaagagtgacctgctgagccctgagggccctggccctggccctgacctgcccccccacctgctgctgagctgcctgactggagagggcctggatggcctgctggaggccctgaggaaggagctggccgctgtgtgtggggaccccagcacagatcctcccctgctgacccgggcccggcaccagcaccacctgcagggctgcctggatgccctgggccactacaagcagagcaaggacctggccctggccgctgaggccctgcgggtggcccggggccacctgacccggctgactggaggcggcggcacagaggagatcctggacatcatcttccaggacttctgtgtgggcaagtag

SEQ ID NO: 46548 - DNA, 456 bp, Artificial Sequence
  derived and/or modified sequence
atgtggcggggcctgtggaccctggccgcccaggccgcccggggccccaggaggctctgtaccaggagaagttctggtgcacccgctccgggaagtggggccacaattttcgcgctttcttcagggcagggacgctgcggaatcgctgtgatcaggaccagtgggccagcttctgggcacgctctgcgtatcctgactgcaccaagggatctacccctggctaggcacgcatcactgagactgctgtcggaccccagatccggggagcctctggacagggccctcgtgctgtggttcccaggccctcagagcttcaccggcgaagattgcgtggaattccatgtgcatggggggccggctgtggtgtctggtgtgctgcaggctctgggatccgtgcctggtcttcgacccgccgaacctggcgccgggagaggatcagctcagggttgcacctag

SEQ ID NO: 46549 - DNA, 1416 bp, Artificial Sequence
  derived and/or modified sequence
atgtggcggggcctgtggaccctggccgcccaggccgcccggggcccacggcgtctctgtacaaggcgcagttctggtgcgcccgcccctggaagtggggccacgatctttgccctcagcagtggccaagggcggtgtggcattgccgtgatccgcaccagtgggcccgcttcgggtcacgctcttcggatccttactgcccctcgtgatctgcccctggctcgccacgcgagccttagattactgagcgacccacgctctggggaaccgctggatcgcgccctggtgttatggttccctggtcctcagtcgttcaccggcgaggattgtgtggagttccacgtccacggcggccccgccgtcgtttctggagtgcttcaggctctgggctcagttcccgggttacgcccagccgaagcaggcgaatttaccagaagggcttttgccaatggcaaactgaatttgaccgaggtggaaggcctggcggatctcattcatgctgagacggaggcccaaaggcgacaggccttgcgtcagctagacggagagctagggcatctctgccggggctgggccgaaacgctcacgaaagcccttgctcatgtcgaggcttatatcgactttggggaggatgacaacttggaagagggggtcctggaacaggcagacatcgaagtccgagctctgcaggtggccctgggggcccatctgagagacgctcgcaggggccagcgattgagaagtggagtccacgtcgtcgtgacgggcccccctaatgccgggaagtcaagtctggtcaatctactgtcccgaaagcccgttagcatcgtctccccagagcctggtactactagagatgtgctcgaaacaccagtcgatctggcaggattcccagttctgcttagcgatacagctggcctgcgcgagggggtgggccctgtcgagcaagagggtgtccgcagggcccgagagtcttgtaattttctggccacagtagtggcctcagtaggagctcagagcccttctgactcaagccagcgcctactcttagtcctgaataagtccgatctgctgtcccccgaagggccagggcccggaccagacttgccaccccatttactcctgtcctgcttgaccggggaagggctggacgggctgctcgaagctctgaggaaggagctggcagccgtgtgtggagacccctccacagaccccccattgctgacacgcgctcggcaccagcaccacctgcaggggtgtctggacgcccttggccactacaaacagtctaaggacctcgcactagctgctgaggccctgcgcgtagcccgaggtcatctgacgcgcctgactggaggcgggggtactgaggaaatcctggatatcattttccaagacttttgcgtgggcaagtag

SEQ ID NO: 46550 - DNA, 456 bp, Artificial Sequence
  derived and/or modified sequence
atgtggcgtggactctggaccctggcggctcaggccgcacggggtccacgcaggctgtgcacccggaggtcctccggggctccagctcccggttctggtgctaccatattcgctctttcttcggggcagggtcggtgtgggatagccgtaataagaacctcaggtcccgcttccggccacgctctgcgtatcctgaccgcccctcgggaccttcccctcgcccgtcacgcctcacttagactcctgagtgatcctcgtagcggcgaaccactggatagagccctggtgctgtggtttccaggccctcaaagtttcacaggtgaggattgcgtggagtttcacgtacacgggggtcccgcagttgtgtcaggagtcctccaagctctgggttctgtgcccggattgcgtcccgcagagcctggagccggacgtgggtctgctcagggatgcacctag

SEQ ID NO: 46551 - DNA, 1416 bp, Artificial Sequence
  derived and/or modified sequence
atgtggaggggtctctggacccttgcagctcaggctgcgaggggaccccgtcgcctgtgcacccggcgaagttccggggctcccgcaccaggctctggcgctactattttcgcattgtcatctgggcaaggacgctgcgggatagccgtcattaggacatctggcccagcctccggccatgcccttcggattctaacagctcccagagatttgcctctagcccgacatgcaagcctgcgtctgctctcagatcctcggagcggcgagcctctggatcgcgcattggtgttgtggttcccaggtcctcagtccttcaccggcgaagactgcgtggagttccacgtgcatggagggcctgcggttgtgtctggcgtgctgcaggctctgggtagcgtcccaggcctgcgacctgccgaggccggtgaattcacgaggagggcatttgcaaatggaaagttaaatctaaccgaagtcgaagggctggccgacctgatccacgctgagaccgaggcacaacggaggcaagccctgaggcaactggacggtgagctggggcatttgtgccgaggctgggcggagaccctgactaaggccctcgcgcacgtggaagcctatatcgactttggggaagacgataacctggaggaaggtgtgctggagcaggcagatatcgaagtgagggctctgcaggtggccttgggcgcacatctcagagatgccagacgaggccagcgtctccgaagtggcgtccacgttgtggtgactggcccaccaaacgccggaaagagttctctcgttaatctacttagcaggaagccagtgagcatcgtttcccctgagccaggcactacccgcgacgtcctcgaaaccccagttgatctagctgggttcccggtccttctgtccgacacggccggtctccgggagggtgtaggtcccgtagagcaagagggagtgcgcagagctcgagaatcttgcaactttcttgcaaccgtggtcgcttcagtgggtgcccagagcccttctgatagctctcagagactgttgttggttcttaataagtcagatctgttgtcccccgagggtcccggtcccggaccagatctgcctccacacctgctccttagctgccttactggggaagggctggacgggctgctggaggcactacggaaagaattggcagcagtgtgcggcgacccaagcacggatcctcccctcctgacaagggccagacaccagcaccatctccaggggtgcctggacgcactgggacattacaaacagagcaaagatctggctttggctgcagaggcactgcgggtcgctaggggccatcttacgcgactgacaggaggcggagggactgaggagatcctcgacatcatattccaggacttttgcgtcggaaaatag

SEQ ID NO: 46552 - protein, 365 aa, Artificial Sequence
  derived and/or modified sequence
MDTGVIEGGLNVTLTIRLLMHGKEVGSIIGKKGESVKKMREESGARINISEGNCPERIITLAGPTNAIFKAFAMIIDKLEEDISSSMTNSTAASRPPVTLRLVVPASQCGSLIGKGGCKIKEIRESTGAQVQVAGDMLPNSTERAITIAGIPQSIIECVKQICVVMLETLSQSPPKGVTIPYRPKPSSSPVIFAGGQDRYSTGSDSASFPHTTPSMCLNPDLEGPPLEAYTIQGQYAIPQPDLTKLHQLAMQQSHFPMTHGNTGFSGIESSSPEVKGYWGLDASAQTTSHELTIPNDLIGCIIGRQGAKINEIRQMSGAQIKIANPVEGSTDRQVTITGSAASISLAQYLINVRLSSETGGMGSS

SEQ ID NO: 46553 - DNA, 1098 bp, Artificial Sequence
  derived and/or modified sequence
atggatactggagtgatcgagggagggctgaacgtcaccctgaccattagattgctgatgcacgggaaggaggtggggagcatcataggcaagaagggtgaatcagtgaagaaaatgagagaggagtccggagcccgcattaatatctctgagggaaattgcccagagcggattattactcttgccggacctactaatgccatatttaaggctttcgctatgatcatcgacaaactcgaggaggatataagtagtagcatgacgaactcaacggccgcaagccgcccaccagtcacattacggctggtcgtgcctgccagtcagtgtgggtccctgatagggaaaggggggtgtaagataaaggagatcagggagagtacaggtgctcaggtgcaggtggccggcgacatgttgccaaactccaccgagcgcgccataaccatcgctgggattccccagtccattattgaatgtgtcaagcagatttgcgtcgtgatgttggaaaccttgtctcagtccccaccaaaaggtgtcacaattccatacaggccgaaaccgagttcctctcccgtgattttcgccggaggccaggacaggtatagcactggaagcgactccgcttccttcccccatacaacgccgagcatgtgcctgaatcctgaccttgagggccctccactggaggcctacacgatacaggggcagtatgcgatcccgcagcctgacctgactaagctgcaccagctggccatgcagcagagccacttccccatgactcacggaaatacaggtttcagcggtatcgagagtagctcacccgaggtgaagggttactggggcttggacgcctctgcgcagactacttcccatgagctgacaattcccaatgaccttattggatgcattatcggcagacaaggcgcgaagattaacgagatcaggcagatgtctggagcccagatcaaaatagctaatccggtggaagggtccacggatcgacaagttacaatcacgggatcagccgcctccatttctttggcccagtatttaataaatgtgcggttatcttcggagacaggcggaatgggctcatcctag

SEQ ID NO: 46554 - DNA, 1098 bp, Artificial Sequence
  derived and/or modified sequence
atggacacaggagtcatcgagggcggcctgaatgtgaccctgaccatccggctgctgatgcacggcaaggaggtgggcagcatcatcggcaagaagggggagagcgtgaagaagatgagggaggagagcggggcccgcatcaacatcagcgagggcaactgcccagagcgcatcatcaccctggccggccccaccaatgccatcttcaaggcctttgccatgatcatcgacaagctggaggaggacatcagcagctccatgaccaacagcacagctgccagccggccccctgtgaccctgcggctggtggtgcctgccagccagtgtggcagcctgattggaaaaggaggctgcaagatcaaggagatccgggagagcactggagcccaggtgcaggtggccggggacatgctgcccaacagcacagagcgggccatcaccatcgccggcatcccccagagcatcattgaatgtgtgaagcagatctgtgtggtgatgctggagaccctgagccagagcccccccaagggcgtgaccatcccctaccggcccaagcccagcagcagccctgtgatctttgctgggggccaggaccgctacagcacaggcagtgacagcgccagcttcccccacaccacccccagcatgtgcctgaacccagacctggagggcccccccctggaggcctacaccatccagggccagtatgccatcccccagcctgacctgaccaagctgcaccagctggccatgcagcagagccacttccccatgacccacggcaacacaggcttcagcggcatcgagagcagcagccctgaggtgaagggctactggggcctggatgccagcgcccagaccaccagccatgagctgaccatccccaatgacctgattggctgcatcatcggccggcagggcgccaagatcaatgagatccggcagatgtctggggcccagatcaagatcgccaaccctgtggagggcagcacagaccggcaggtgaccatcaccggcagcgctgccagcatcagcctggcccagtacctgatcaacgtgcggctgagcagcgagactggaggcatgggcagcagctag

SEQ ID NO: 46555 - DNA, 1098 bp, Artificial Sequence
  derived and/or modified sequence
atggacaccggcgtgatcgagggcggcctgaacgtgaccctgaccattagactcctcatgcacgggaaagaagtgggcagcatcattgggaaaaagggggagagtgttaaaaagatgcgggaagaatccggcgctcgcattaacataagcgaaggaaactgcccagagaggatcatcacgctggctggtcctaccaacgcaatctttaaggcattcgctatgatcattgataagctggaggaggatatatccagcagcatgactaactccaccgctgcttctcgaccgcccgtgacattacggcttgttgtgcctgcgtcacagtgcggttccttgattggcaaaggcggctgtaagattaaggagatccgcgaatctaccggtgcgcaagtgcaggttgcaggcgacatgctgccaaattcaactgaacgggcaatcaccattgccgggattccacagtcaatcatcgaatgtgtaaagcaaatttgcgtggtgatgttggagactctctctcaatctccccctaagggcgtgaccattccatacaggccgaagccctcgtcatccccggtgatcttcgccggcggccaggacaggtacagtaccggctcagacagtgcgtctttcccccatactacaccttcaatgtgtcttaacccagatttggagggaccccctctcgaagcgtataccattcagggccagtacgccatcccacaacctgatctgacaaaacttcatcagctggccatgcagcagtcccactttccaatgacccacggtaacacggggttctctggaatcgagtcaagctctccggaggtcaaaggctactgggggttggacgcttctgcccagaccacttcacatgagctcaccatcccaaatgatctgatcggctgcatcatcggaaggcaaggcgccaaaattaacgaaatccggcagatgtcgggggcccaaatcaagatcgcaaatccggttgaggggagtacagacaggcaggtcaccatcacaggttcagctgccagtatttcgttagctcaatacctgattaacgtgcgcctgtctagtgagacaggtggcatggggagttcatag

SEQ ID NO: 46556 - DNA, 1614 bp, Artificial Sequence
  derived and/or modified sequence
cagaggcagcagccggagcagccgcagcctgcgccctctcccgcccgcccgccctccgcccgcccgcccgccctccgccgccctccacccgccccggggtctctttcccccttcctcctcctcctcctccacccccccttcctcctccgcccgcccgcggggcccccctcgccttcccgcccgcccctattgttccgcccccggcctcccgcccttccccttcccgcccgctccccttttcccctcagtcgcctcgcgcctgcagtttttggctttcacccccaaccagtgaccaaagacttgaccactcaaagtccagctccccagaacactgctcgacatggacaccggtgtgattgaaggtggattaaatgtcactctcaccatccggctacttatgcatggaaaggaagttggcagtatcatcggaaagaaaggagaatcagttaagaagatgcgcgaggagagtggtgcacgtatcaacatctcagaagggaattgtcctgagagaattatcactttggctggacccactaatgccatcttcaaagcctttgctatgatcattgacaaactggaagaggacataagcagctctatgaccaatagcacagctgccagtagacccccggtcaccctgaggctggtggtccctgctagtcagtgtggctctctcattggaaaaggtggatgcaagatcaaggaaatacgagagagtacaggggctcaggtccaggtggcaggggatatgctacccaactcaactgagcgggccatcactattgctggcattccacaatccatcattgagtgtgtcaaacagatctgcgtggtcatgttggagactctctcccagtcccccccgaagggcgtgaccatcccgtaccggcccaagccgtccagctctccggtcatctttgcaggtggtcaggacaggtacagcacaggcagcgacagtgcgagctttccccacaccaccccgtccatgtgcctcaaccctgacctggagggaccacctctagaggcctataccattcaaggacagtatgccattccacagccagatttgaccaagctgcaccagttggcaatgcaacagtctcattttcccatgacgcatggcaacaccggattcagtggcattgaatccagctctccagaggtgaaaggctattggggtttggatgcatctgctcagactacttctcatgaactcaccattccaaacgatttgattggctgcataatcgggcgtcaaggcgccaaaatcaatgagatccgtcagatgtctggggcgcagatcaaaattgcgaacccagtggaaggatctactgataggcaggttaccatcactggatctgctgccagcattagcctggctcaatatctaatcaatgtcaggctttcctcggagacgggtggcatggggagcagctagaacaatgcagattcatccataatccctttctgctgttcaccaccacccatgatccatctgtgtagtttctgaacagtcagcgattccaggttttaaatagtttgtaaattttcagtttctacacactttatcatccactcgtgattttttaattaaagcgttttaattcctttctc

SEQ ID NO: 46557 - DNA, 1098 bp, Artificial Sequence
  derived and/or modified sequence
atggacactggggtgatagagggcggtctgaatgtcaccctgaccatccgtttactgatgcatggcaaagaggtgggctccatcatcggcaaaaagggtgaatccgtgaagaaaatgagggaggaatccggggcaaggattaacatcagcgaaggcaactgccctgagcgaatcatcaccttggcgggtcccaccaatgctatcttcaaagcttttgccatgatcatagataagctggaagaggacatttcaagttctatgactaatagtacagccgcaagccggcctcccgtcactctgcgtctggtagtgcccgctagccagtgcgggtcactgatcggcaaggggggatgcaaaatcaaagagatacgggagagcacgggggctcaggtccaagtggctggagacatgcttcctaattcaacggaacgagccattacgatcgctgggattcctcagtccatcatcgaatgcgtcaaacaaatctgtgtcgtgatgctggagacactgagccagagccccccaaaaggagtaacaataccttatcgcccaaagccttcctcctcccccgtgatctttgctggaggccaggacagatactctaccggcagcgattcagcaagttttccccataccaccccgtccatgtgtctgaaccctgacctggaaggacctcctcttgaggcctataccatccaaggccagtacgccatccctcaacccgatctgacaaaattgcatcaactcgctatgcagcaatcacatttccccatgactcatggaaatactggctttagcggcattgaaagttctagtcccgaggttaaggggtattggggattagatgcttcggcgcagactacctcgcatgaattgaccattcctaacgaccttatcggttgtatcatcggacggcagggcgcaaagatcaacgagatacgtcaaatgagcggggctcagataaaaatcgctaatcccgtagaggggagcactgatcgacaggtaactattacaggcagcgccgcatcgatatcactcgcacagtatttaattaatgtgcgcctgtcatccgaaaccggagggatgggcagctcttag

SEQ ID NO: 46558 - DNA, 1098 bp, Artificial Sequence
  derived and/or modified sequence
atggacaccggcgtgatcgagggcggcctgaacgtgaccctgaccatcagactgctgatgcacggcaaggaggtgggcagcatcatcggcaagaagggcgagagcgtgaagaagatgagagaggagagcggcgccagaatcaacatcagcgagggcaactgccccgagagaatcatcaccctggccggccccaccaacgccatcttcaaggccttcgccatgatcatcgacaagctggaggaggacatcagcagcagcatgaccaacagcaccgccgccagcagaccccccgtgaccctgagactggtggtgcccgccagccagtgcggcagcctgatcggcaagggcggctgcaagatcaaggagatcagagagagcaccggcgcccaggtgcaggtggccggcgacatgctgcccaacagcaccgagagagccatcaccatcgccggcatcccccagagcatcatcgagtgcgtgaagcagatctgcgtggtgatgctggagaccctgagccagagcccccccaagggcgtgaccatcccctacagacccaagcccagcagcagccccgtgatcttcgccggcggccaggacagatacagcaccggcagcgacagcgccagcttcccccacaccacccccagcatgtgcctgaaccccgacctggagggcccccccctggaggcctacaccatccagggccagtacgccatcccccagcccgacctgaccaagctgcaccagctggccatgcagcagagccacttccccatgacccacggcaacaccggcttcagcggcatcgagagcagcagccccgaggtgaagggctactggggcctggacgccagcgcccagaccaccagccacgagctgaccatccccaacgacctgatcggctgcatcatcggcagacagggcgccaagatcaacgagatcagacagatgagcggcgcccagatcaagatcgccaaccccgtggagggcagcaccgacagacaggtgaccatcaccggcagcgccgccagcatcagcctggcccagtacctgatcaacgtgagactgagcagcgagaccggcggcatgggcagcagctag

SEQ ID NO: 46559 - protein, 361 aa, Artificial Sequence
  derived and/or modified sequence
MDTGVIEGGLNVTLTIRLLMHGKEVGSIIGKKGESVKKMREESGARINISEGNCPERIITLAGPTNAIFKAFAMIIDKLEEDISSSMTNSTAASRPPVTLRLVVPASQCGSLIGKGGCKIKEIRESTGAQVQVAGDMLPNSTERAITIAGIPQSIIECVKQICVVMLESPPKGVTIPYRPKPSSSPVIFAGGQDRYSTGSDSASFPHTTPSMCLNPDLEGPPLEAYTIQGQYAIPQPDLTKLHQLAMQQSHFPMTHGNTGFSGIESSSPEVKGYWGLDASAQTTSHELTIPNDLIGCIIGRQGAKINEIRQMSGAQIKIANPVEGSTDRQVTITGSAASISLAQYLINVRLSSETGGMGSS

SEQ ID NO: 46560 - DNA, 906 bp, Artificial Sequence
  derived and/or modified sequence
atggatacgggggttattgagggtggactcaacgtgaccctgacgataagattgctgatgcacgggaaagaagtcggctcaatcataggcaaaaagggagagtccgtcaaaaagatgcgagaggaatccggggcacggatcaacatctcagagggtaactgcccagagagaatcatcactttagccggacccactaacgccatatttaaagcctttgctatgatcattgataagcttgaagaggatataagctcatcaatgacgaacagtactgccgcctccagacctcccgttacactccggctggtggtgcctgcatcccagtgcgggtctctgatcgggaagggagggtgcaaaattaaagagattagggagtctaccggggcacaggtgcaggtagcaggagacatgctccctaattcgaccgagcgtgcgatcactatagcgggcattccacagtccattatcgagtgtgtcaagcagatatgtgtggtgatgctcgaaagtcctcctaagggagttaccattccttacagacctaaaccttcgtcaagccccgttatcttcgccggggggcaggaccggtattctaccggatctgactcggcctctttccctcacaccactccttctatgtgcctcaatccagatctcgagggtcctccactcgaggcttacaccattcaggggcagtacgcaattccccagccagacctaactaagctccatcagcttgccatgcagcagtctcacttcccgatgacccacggaaacactggattcagcggtatggataccagcgtgttcatctcagtgcggtgctcagcaagagaacggccagttccgaggagccagctggacatttgtctcaagcaaactagcctgtctagcatcctactcgtatag

SEQ ID NO: 46561 - DNA, 1086 bp, Artificial Sequence
  derived and/or modified sequence
atggatactggagtgatcgaaggtggcctcaacgtgacactcaccatacggctgttaatgcatggaaaggaagtgggttctattatcggcaaaaagggcgaaagtgtgaaaaaaatgagggaggagtcgggagccagaatcaacatctctgagggaaactgccccgaacgtattatcaccctcgccggcccaaccaacgctattttcaaggcctttgcaatgattattgataaactggaggaggacatctctagcagcatgacgaatagtacagctgcctctcgtccgccagtcacacttcgcctggtggttcctgcatcacagtgcggcagcctgattggaaaggggggctgtaaaatcaaggaaatcagggaatctaccggggcccaggtgcaagttgcaggcgacatgcttcccaatagcactgagagggccattaccatcgctgggatcccccagtccattatcgaatgtgtgaaacagatatgcgtcgtcatgttggagtcacctcctaagggcgtgaccattccttaccgtcccaaaccttcgagtagccctgtgatcttcgcagggggccaggacagatacagtacagggtctgattctgcatcgtttcctcatacaacaccctcaatgtgtcttaatcccgacctggagggccccccactcgaggcctacaccatacagggccagtacgccataccccagcctgatttaacgaaactccaccagctggctatgcaacagtctcactttcccatgactcacggcaacacgggcttttctgggattgaaagctctagtcctgaggtgaagggttattggggtctggacgcctctgcacaaaccacctcccatgagctgacaatccccaatgacttgatcggatgcatcatcggacgacagggtgccaagatcaacgaaattagacagatgtctggagcccagattaagattgcaaatcccgtcgaagggtctacggataggcaggtcaccatcacaggctccgccgccagcatcagcttggcccagtacctcatcaacgtgcgtctttcgtccgaaacgggggggatgggaagctcatag

SEQ ID NO: 46562 - DNA, 906 bp, Artificial Sequence
  derived and/or modified sequence
atggacacaggagtcatcgagggcggcctgaatgtgaccctgaccatccggctgctgatgcacggcaaggaggtgggcagcatcatcggcaagaagggggagagcgtgaagaagatgagggaggagagcggggcccgcatcaacatcagcgagggcaactgcccagagcgcatcatcaccctggccggccccaccaatgccatcttcaaggcctttgccatgatcatcgacaagctggaggaggacatcagcagctccatgaccaacagcacagctgccagccggccccctgtgaccctgcggctggtggtgcctgccagccagtgtggcagcctgattggaaaaggaggctgcaagatcaaggagatccgggagagcactggagcccaggtgcaggtggccggggacatgctgcccaacagcacagagcgggccatcaccatcgccggcatcccccagagcatcattgaatgtgtgaagcagatctgtgtggtgatgctggagagcccccccaagggcgtgaccatcccctaccggcccaagcccagcagcagccctgtgatctttgctgggggccaggaccgctacagcacaggcagtgacagcgccagcttcccccacaccacccccagcatgtgcctgaacccagacctggagggcccccccctggaggcctacaccatccagggccagtatgccatcccccagcctgacctgaccaagctgcaccagctggccatgcagcagagccacttccccatgacccacggcaacacaggcttcagcggcatggacacctctgtgttcatctctgtgcgctgcagcgcccgggagaggcctgtgcccaggagccagctggacatctgcctgaagcagaccagcctgagcagcatcctgctggtgtag

SEQ ID NO: 46563 - DNA, 1086 bp, Artificial Sequence
  derived and/or modified sequence
atggacacaggagtcatcgagggcggcctgaatgtgaccctgaccatccggctgctgatgcacggcaaggaggtgggcagcatcatcggcaagaagggggagagcgtgaagaagatgagggaggagagcggggcccgcatcaacatcagcgagggcaactgcccagagcgcatcatcaccctggccggccccaccaatgccatcttcaaggcctttgccatgatcatcgacaagctggaggaggacatcagcagctccatgaccaacagcacagctgccagccggccccctgtgaccctgcggctggtggtgcctgccagccagtgtggcagcctgattggaaaaggaggctgcaagatcaaggagatccgggagagcactggagcccaggtgcaggtggccggggacatgctgcccaacagcacagagcgggccatcaccatcgccggcatcccccagagcatcattgaatgtgtgaagcagatctgtgtggtgatgctggagagcccccccaagggcgtgaccatcccctaccggcccaagcccagcagcagccctgtgatctttgctgggggccaggaccgctacagcacaggcagtgacagcgccagcttcccccacaccacccccagcatgtgcctgaacccagacctggagggcccccccctggaggcctacaccatccagggccagtatgccatcccccagcctgacctgaccaagctgcaccagctggccatgcagcagagccacttccccatgacccacggcaacacaggcttcagcggcatcgagagcagcagccctgaggtgaagggctactggggcctggatgccagcgcccagaccaccagccatgagctgaccatccccaatgacctgattggctgcatcatcggccggcagggcgccaagatcaatgagatccggcagatgtctggggcccagatcaagatcgccaaccctgtggagggcagcacagaccggcaggtgaccatcaccggcagcgctgccagcatcagcctggcccagtacctgatcaacgtgcggctgagcagcgagactggaggcatgggcagcagctag

SEQ ID NO: 46564 - DNA, 906 bp, Artificial Sequence
  derived and/or modified sequence
atggacaccggcgtgatcgagggcggcctgaacgtgaccctgaccatccgactgttgatgcacgggaaggaagtgggcagtattatagggaagaagggcgagagcgttaaaaaaatgagggaagagagcggggcaaggattaatatcagcgaaggcaactgcccagaaagaatcatcaccctggccggacccaccaatgctatcttcaaggctttcgcaatgatcattgataaacttgaagaggacatctcttcatcgatgaccaattcaaccgccgcctcaagaccccccgtgaccctgcgcctagtagtccccgcatcacagtgtggatccctcattggaaaaggtggctgcaaaataaaagagatccgcgaatctactggagctcaggtgcaagtggccggcgatatgctacccaactctactgagagagccattactatcgccggaatcccacagagcatcattgagtgcgtcaaacagatctgcgtggtgatgctagaaagcccccctaagggagtgacaattccctaccgcccgaagccttcctcctcacccgttattttcgccggtgggcaggaccggtactcaaccgggagcgatagcgccagtttcccgcataccactccatccatgtgtcttaaccccgaccttgaaggaccaccacttgaagcgtacaccattcaagggcagtacgccataccccagcctgatctgaccaagctccaccagttagcaatgcaacaatcacatttccccatgactcacggtaatactggcttcagcggtatggacaccagcgttttcatctccgtccggtgtagcgctcgcgagcgtcctgttcctcgctcacagctcgatatttgtctgaagcagacgagcctgtcctctatccttctcgtttag

SEQ ID NO: 46565 - DNA, 1086 bp, Artificial Sequence
  derived and/or modified sequence
atggacaccggcgtgatcgagggcggcctgaacgtgaccctgaccattcgtttgctgatgcacggaaaagaggtggggtccatcattggaaaaaaaggcgaatcagtgaaaaaaatgcgggaagagtccggggcccggattaatatttctgaagggaactgccccgaacggataattacactggcggggcccactaatgctattttcaaggctttcgctatgatcattgacaagctcgaagaggacatctctagctcaatgacaaacagcaccgcagccagccgtccccccgttacactgagactggttgtgcctgcatcccaatgcggatccctcatcggcaagggaggatgtaagattaaagaaattcgcgagtctaccggcgcacaggtgcaggtcgccggcgatatgttgccaaattcaacggaacgggccataactattgcgggaataccgcagtcaatcattgagtgtgttaagcagatatgcgttgttatgctggagtctccaccgaaaggggtcaccatcccgtatagacccaaaccctcgtctagtccagttatcttcgccgggggtcaggatcgatattcaactggcagcgacagtgctagtttcccgcacaccactccaagcatgtgtcttaacccagatctcgagggaccccccctagaggcctacacaattcaaggtcagtatgccatcccccaacccgacttgaccaagctccaccaattagctatgcagcagtcgcactttcctatgactcacggaaataccggcttctcgggcatcgagagcagctccccggaggtgaagggctattggggtctagatgcgtctgcgcagacaacgagccatgagctaaccattcccaacgacctgattggatgtattatcggcaggcaaggagccaagatcaacgaaatacgccaaatgtccggcgctcagatcaaaatcgccaatcccgtagagggatcaaccgaccggcaagtgaccattaccgggtcagctgctagtattagcctcgctcagtacttaataaatgtgagactgtccagtgagactggcggaatgggtagcagctag

SEQ ID NO: 46566 - DNA, 1571 bp, Artificial Sequence
  derived and/or modified sequence
aagagccgagactgcgaaggagaacgcagcaagcccaggcggcggtggaaaggctggaggacacacctaaacatgtggaatcccaatgccgggcagccagggccaaatccatatccccccaatattgggtgccctggaggttccaatcctgcccacccaccacctattaatccaccctttcccccaggcccctgtcctcctcccccaggagctccccatggcaatccagctttccccccaggtgggccccctcatcctgtgccacagccagggtatccaggatgccaaccgttgggtccctaccctcctccatacccaccgcctgcccctggaatccctcctgtgaatcccttggctcctggcatggttggaccagcagtgatagtagacaagaagatgcagaagaaaatgaagaaagctcataaaaagatgcacaagcaccaaaagcaccacaagtaccacaagcatggcaagtttttggctttcacccccaaccagtgaccaaagacttgaccactcaaagtccagctccccagaacactgctcgacatggacaccggtgtgattgaaggtggattaaatgtcactctcaccatccggctacttatgcatggaaaggaagttggcagtatcatcggaaagaaaggagaatcagttaagaagatgcgcgaggagagtggtgcacgtatcaacatctcagaagggaattgtcctgagagaattatcactttggctggacccactaatgccatcttcaaagcctttgctatgatcattgacaaactggaagaggacataagcagctctatgaccaatagcacagctgccagtagacccccggtcaccctgaggctggtggtccctgctagtcagtgtggctctctcattggaaaaggtggatgcaagatcaaggaaatacgagagagtacaggggctcaggtccaggtggcaggggatatgctacccaactcaactgagcgggccatcactattgctggcattccacaatccatcattgagtgtgtcaaacagatctgcgtggtcatgttggagtcccccccgaagggcgtgaccatcccgtaccggcccaagccgtccagctctccggtcatctttgcaggtggtcaggacaggtacagcacaggcagcgacagtgcgagctttccccacaccaccccgtccatgtgcctcaaccctgacctggagggaccacctctagaggcctataccattcaaggacagtatgccattccacagccagatttgaccaagctgcaccagttggcaatgcaacagtctcattttcccatgacgcatggcaacaccggattcagtggtatggatacctcagtgtttatttctgtaaggtgtagtgcaagagagaggccagtcccaaggtctcagcttgacatctgtttaaaacaaacttcgttatccagcatcctgctggtttaaacttgcctgtctactatggctaagcccaaggaggtaatgtgtttgttaacgtggttttcatttggggtcagttattctaaaagaaaaaaaaagccctggaaggtttgggggtgagg

SEQ ID NO: 46567 - DNA, 1342 bp, Artificial Sequence
  derived and/or modified sequence
cgcctgcagtttttggctttcacccccaaccagtgaccaaagacttgaccactcaaagtccagctccccagaacactgctcgacatggacaccggtgtgattgaaggtggattaaatgtcactctcaccatccggctacttatgcatggaaaggaagttggcagtatcatcggaaagaaaggagaatcagttaagaagatgcgcgaggagagtggtgcacgtatcaacatctcagaagggaattgtcctgagagaattatcactttggctggacccactaatgccatcttcaaagcctttgctatgatcattgacaaactggaagaggacataagcagctctatgaccaatagcacagctgccagtagacccccggtcaccctgaggctggtggtccctgctagtcagtgtggctctctcattggaaaaggtggatgcaagatcaaggaaatacgagagagtacaggggctcaggtccaggtggcaggggatatgctacccaactcaactgagcgggccatcactattgctggcattccacaatccatcattgagtgtgtcaaacagatctgcgtggtcatgttggagtcccccccgaagggcgtgaccatcccgtaccggcccaagccgtccagctctccggtcatctttgcaggtggtcaggacaggtacagcacaggcagcgacagtgcgagctttccccacaccaccccgtccatgtgcctcaaccctgacctggagggaccacctctagaggcctataccattcaaggacagtatgccattccacagccagatttgaccaagctgcaccagttggcaatgcaacagtctcattttcccatgacgcatggcaacaccggattcagtggcattgaatccagctctccagaggtgaaaggctattggggtttggatgcatctgctcagactacttctcatgaactcaccattccaaacgatttgattggctgcataatcgggcgtcaaggcgccaaaatcaatgagatccgtcagatgtctggggcgcagatcaaaattgcgaacccagtggaaggatctactgataggcaggttaccatcactggatctgctgccagcattagcctggctcaatatctaatcaatgtcaggctttcctcggagacgggtggcatggggagcagctagaacaatgcagattcatccataatccctttctgctgttcaccaccacccatgatccatctgtgtagtttctgaacagtcagcgattccaggttttaaatagtttgtaaattttcagtttctacacactttatcatccactcgtgattttttaattaaagcgttttaattcctt

SEQ ID NO: 46568 - DNA, 906 bp, Artificial Sequence
  derived and/or modified sequence
atggatacaggcgtgatcgaggggggtctgaatgtgactctgaccattcgtttactgatgcacggcaaggaggtaggttcaataataggaaaaaagggagagtcagtgaaaaagatgcgggaagagtctggagctagaattaacatatcggagggaaactgccccgagagaattatcaccttggctgggcctaccaacgccatattcaaggcgtttgctatgatcattgataagctggaggaagatatatcctcctctatgactaactctacagctgcctcccgacccccagtgacactccggcttgtggtgcccgcatcccagtgcggaagcctgatagggaaaggcggatgcaagatcaaggagatacgagagtccactggcgctcaggtgcaggtggccggagatatgctgcctaatagcactgaacgggctattaccatcgccggtattccacagtctataatcgagtgcgtcaaacagatctgtgtagtgatgctggagagtccacccaagggcgtcactattccttatcgacccaagccaagctcctccccagtaatcttcgcgggaggccaggatcgctactctacaggtagcgactctgcatcctttccgcacactacaccttcaatgtgtcttaatcctgacctagaagggccacctcttgaggcctacaccattcagggtcagtacgcaatcccccaaccagaccttacaaaactgcaccagctcgctatgcagcagagtcactttccgatgactcatggtaataccggttttagtggaatggacactagtgtgtttatctccgtgagatgcagtgcacgagagcggcctgtcccacgttcacagctcgacatttgtcttaagcagacttccctgtcatcaatcttgctcgtttag

SEQ ID NO: 46569 - DNA, 1086 bp, Artificial Sequence
  derived and/or modified sequence
atggacactggcgtgattgaggggggactgaatgtcaccctgaccatcagactgctgatgcacgggaaggaagtggggagcattattggcaagaaaggcgagtccgtgaagaaaatgcgggaggaaagcggggcaaggattaacattagtgaaggcaattgccccgagcggatcatcaccctcgcgggtcctacaaacgctattttcaaggcatttgctatgatcatcgacaagctagaggaggatatatcgtccagcatgacgaactcaacagccgcatcacgccctcctgtaacgctgcggctagttgtgcctgcctcccagtgtggctcactcattggcaaagggggatgcaaaatcaaagaaatcagagagagtacaggggctcaggttcaagtggctggggacatgctgccaaactccactgagagggcaattaccatcgccggaatcccccaatctatcattgagtgcgtcaagcagatttgcgtggtaatgctagagtctcctccgaagggggtcacgataccctatagacctaagccttcgagttcacctgtcatcttcgcgggtggccaggaccgttatagcactggaagcgacagtgcgtcctttcctcacactacgcctagcatgtgcctcaatcccgacctggaaggaccccctctggaggcttacacgatccagggccaatacgctatccctcagcccgacctcactaagctgcaccagctggccatgcagcagtctcacttcccaatgacccatggtaatacaggctttagcgggattgagagctcttccccggaagtgaaagggtattggggactggacgctagcgcacagactacatcacatgagctgactattcctaacgacctcatcgggtgcatcatcgggcgacaaggtgctaaaattaacgaaatccgccaaatgagcggggctcagataaagattgccaatccagtcgaaggatctaccgacagacaggtgaccattacgggctcagccgcatccattagtttagcgcagtatctgattaacgtcaggctcagctccgagacggggggtatgggctccagttag

SEQ ID NO: 46570 - DNA, 906 bp, Artificial Sequence
  derived and/or modified sequence
atggacaccggcgtgatcgagggcggcctgaacgtgaccctgaccatcagactgctgatgcacggcaaggaggtgggcagcatcatcggcaagaagggcgagagcgtgaagaagatgagagaggagagcggcgccagaatcaacatcagcgagggcaactgccccgagagaatcatcaccctggccggccccaccaacgccatcttcaaggccttcgccatgatcatcgacaagctggaggaggacatcagcagcagcatgaccaacagcaccgccgccagcagaccccccgtgaccctgagactggtggtgcccgccagccagtgcggcagcctgatcggcaagggcggctgcaagatcaaggagatcagagagagcaccggcgcccaggtgcaggtggccggcgacatgctgcccaacagcaccgagagagccatcaccatcgccggcatcccccagagcatcatcgagtgcgtgaagcagatctgcgtggtgatgctggagagcccccccaagggcgtgaccatcccctacagacccaagcccagcagcagccccgtgatcttcgccggcggccaggacagatacagcaccggcagcgacagcgccagcttcccccacaccacccccagcatgtgcctgaaccccgacctggagggcccccccctggaggcctacaccatccagggccagtacgccatcccccagcccgacctgaccaagctgcaccagctggccatgcagcagagccacttccccatgacccacggcaacaccggcttcagcggcatggacaccagcgtgttcatcagcgtgagatgcagcgccagagagagacccgtgcccagaagccagctggacatctgcctgaagcagaccagcctgagcagcatcctgctggtgtag

SEQ ID NO: 46571 - DNA, 1086 bp, Artificial Sequence
  derived and/or modified sequence
atggacaccggcgtgatcgagggcggcctgaacgtgaccctgaccatcagactgctgatgcacggcaaggaggtgggcagcatcatcggcaagaagggcgagagcgtgaagaagatgagagaggagagcggcgccagaatcaacatcagcgagggcaactgccccgagagaatcatcaccctggccggccccaccaacgccatcttcaaggccttcgccatgatcatcgacaagctggaggaggacatcagcagcagcatgaccaacagcaccgccgccagcagaccccccgtgaccctgagactggtggtgcccgccagccagtgcggcagcctgatcggcaagggcggctgcaagatcaaggagatcagagagagcaccggcgcccaggtgcaggtggccggcgacatgctgcccaacagcaccgagagagccatcaccatcgccggcatcccccagagcatcatcgagtgcgtgaagcagatctgcgtggtgatgctggagagcccccccaagggcgtgaccatcccctacagacccaagcccagcagcagccccgtgatcttcgccggcggccaggacagatacagcaccggcagcgacagcgccagcttcccccacaccacccccagcatgtgcctgaaccccgacctggagggcccccccctggaggcctacaccatccagggccagtacgccatcccccagcccgacctgaccaagctgcaccagctggccatgcagcagagccacttccccatgacccacggcaacaccggcttcagcggcatcgagagcagcagccccgaggtgaagggctactggggcctggacgccagcgcccagaccaccagccacgagctgaccatccccaacgacctgatcggctgcatcatcggcagacagggcgccaagatcaacgagatcagacagatgagcggcgcccagatcaagatcgccaaccccgtggagggcagcaccgacagacaggtgaccatcaccggcagcgccgccagcatcagcctggcccagtacctgatcaacgtgagactgagcagcgagaccggcggcatgggcagcagctag

SEQ ID NO: 46572 - protein, 335 aa, Artificial Sequence
  derived and/or modified sequence
MDTGVIEGGLNVTLTIRLLMHGKEVGSIIGKKGESVKKMREESGARINISEGNCPERIITLAGPTNAIFKAFAMIIDKLEEDISSSMTNSTAASRPPVTLRLVVPASQCGSLIGKGGCKIKEIRESTGAQVQVAGDMLPNSTERAITIAGIPQSIIECVKQICVVMLETLSQSPPKGVTIPYRPKPSSSPVIFAGGQAYTIQGQYAIPQPDLTKLHQLAMQQSHFPMTHGNTGFSGIESSSPEVKGYWAGLDASAQTTSHELTIPNDLIGCIIGRQGAKINEIRQMSGAQIKIANPVEGSTDRQVTITGSAASISLAQYLINVRLSSETGGMGSS

SEQ ID NO: 46573 - DNA, 1008 bp, Artificial Sequence
  derived and/or modified sequence
atggacaccggcgttattgaaggtggactgaacgtgaccttgaccatccggctcctcatgcacggcaaagaggtgggtagcattatcggaaaaaagggggagtcggtgaagaagatgagagaagagtccggcgctcgcatcaacattagcgaagggaactgccctgagagaattattaccttggctggccccacgaacgccatatttaaggcattcgcaatgataatagacaaacttgaagaagacatctctagctccatgacgaacagcacggccgcgagccggccgccagtgacactgaggcttgtggtgcctgcctcccagtgtggctccctgatagggaaaggcggttgcaagataaaggaaattagagagtccaccggcgcccaggtgcaggtggctggagacatgctgcccaactctacagagcgcgctattactatcgctggcattccccagtccattatcgaatgtgttaaacagatctgcgtggtaatgctcgagaccctctcccaatccccgcccaaaggcgtcaccatcccctataggcctaagcctagtagttcaccagtcatcttcgccggaggtcaagcttacacgatccaaggccaatacgccattcctcagcccgatctcacgaaactccaccagctcgcaatgcagcaaagtcattttccaatgacacatggcaatactgggtttagcgggattgaatccagcagcccagaagtaaagggctattgggctggacttgatgcctcagcacagacaaccagtcacgagttgaccattcctaatgatttgatagggtgtataatcggcaggcagggagccaaaatcaatgagataagacagatgagcggggcccagattaagatcgctaatccagtggaaggctccaccgatagacaggtgactattactgggagcgcagcatccattagtctagcccagtatctgattaatgtgcgcttatcttcggagactggaggcatgggcagctcctag

SEQ ID NO: 46574 - DNA, 1008 bp, Artificial Sequence
  derived and/or modified sequence
atggacacaggagtcatcgagggcggcctgaatgtgaccctgaccatccggctgctgatgcacggcaaggaggtgggcagcatcatcggcaagaagggggagagcgtgaagaagatgagggaggagagcggggcccgcatcaacatcagcgagggcaactgcccagagcgcatcatcaccctggccggccccaccaatgccatcttcaaggcctttgccatgatcatcgacaagctggaggaggacatcagcagctccatgaccaacagcacagctgccagccggccccctgtgaccctgcggctggtggtgcctgccagccagtgtggcagcctgattggaaaaggaggctgcaagatcaaggagatccgggagagcactggagcccaggtgcaggtggccggggacatgctgcccaacagcacagagcgggccatcaccatcgccggcatcccccagagcatcattgaatgtgtgaagcagatctgtgtggtgatgctggagaccctgagccagagcccccccaagggcgtgaccatcccctaccggcccaagcccagcagcagccctgtgatctttgctgggggccaggcctacaccatccagggccagtatgccatcccccagcctgacctgaccaagctgcaccagctggccatgcagcagagccacttccccatgacccacggcaacacaggcttctctggaattgagagcagcagccctgaggtgaagggctactgggccggcctggatgccagcgcccagaccaccagccatgagctgaccatccccaatgacctgattggctgcatcatcggccggcagggcgccaagatcaatgagatccggcagatgtctggggcccagatcaagatcgccaaccctgtggagggcagcacagaccggcaggtgaccatcaccggcagcgctgccagcatcagcctggcccagtacctgatcaacgtgcggctgagcagcgagactggaggcatgggcagcagctag

SEQ ID NO: 46575 - DNA, 1008 bp, Artificial Sequence
  derived and/or modified sequence
atggacaccggcgtgatcgagggcggcctgaacgtgaccctgaccatacggctcctcatgcatggcaaagaggtaggttctattatcggcaagaagggtgagagcgtgaagaagatgcgcgaggagtcaggtgccaggattaacatcagcgaaggaaattgccccgagcgcataattacgcttgccgggccaactaacgctatttttaaagcttttgcgatgatcatcgacaaactcgaggaggacattagttctagtatgaccaactctactgcagctagtcgcccaccggttaccctaaggctggtcgtgccagcaagccagtgcggctcactaatcggaaagggcggctgtaaaatcaaagagattcgggagtcaacaggcgctcaggtgcaggttgcgggcgatatgcttccgaatagtaccgaaagggctattacgatcgcaggtattccgcaaagcattattgaatgtgtgaaacaaatctgtgtcgtcatgctcgagaccctatcccagtccccaccgaagggggtgaccatcccttaccgcccgaagccctctagttcaccggtgatcttcgccgggggccaagcttacactattcagggccagtacgcaatcccccagccagatctgacaaagctgcaccagctagcgatgcagcaatcccatttccccatgacccacggaaacaccgggttttctgggatagagtcctcttctcccgaggttaaagggtactgggccggccttgatgcaagcgctcaaaccaccagccacgaactgacgatcccaaacgacctcattgggtgcataatcggtcgccagggggcgaagattaatgagatccgccaaatgtcaggggcccagattaagattgcgaaccccgtggaagggagcaccgacagacaggtaactattaccggttcagccgcctcaatttccttagcgcaatacctgattaatgtgcggcttagcagcgagacaggaggaatggggtcctcgtag

SEQ ID NO: 46576 - DNA, 3077 bp, Artificial Sequence
  derived and/or modified sequence
cccagaccagcagaggcagcagccggagcagccgcagcctgcgccctctcccgcccgcccgccctccgcccgcccgcccgccctccgccgccctccacccgccccggggtctctttcccccttcctcctcctcctcctccacccccccttcctcctccgcccgcccgcggggcccccctcgccttcccgcccgcccctattgttccgcccccggcctcccgcccttccccttcccgcccgctccccttttcccctcagtcgcctcgcgcctgcagtttttggctttcacccccaaccagtgaccaaagacttgaccactcaaagtccagctccccagaacactgctcgacatggacaccggtgtgattgaaggtggattaaatgtcactctcaccatccggctacttatgcatggaaaggaagttggcagtatcatcggaaagaaaggagaatcagttaagaagatgcgcgaggagagtggtgcacgtatcaacatctcagaagggaattgtcctgagagaattatcactttggctggacccactaatgccatcttcaaagcctttgctatgatcattgacaaactggaagaggacataagcagctctatgaccaatagcacagctgccagtagacccccggtcaccctgaggctggtggtccctgctagtcagtgtggctctctcattggaaaaggtggatgcaagatcaaggaaatacgagagagtacaggggctcaggtccaggtggcaggggatatgctacccaactcaactgagcgggccatcactattgctggcattccacaatccatcattgagtgtgtcaaacagatctgcgtggtcatgttggagactctctcccagtcccccccgaagggcgtgaccatcccgtaccggcccaagccgtccagctctccggtcatctttgcaggtggtcaggcctataccattcaaggacagtatgccattccacagccagatttgaccaagctgcaccagttggcaatgcaacagtctcattttcccatgacgcatggcaacaccggattcagtggcattgaatccagctctccagaggtgaaaggctattgggcaggtttggatgcatctgctcagactacttctcatgaactcaccattccaaacgatttgattggctgcataatcgggcgtcaaggcgccaaaatcaatgagatccgtcagatgtctggggcgcagatcaaaattgcgaacccagtggaaggatctactgataggcaggttaccatcactggatctgctgccagcattagcctggctcaatatctaatcaatgtcaggctttcctcggagacgggtggcatggggagcagctagaacaatgcagattcatccataatccctttctgctgttcaccaccacccatgatccatctgtgtagtttctgaacagtcagcgattccaggttttaaatagtttgtaaattttcagtttctacacactttatcatccactcgtgattttttaattaaagcgttttaattcctttctctgttcagctgttgatgctgagatccatatttagttttataagcttctccctggttttttttttttggctcatgaatttttctgtttgtcatggaaatgtaagagtggaatattaatacatttcagtttagttctgtaatgtcaggaatttttcaaaaaaattaaaagatggactggagctttttctttgtgaatagaaactggatgccacagtgattcatgtgggttttattcctcttgtcttgctgttatttttgtaccttttatccctcaaaggacccttcttgggttttgaatggaagcctttattccggttaagatgttttcttctattttaccacttccatctttttttgtggccctcgatcctatttttccctgactccatgcttggttggcccttataaaacttgtgcccaaaagattgaggattagactttccgaggacttacctgtcctaggggagtaggcaagcacttccactagggagggggtgggggaaaggaatgacacatgacatacatggcatacacattaagcagttgatcatatgtctgactgggttccagtttcttgggaatgttggtccccttgttcaggcttgcatattttaaactaaaaatttcagtctattgtttttagtaacttcatttatagtcctccataacaagttagaaggatgtatctgctaccatttattcctataattttagaaagttggggcttgacattatactcatttagtgagagtagatgcaaaaaagtggaggggcaggagaacttctccagacacctcagataaagtccggagcccaaggctttatcttaaccatgtatggtaccccattcattcatcaagaaaaccctcaacagctgggcctgcatggagtgttatatttcaaggtttttcacaggggttacagtaggacagtccccaccccaatcaggcaccaggataaaagcagggacttaaacagcaccccggttcttcagcctgagccatcacatgctatcagtctcctaacctccccctgggccttaagacagggcttgggcagagaagataaatggtgggacaaaaaaatgagttacattgccacctgagaaacctcagaggggaggacccagccttagcctccctcctcccaagtgcaaaatgtgtaaacagagtaaacggaacagaaaagtgcagtctaagtggttttctctcctgcccctcccaccgcccctccccccaccccctattatttggggataaagaatataaagacaaccctggcttttctattgccttgttgcttgctgaatataaggaatggggtggggcaggaaggggcttgcccttagccacagctctacggctgtgcctcattcatttccacagctgccagtgtccctagagtttatcaggtgaattggtcaggggatcagtctccctcgagcctgacttacggctgggacagccccatctttctgttgattatgtggcgcatatatatatatatatgtatatatatataatttatataaatatttctctatgt

SEQ ID NO: 46577 - DNA, 1008 bp, Artificial Sequence
  derived and/or modified sequence
atggacacaggcgtgattgaaggcggtctgaacgttaccctgaccatcagactgctcatgcacggcaaggaagtcgggtccattataggcaaaaagggtgagtcagtgaagaagatgcgcgaggaaagcggtgcccgaatcaatatctctgaaggcaattgccccgaacgcatcatcactctggccggacctaccaacgcaatcttcaaggccttcgctatgattatcgacaagctcgaggaagatattagtagttcaatgaccaattcgacggctgcctcaagacctccagtgaccttgagactggtggttccagcgagtcaatgcggcagcctcatcggcaaaggaggatgcaagatcaaagagatacgcgagtccactggcgctcaggttcaggtggccggtgatatgctccccaattcaactgaaagggccataaccatagctgggattccgcagtccattattgaatgtgtcaagcagatctgtgtggtcatgctggaaaccctgtctcagtctcccccaaagggcgtgacaattccttaccgacctaaaccctctagctctccagttatcttcgctgggggtcaggcctacaccatacagggacagtacgccatcccccaaccagatctcacgaagctacatcagctcgctatgcaacagagccattttcctatgactcatgggaacactggcttttccggtatcgagagctcatcacccgaggtgaaaggttattgggccggtctggacgcctccgcccagacgacttctcatgagctaacaatcccaaacgacctgatcggttgcatcataggccgtcagggtgccaaaattaatgagatccgtcagatgtccggagcccagatcaagatcgctaaccccgtggaaggctctactgaccgacaggtgacaattaccgggtctgcggcaagtattagccttgcccagtacctgatcaacgtgcgactaagcagtgaaacgggcggaatgggctcgtcatag

SEQ ID NO: 46578 - DNA, 1008 bp, Artificial Sequence
  derived and/or modified sequence
atggacaccggcgtgatcgagggcggcctgaacgtgaccctgaccatcagactgctgatgcacggcaaggaggtgggcagcatcatcggcaagaagggcgagagcgtgaagaagatgagagaggagagcggcgccagaatcaacatcagcgagggcaactgccccgagagaatcatcaccctggccggccccaccaacgccatcttcaaggccttcgccatgatcatcgacaagctggaggaggacatcagcagcagcatgaccaacagcaccgccgccagcagaccccccgtgaccctgagactggtggtgcccgccagccagtgcggcagcctgatcggcaagggcggctgcaagatcaaggagatcagagagagcaccggcgcccaggtgcaggtggccggcgacatgctgcccaacagcaccgagagagccatcaccatcgccggcatcccccagagcatcatcgagtgcgtgaagcagatctgcgtggtgatgctggagaccctgagccagagcccccccaagggcgtgaccatcccctacagacccaagcccagcagcagccccgtgatcttcgccggcggccaggcctacaccatccagggccagtacgccatcccccagcccgacctgaccaagctgcaccagctggccatgcagcagagccacttccccatgacccacggcaacaccggcttcagcggcatcgagagcagcagccccgaggtgaagggctactgggccggcctggacgccagcgcccagaccaccagccacgagctgaccatccccaacgacctgatcggctgcatcatcggcagacagggcgccaagatcaacgagatcagacagatgagcggcgcccagatcaagatcgccaaccccgtggagggcagcaccgacagacaggtgaccatcaccggcagcgccgccagcatcagcctggcccagtacctgatcaacgtgagactgagcagcgagaccggcggcatgggcagcagctag

SEQ ID NO: 46579 - protein, 318 aa, Artificial Sequence
  derived and/or modified sequence
MDTGVIEGGLNVTLTIRLLMHGKEVGSIIGKKGESVKKMREESGARINISEGNCPERIITLAGPTNAIFKAFAMIIDKLEEDISSSMTNSTAASRPPVTLRLVVPASQCGSLIGKGGCKIKEIRESTGAQVQVAGDMLPNSTERAITIAGIPQSIIECVKQICVVMLESPPKGVTIPYRPKPSSSPVIFAGGQAYTIQGQYAIPQPDLTKLHQLAMQQSHFPMTHGNTGFSAGLDASAQTTSHELTIPNDLIGCIIGRQGAKINEIRQMSGAQIKIANPVEGSTDRQVTITGSAASISLAQYLINVRLSSETGGMGSS

SEQ ID NO: 46580 - DNA, 957 bp, Artificial Sequence
  derived and/or modified sequence
atggacacgggagtgatcgagggaggcctgaatgtcacactgacaattagactgctgatgcatggcaaggaagtaggcagtataattggaaagaagggagaatccgtcaaaaaaatgcgagaagagtcaggagctcgcatcaacatcagtgaggggaattgtcctgaacgcattatcaccttggctggtccaacgaatgccattttcaaggcattcgccatgattattgataaattggaggaggatatctcatcctcaatgacaaatagcactgccgcctctcgccctccagtgaccctgcgcctggtggtgcccgcatctcagtgcggtagcctgattggcaagggggggtgcaagatcaaagaaatacgggagagcacaggcgcccaggttcaagtagccggggatatgctcccgaacagtacggaaagagctatcaccattgctggtatcccccagtccatcattgaatgtgtgaagcagatctgcgtggtgatgctggaatctccccctaaaggtgtgacaattccctaccggcccaagccaagtagtagccctgtgatttttgcgggcggacaggcctacaccatccagggccagtacgctattccacagccagacctgacgaagttgcaccagttggcgatgcagcagtctcatttccccatgacccacggaaacaccggattttcagccgggcttgacgcctctgcccagaccacttctcatgagttgaccatacccaatgatcttatcggctgcattatcgggcgccaaggtgctaagatcaatgagataaggcagatgagtggggcccagatcaagattgccaaccctgtcgagggatcaaccgaccgccaggttaccatcaccggcagtgccgcaagcatctccctggcccagtatctgattaatgttagactatccagtgaaactggcggtatgggcagtagctag

SEQ ID NO: 46581 - DNA, 957 bp, Artificial Sequence
  derived and/or modified sequence
atggacacaggagtcatcgagggcggcctgaatgtgaccctgaccatccggctgctgatgcacggcaaggaggtgggcagcatcatcggcaagaagggggagagcgtgaagaagatgagggaggagagcggggcccgcatcaacatcagcgagggcaactgcccagagcgcatcatcaccctggccggccccaccaatgccatcttcaaggcctttgccatgatcatcgacaagctggaggaggacatcagcagctccatgaccaacagcacagctgccagccggccccctgtgaccctgcggctggtggtgcctgccagccagtgtggcagcctgattggaaaaggaggctgcaagatcaaggagatccgggagagcactggagcccaggtgcaggtggccggggacatgctgcccaacagcacagagcgggccatcaccatcgccggcatcccccagagcatcattgaatgtgtgaagcagatctgtgtggtgatgctggagagcccccccaagggcgtgaccatcccctaccggcccaagcccagcagcagccctgtgatctttgctgggggccaggcctacaccatccagggccagtatgccatcccccagcctgacctgaccaagctgcaccagctggccatgcagcagagccacttccccatgacccacggcaacacaggcttctctgctggcctggatgccagcgcccagaccaccagccatgagctgaccatccccaatgacctgattggctgcatcatcggccggcagggcgccaagatcaatgagatccggcagatgtctggggcccagatcaagatcgccaaccctgtggagggcagcacagaccggcaggtgaccatcactggatctgctgccagcatcagcctggcccagtacctgatcaacgtgcggctgagcagcgagaccggcggcatgggcagcagctag

SEQ ID NO: 46582 - DNA, 957 bp, Artificial Sequence
  derived and/or modified sequence
atggacaccggcgtgatcgagggcggcctgaacgtgaccctgaccattcggttgctgatgcacggcaaggaggtgggctctataatcggaaaaaagggtgagtccgtcaaaaaaatgagagaagaatccggcgcccgcattaacatcagcgaaggcaactgccctgagcggatcatcacccttgctggaccgaccaatgccatctttaaggctttcgctatgattatcgacaaactggaggaggacatctcttcaagtatgaccaacagcactgccgcctcccgtccccctgtaaccttgcgcttggtggtccctgccagccagtgcggatccctgattggaaaaggtggctgcaaaatcaaggagatccgggagagcacaggcgcccaggtgcaggtcgcaggggacatgttgccaaactccacggaaagggccatcacaattgcaggaattccacaatccataatcgagtgcgtcaaacagatctgtgtggtgatgcttgagagcccccccaaaggagtgacgattccctacagacctaaaccttcttcaagcccagttatctttgccgggggccaggcatacacgatccagggccaatacgctatccctcagcccgatctaaccaagctccaccaattggccatgcaacagtcacactttccaatgactcacgggaacacaggcttctcggcaggcctcgacgctagcgcacaaaccacgagtcacgagctgactattcccaacgatctaatcggatgtattatcggccgccagggtgcgaaaattaacgaaattcgtcagatgtctggcgcccaaataaaaattgccaaccccgtcgaggggagcacagacagacaggtgacaatcacaggatcggcagccagcatttcactcgcccaatatctgattaacgtcagactgtccagcgaaacaggaggcatggggagcagttag

SEQ ID NO: 46583 - DNA, 3026 bp, Artificial Sequence
  derived and/or modified sequence
cccagaccagcagaggcagcagccggagcagccgcagcctgcgccctctcccgcccgcccgccctccgcccgcccgcccgccctccgccgccctccacccgccccggggtctctttcccccttcctcctcctcctcctccacccccccttcctcctccgcccgcccgcggggcccccctcgccttcccgcccgcccctattgttccgcccccggcctcccgcccttccccttcccgcccgctccccttttcccctcagtcgcctcgcgcctgcagtttttggctttcacccccaaccagtgaccaaagacttgaccactcaaagtccagctccccagaacactgctcgacatggacaccggtgtgattgaaggtggattaaatgtcactctcaccatccggctacttatgcatggaaaggaagttggcagtatcatcggaaagaaaggagaatcagttaagaagatgcgcgaggagagtggtgcacgtatcaacatctcagaagggaattgtcctgagagaattatcactttggctggacccactaatgccatcttcaaagcctttgctatgatcattgacaaactggaagaggacataagcagctctatgaccaatagcacagctgccagtagacccccggtcaccctgaggctggtggtccctgctagtcagtgtggctctctcattggaaaaggtggatgcaagatcaaggaaatacgagagagtacaggggctcaggtccaggtggcaggggatatgctacccaactcaactgagcgggccatcactattgctggcattccacaatccatcattgagtgtgtcaaacagatctgcgtggtcatgttggagtcccccccgaagggcgtgaccatcccgtaccggcccaagccgtccagctctccggtcatctttgcaggtggtcaggcctataccattcaaggacagtatgccattccacagccagatttgaccaagctgcaccagttggcaatgcaacagtctcattttcccatgacgcatggcaacaccggattcagtgcaggtttggatgcatctgctcagactacttctcatgaactcaccattccaaacgatttgattggctgcataatcgggcgtcaaggcgccaaaatcaatgagatccgtcagatgtctggggcgcagatcaaaattgcgaacccagtggaaggatctactgataggcaggttaccatcactggatctgctgccagcattagcctggctcaatatctaatcaatgtcaggctttcctcggagacgggtggcatggggagcagctagaacaatgcagattcatccataatccctttctgctgttcaccaccacccatgatccatctgtgtagtttctgaacagtcagcgattccaggttttaaatagtttgtaaattttcagtttctacacactttatcatccactcgtgattttttaattaaagcgttttaattcctttctctgttcagctgttgatgctgagatccatatttagttttataagcttctccctggttttttttttttggctcatgaatttttctgtttgtcatggaaatgtaagagtggaatattaatacatttcagtttagttctgtaatgtcaggaatttttcaaaaaaattaaaagatggactggagctttttctttgtgaatagaaactggatgccacagtgattcatgtgggttttattcctcttgtcttgctgttatttttgtaccttttatccctcaaaggacccttcttgggttttgaatggaagcctttattccggttaagatgttttcttctattttaccacttccatctttttttgtggccctcgatcctatttttccctgactccatgcttggttggcccttataaaacttgtgcccaaaagattgaggattagactttccgaggacttacctgtcctaggggagtaggcaagcacttccactagggagggggtgggggaaaggaatgacacatgacatacatggcatacacattaagcagttgatcatatgtctgactgggttccagtttcttgggaatgttggtccccttgttcaggcttgcatattttaaactaaaaatttcagtctattgtttttagtaacttcatttatagtcctccataacaagttagaaggatgtatctgctaccatttattcctataattttagaaagttggggcttgacattatactcatttagtgagagtagatgcaaaaaagtggaggggcaggagaacttctccagacacctcagataaagtccggagcccaaggctttatcttaaccatgtatggtaccccattcattcatcaagaaaaccctcaacagctgggcctgcatggagtgttatatttcaaggtttttcacaggggttacagtaggacagtccccaccccaatcaggcaccaggataaaagcagggacttaaacagcaccccggttcttcagcctgagccatcacatgctatcagtctcctaacctccccctgggccttaagacagggcttgggcagagaagataaatggtgggacaaaaaaatgagttacattgccacctgagaaacctcagaggggaggacccagccttagcctccctcctcccaagtgcaaaatgtgtaaacagagtaaacggaacagaaaagtgcagtctaagtggttttctctcctgcccctcccaccgcccctccccccaccccctattatttggggataaagaatataaagacaaccctggcttttctattgccttgttgcttgctgaatataaggaatggggtggggcaggaaggggcttgcccttagccacagctctacggctgtgcctcattcatttccacagctgccagtgtccctagagtttatcaggtgaattggtcaggggatcagtctccctcgagcctgacttacggctgggacagccccatctttctgttgattatgtggcgcatatatatatatatatgtatatatatataatttatataaatatttctctatgt

SEQ ID NO: 46584 - DNA, 957 bp, Artificial Sequence
  derived and/or modified sequence
atggacacgggcgtaatagaaggcggtcttaatgttactctgacaattcgcctcctgatgcatggcaaagaagttggtagcattatcggaaagaagggagaaagtgtaaagaagatgagggaagaaagcggtgcacggattaacatttccgaaggtaattgtccagaaaggatcattaccttagccggacctactaatgccatcttcaaggccttcgcgatgataatcgacaaactcgaagaggacatctcttcatccatgaccaacagcactgctgcctctcggcctcctgtgacattacgcctagtcgtgccagcatcccagtgcggatcccttattggcaagggagggtgcaagatcaaagagatccgggagtcgacaggcgcacaggtgcaggttgcaggggatatgctgcccaattccactgaaagagctatcaccatcgccggaatcccacagagtatcatagaatgcgtgaagcagatttgtgtggtcatgttagaaagccccccaaagggtgtgactattccttacagaccaaaaccttccagttccccagttattttcgctggaggacaggcctatactatccaaggccagtacgccattccccagccagacttaaccaagctccaccagctggctatgcagcaaagccactttcctatgacacacggcaatacaggtttttccgccggactcgatgcctctgctcagactacttcccacgagctgacaatccctaacgatctcattggttgcatcatcgggagacagggtgctaaaatcaacgagatccgacagatgagcggagcgcagataaaaatagccaatcctgtcgagggatctactgaccgtcaagtcaccattaccggttccgcagcatctatttcattagctcaatatctgattaacgtccgtctgagttcagagacgggcggtatgggctcttcctag

SEQ ID NO: 46585 - DNA, 957 bp, Artificial Sequence
  derived and/or modified sequence
atggacaccggcgtgatcgagggcggcctgaacgtgaccctgaccatcagactgctgatgcacggcaaggaggtgggcagcatcatcggcaagaagggcgagagcgtgaagaagatgagagaggagagcggcgccagaatcaacatcagcgagggcaactgccccgagagaatcatcaccctggccggccccaccaacgccatcttcaaggccttcgccatgatcatcgacaagctggaggaggacatcagcagcagcatgaccaacagcaccgccgccagcagaccccccgtgaccctgagactggtggtgcccgccagccagtgcggcagcctgatcggcaagggcggctgcaagatcaaggagatcagagagagcaccggcgcccaggtgcaggtggccggcgacatgctgcccaacagcaccgagagagccatcaccatcgccggcatcccccagagcatcatcgagtgcgtgaagcagatctgcgtggtgatgctggagagcccccccaagggcgtgaccatcccctacagacccaagcccagcagcagccccgtgatcttcgccggcggccaggcctacaccatccagggccagtacgccatcccccagcccgacctgaccaagctgcaccagctggccatgcagcagagccacttccccatgacccacggcaacaccggcttcagcgccggcctggacgccagcgcccagaccaccagccacgagctgaccatccccaacgacctgatcggctgcatcatcggcagacagggcgccaagatcaacgagatcagacagatgagcggcgcccagatcaagatcgccaaccccgtggagggcagcaccgacagacaggtgaccatcaccggcagcgccgccagcatcagcctggcccagtacctgatcaacgtgagactgagcagcgagaccggcggcatgggcagcagctag

SEQ ID NO: 46586 - protein, 448 aa, Artificial Sequence
  derived and/or modified sequence
MSSPISKSRSLAAFLQQLRSPRQPPRLVTSTAYTSPQPREVPVCPLTAGGETQNAAALPGPTSWPLLGSLLQILWKGGLKKQHDTLVEYHKKYGKIFRMKLGSFESVHLGSPCLLEALYRTESAYPQRLEIKPWKAYRDYRKEGYGLLILEGEDWQRVRSAFQKKLMKPGEVMKLDNKINEVLADFMGRIDELCDERGHVEDLYSELNKWSFESICLVLYEKRFGLLQKNAGDEAVNFIMAIKTMMSTFGRMMVTPVELHKSLNTKVWQDHTLAWDTIFKSVKACIDNRLEKYSQQPSADFLCDIYHQNRLSKKELYAAVTELQLAAVETTANSLMWILYNLSRNPQVQQKLLKEIQSVLPENQVPRAEDLRNMPYLKACLKESMRLTPSVPFTTRTLDKATVLGEYALPKGIVRKYDIQATDNEPVEMLHSGTLVPSRELPIAFCQR

SEQ ID NO: 46587 - DNA, 1347 bp, Artificial Sequence
  derived and/or modified sequence
atgtcatcccctatttccaaatcccggtcccttgcagcctttctgcagcagcttagatcacccagacagcctcccagacttgtcacctccactgcctatacaagtccacaacctcgagaggtgcctgtgtgtccacttacggccgggggcgaaacacagaacgccgccgccctccccgggcctacttcttggcccctcctgggatcattattgcaaatcctttggaaaggtgggttgaaaaaacagcatgatactctcgtggaataccataagaagtacggcaagatttttaggatgaagctgggctcatttgaaagcgtgcacctgggctccccttgtttgctcgaagccctctacaggacagagtcagcatatccccagcgcctagagatcaaaccttggaaagcataccgtgactacagaaaggagggctatgggttgctcattctcgagggagaggattggcagcgggttaggagcgccttccagaagaaattgatgaagccaggagaggtgatgaagttagataataagattaacgaagtcctcgctgactttatgggccgcatagatgagctttgtgacgagaggggacacgtcgaagatctgtacagcgaactgaacaagtggtcttttgagtcaatttgtttagtgctttatgaaaaaaggttcgggctgctccagaagaatgctggggacgaggccgttaattttattatggccatcaaaacaatgatgagtaccttcggcagaatgatggtgacacccgtggagctacacaagtccctgaacacgaaggtgtggcaggatcacacattagcatgggacactatattcaagtcagtgaaagcgtgcatcgacaataggctcgaaaagtattcccagcagccctcggctgattttctatgcgacatttaccaccagaaccgactctcaaaaaaagaactctacgccgcagtgaccgagctgcagttagctgcagtcgaaactactgctaactccctcatgtggattctttacaacctcagtaggaatcctcaagtacagcaaaagctgctgaaggaaatacagagtgtgcttcctgagaaccaggtgcctagggccgaggacctgagaaacatgccttatctcaaggcctgtcttaaggagtcaatgagattaactccttctgtcccattcaccacccgtacactggacaaggcaactgttttaggagagtacgctctcccgaagggcattgttcgcaaatatgatatccaggcaacggataatgagccggtagagatgctgcattcggggacattagttcccagccgagaactgcccattgccttttgccagcgctag

SEQ ID NO: 46588 - DNA, 1347 bp, Artificial Sequence
  derived and/or modified sequence
atgagcagccccatcagcaagagccgcagcctggccgccttcctgcagcagctgcggagcccccggcagcccccccggctggtgaccagcacagcctacaccagcccccagccccgggaggtgcctgtgtgccccctgacagctggaggagagacccagaatgctgctgccctgcccggccccacctcctggcccctgctgggcagcctgctgcagatcctgtggaagggcggcctgaagaagcagcacgacaccctggtggagtaccacaagaagtatggcaagatcttcaggatgaagctgggcagctttgagagcgtgcacctgggcagcccctgcctgctggaggccctgtacagaacagaaagtgcctacccccagaggctggagatcaagccctggaaggcctacagagactacaggaaggagggctacggcctgctgatcctggagggggaggactggcagagggtgcgcagcgccttccagaagaagctgatgaagccaggagaggtgatgaagctggacaacaagatcaatgaggtgctggccgacttcatgggcagaattgatgagctgtgtgatgagcggggccacgtggaggacctgtacagcgagctgaacaagtggagctttgagagcatctgcctggtgctgtatgagaagcgcttcggcctgctgcagaagaatgctggagatgaagctgtgaacttcatcatggccatcaagaccatgatgagcacctttggaaggatgatggtgacccctgtggagctgcacaagagcctgaacaccaaggtgtggcaggaccacaccctggcctgggacaccatcttcaagtctgtgaaggcctgcatcgacaaccggctggagaagtacagccagcagcccagcgctgacttcctgtgtgacatctaccaccagaaccggctgagcaagaaggagctgtatgctgctgtgacagagctgcagctggccgctgtggagaccacagccaacagcctgatgtggatcctgtacaacctgagcaggaacccccaggtgcagcagaagctgctgaaggagatccagagcgtgctgcctgagaaccaggtgcccagggctgaggacctgaggaacatgccctacctgaaggcctgcctgaaggagagcatgaggctgacccccagcgtgcccttcaccaccaggaccctggacaaggccaccgtgctgggggagtatgccctgcccaagggcatcgtgaggaaatatgacatccaggccacagacaatgaacctgtggagatgctgcacagcggcaccctggtgcccagccgggagctgcccatcgccttctgccagaggtag

SEQ ID NO: 46589 - DNA, 1347 bp, Artificial Sequence
  derived and/or modified sequence
atgagcagccccatcagcaagagccggagcctggccgccttcctgcaacagctccgatctccgcggcagcccccacggcttgtcacgtccacagcatatacaagtcctcaaccgcgagaggtaccagtgtgtcctctcactgcaggcggagagacccaaaacgctgctgccctcccaggcccaacatcatggcctctgcttggctctttgctccaaatcctctggaagggaggcctgaaaaagcagcatgacaccttggtggaatatcacaagaaatatggcaagatcttcaggatgaagttagggagtttcgaatcggtccacctgggatcgccttgtctgctggaggcattgtatagaacagagagcgcctacccacagcggttagaaatcaagccttggaaagcataccgcgattaccgcaaggaaggatacggcttgctgatactcgagggggaggactggcagcgcgtccgcagtgccttccagaagaagctaatgaagcccggcgaggtcatgaaactggacaacaagatcaatgaggtgttagccgacttcatgggccggatcgacgagctgtgtgacgaaaggggacatgtggaagatctgtatagtgaattgaacaaatggtccttcgagtcaatctgcttagttctgtatgagaagcggtttgggctcttgcaaaagaacgctggcgatgaggccgtgaacttcatcatggctataaagactatgatgagtactttcgggcgcatgatggtgacacctgtggagctgcacaagagtctgaatacaaaagtgtggcaagatcacactttggcctgggatactattttcaaaagcgtgaaggcttgcattgataacagactggagaagtactcccagcaacctagcgccgattttctttgtgatatctaccatcagaatcgcctatccaagaaggaactgtacgccgccgttaccgagttgcagctggctgctgtggaaacgaccgcaaattccctgatgtggatcctgtacaatcttagccggaacccgcaggtgcagcagaagctgctaaaagagattcaaagtgtcctgccggagaaccaggttccccgtgccgaagaccttagaaatatgccatacttaaaggcttgcctgaaagaatctatgcgattaaccccctcagtgccctttacaaccaggaccttagacaaggctaccgttctcggggaatacgccctccccaaggggattgtccgaaaatacgacattcaggccaccgataatgagcccgtggagatgctccatagtggaaccttggtgccaagtcgggaactacctatcgccttttgtcagcggtag

SEQ ID NO: 46590 - DNA, 1347 bp, Artificial Sequence
  derived and/or modified sequence
atgagctctcctataagcaagtcccggagcttagccgctttcttgcaacaattgcgttccccaagacagccacctaggctcgttactagcaccgcctacacaagccctcagcctagagaagtgcctgtctgccccctgacggctggcggagagactcagaatgctgcagccctcccgggtccaacatcgtggccactcctcgggtctttgctgcagatcttatggaaaggcggtcttaagaagcagcacgatacacttgtggagtaccataagaagtacggcaaaatcttcaggatgaagctgggatcatttgaatctgtccatttggggagcccctgcctgttggaagccctgtatagaaccgaatcagcgtatcctcagaggttggagatcaagccttggaaggcctacagggactaccgaaaggagggctacggactcctcatcctcgagggtgaagattggcagagggtcaggtccgccttccagaagaagctcatgaagcctggggaggtaatgaaattggacaacaaaattaatgaggtgctggctgatttcatgggcagaattgacgaactgtgtgatgagagaggtcacgtggaagatttgtactcggagctgaataaatggagctttgagagcatctgccttgtactctacgagaagcgctttggcctcctgcagaaaaacgctggggacgaagctgtgaattttatcatggccatcaagaccatgatgtccacatttgggagaatgatggttacaccagtcgaactgcacaaaagcctgaacaccaaggtttggcaggatcatacccttgcttgggacacaattttcaagtcagtgaaggcttgtattgacaacagacttgagaagtattcacagcagccatccgccgactttctgtgcgatatttatcaccagaatcggttgagcaagaaagaactatacgctgccgtcaccgaattgcagctggctgccgttgagactacagccaacagcctgatgtggatactgtacaatctgtccagaaatccccaggttcagcagaaactccttaaggagatacaatcagttctccctgaaaaccaagtgccgagagccgaggatctgagaaacatgccctatctgaaagcttgcctaaaggagtccatgcgactcacccccagtgtcccctttacgacaagaactctggataaagccactgtcctgggggagtacgccctgccaaaaggcatagtaaggaaatacgacattcaggctacagataatgaacccgttgagatgctgcactcaggcacactcgtccctagccgggagctacccatcgcgttctgccaacggtag

SEQ ID NO: 46591 - DNA, 2227 bp, Artificial Sequence
  derived and/or modified sequence
ctagcacctcgtaccaacctcgccccaccccatcctcctgccttcccgcgctccggtgtcccccgctgccatgagctcccccatcagcaagagccgctcgcttgccgccttcctgcagcagctgcgcagtccgaggcagcccccgagactggtgacatctacggcgtacacgtcccctcagccgcgagaggtgccagtctgcccgctgacagctggtggcgagactcagaacgcggccgccctgccgggccccaccagctggccactgctgggcagcctgctgcagattctctggaaagggggtctcaagaaacagcacgacaccctggtggagtaccacaagaagtatggcaagattttccgcatgaagttgggttcctttgagtcggtgcacctgggctcgccatgcctgctggaagcgctgtaccgcaccgagagcgcgtacccgcagcggctggagatcaaaccgtggaaggcctatcgcgactaccgcaaagaaggctacgggctgctgatcctggaaggggaagactggcagcgggtccggagtgcctttcaaaagaaactaatgaaaccaggggaagtgatgaagctggacaacaaaatcaatgaggtcttggccgattttatgggcagaatagatgagctctgtgatgaaagaggccacgttgaagacttgtacagcgaactgaacaaatggtcgtttgaaagtatctgcctcgtgttgtatgagaagagatttgggcttctccagaagaatgcaggggatgaagctgtgaacttcatcatggccatcaaaacaatgatgagcacgtttgggaggatgatggtcactccagtcgagctgcacaagagcctcaacaccaaggtctggcaggaccacactctggcctgggacaccattttcaaatcagtcaaagcttgtatcgacaaccggttagagaagtattctcagcagcctagtgcagatttcctttgtgacatttatcaccagaatcggctttcaaagaaagaattgtatgctgctgtcacagagctccagctggctgcggtggaaacgacagcaaacagtctaatgtggattctctacaatttatcccgtaatccccaagtgcaacaaaagcttcttaaggaaattcaaagtgtattacctgagaatcaggtgccacgggcagaagatttgaggaatatgccgtatttaaaagcctgtctgaaagaatctatgaggcttacgccgagtgtaccatttacaactcggactcttgacaaggcaacagttctgggtgaatatgctttacccaaaggaattgtccgcaaatacgacatccaggccacagacaatgagcctgttgagatgctacactcaggcaccctggtgcccagccgggaactccccatcgcgttttgccagcgataatacgcctcagatggtggtatttgctaacatcatatccaactcagggaagcggactgagtgctgggatccaaggcattctacagggttcactgctggtttacacttcacctgtgtcagcaccatcttcaggtgcttagaatggcctgggagcctgttctgtcttgcatcttccatgacatgaaagggaggctggcacttgtcagtcaggtagaggttacaaaccgtttcaggccctgcctaccacattcactgtttgaatctttaattcccaagaataagtttacatttcacaatgaatgacctacaacagctaaattttctggggctgggagtaatactgacaatccatttactgtagctctgcttaatgtactacttaggaaaatgtccctgcttaataatgtaagccaagctaaatgatggttaaagttatcaggcctcccatgaaattgcgttcttcctgcattgaaataaaaacattattgggaaactagagaacacctctatttttaaaaggactttaacgaagtcaaacaacttataagactagtgattcactggggcattattttgttagaggaccttaaaattgtttattttttaaatgtgattcctttatggcattagggtaaagatgaagcaataatttttaaattgtgtatgtgcatatgaagcacagacatgcatgtgtgtgtgtgtctgtgtgtgtgtgtccgtgtatgtgtgtgtgggttctaatggtaatttgcctcagtcatttttttaatatttgcagtacttgatttaggatctgtggtgcagggcaatgtt

SEQ ID NO: 46592 - DNA, 1347 bp, Artificial Sequence
  derived and/or modified sequence
atgagcagccccatcagcaagagcagaagcctggccgccttcctgcagcagctgagaagccccagacagccccccagactggtgaccagcaccgcctacaccagcccccagcccagagaggtgcccgtgtgccccctgaccgccggcggcgagacccagaacgccgccgccctgcccggccccaccagctggcccctgctgggcagcctgctgcagatcctgtggaagggcggcctgaagaagcagcacgacaccctggtggagtaccacaagaagtacggcaagatcttcagaatgaagctgggcagcttcgagagcgtgcacctgggcagcccctgcctgctggaggccctgtacagaaccgagagcgcctacccccagagactggagatcaagccctggaaggcctacagagactacagaaaggagggctacggcctgctgatcctggagggcgaggactggcagagagtgagaagcgccttccagaagaagctgatgaagcccggcgaggtgatgaagctggacaacaagatcaacgaggtgctggccgacttcatgggcagaatcgacgagctgtgcgacgagagaggccacgtggaggacctgtacagcgagctgaacaagtggagcttcgagagcatctgcctggtgctgtacgagaagagattcggcctgctgcagaagaacgccggcgacgaggccgtgaacttcatcatggccatcaagaccatgatgagcaccttcggcagaatgatggtgacccccgtggagctgcacaagagcctgaacaccaaggtgtggcaggaccacaccctggcctgggacaccatcttcaagagcgtgaaggcctgcatcgacaacagactggagaagtacagccagcagcccagcgccgacttcctgtgcgacatctaccaccagaacagactgagcaagaaggagctgtacgccgccgtgaccgagctgcagctggccgccgtggagaccaccgccaacagcctgatgtggatcctgtacaacctgagcagaaacccccaggtgcagcagaagctgctgaaggagatccagagcgtgctgcccgagaaccaggtgcccagagccgaggacctgagaaacatgccctacctgaaggcctgcctgaaggagagcatgagactgacccccagcgtgcccttcaccaccagaaccctggacaaggccaccgtgctgggcgagtacgccctgcccaagggcatcgtgagaaagtacgacatccaggccaccgacaacgagcccgtggagatgctgcacagcggcaccctggtgcccagcagagagctgcccatcgccttctgccagagatag

SEQ ID NO: 46593 - protein, 361 aa, Artificial Sequence
  derived and/or modified sequence
MGNVLAASSPPAGPPPPPAPALVGLPPPPPSPPGFTLPPLGGSLGAGTSTSRSSERTPGAATASASGAAEDGACGCLPNPGTFEECHRKCKELFPIQMEGVKLTVNKGLSNHFQVNHTVALSTIGESNYHFGVTYVGTKQLSPTEAFPVLVGDMDNSGSLNAQVIHQLGPGLRSKMAIQTQQSKFVNWQVDGEYRGSDFTAAVTLGNPDVLVGSGILVAHYLQSITPCLALGGELVYHRRPGEEGTVMSLAGKYTLNNWLATVTLGQAGMHATYYHKASDQLQVGVEFEASTRMQDTSVSFGYQLDLPKANLLFKGSVDSNWIVGATLEKKLPPLPLTLALGAFLNHRKNKFQCGFGLTIG

SEQ ID NO: 46594 - DNA, 1086 bp, Artificial Sequence
  derived and/or modified sequence
atgggcaacgtgctggccgccagcagcccccccgccggccccccccccccccccgcccccgccctggtgggcctgcccccccccccccccagcccccccggcttcaccctgccccccctgggcggcagcctgggcgccggcaccagcaccagcagaagcagcgagagaacccccggcgccgccaccgccagcgccagcggcgccgccgaggacggcgcctgcggctgcctgcccaaccccggcaccttcgaggagtgccacagaaagtgcaaggagctgttccccatccagatggagggcgtgaagctgaccgtgaacaagggcctgagcaaccacttccaggtgaaccacaccgtggccctgagcaccatcggcgagagcaactaccacttcggcgtgacctacgtgggcaccaagcagctgagccccaccgaggccttccccgtgctggtgggcgacatggacaacagcggcagcctgaacgcccaggtgatccaccagctgggccccggcctgagaagcaagatggccatccagacccagcagagcaagttcgtgaactggcaggtggacggcgagtacagaggcagcgacttcaccgccgccgtgaccctgggcaaccccgacgtgctggtgggcagcggcatcctggtggcccactacctgcagagcatcaccccctgcctggccctgggcggcgagctggtgtaccacagaagacccggcgaggagggcaccgtgatgagcctggccggcaagtacaccctgaacaactggctggccaccgtgaccctgggccaggccggcatgcacgccacctactaccacaaggccagcgaccagctgcaggtgggcgtggagttcgaggccagcaccagaatgcaggacaccagcgtgagcttcggctaccagctggacctgcccaaggccaacctgctgttcaagggcagcgtggacagcaactggatcgtgggcgccaccctggagaagaagctgccccccctgcccctgaccctggccctgggcgccttcctgaaccacagaaagaacaagttccagtgcggcttcggcctgaccatcggctag

SEQ ID NO: 46595 - DNA, 1086 bp, Artificial Sequence
  derived and/or modified sequence
atggggaacgtgttagccgcatcatctccacccgccggaccgccgcccccacccgcgcccgcgttggtaggcctgccaccaccgcctccgtccccccctggctttacactcccgccactggggggctctctgggtgccggcacctctacctcccggtcatccgaacgcacgcctggcgccgctacagcttcagcgtctggagccgccgaagatggcgcttgcggttgcctgcctaatcccggaacattcgaagagtgccaccgcaagtgcaaggagctgttccccattcagatggagggagtgaagctgactgtgaataaagggttaagtaaccactttcaggtgaatcacactgtggccctcagcacgataggagaaagtaactatcattttggagtcacctatgttggcaccaaacagctcagcccaacggaagccttccccgtgcttgtgggggatatggataattctgggtctctcaatgcgcaggtcatccaccagctcggccctggcctaagaagcaaaatggccatccagacccagcagtccaagttcgtgaattggcaggtagatggtgagtaccggggttccgactttaccgccgccgtcactctggggaacccagacgtcctcgtcggatctggcatcttggttgctcactatctgcagtcaataaccccttgcctggctcttgggggtgagctggtatatcaccggaggccaggtgaagagggaaccgtaatgagtctggccggcaaatacactctcaacaactggcttgccaccgtgacactaggacaagcagggatgcacgccacctactatcacaaagcaagtgaccagctccaggtcggggtcgagttcgaggcctcgacccggatgcaggacacatcagtgtcatttggatatcagctcgatctacctaaggctaatctgttatttaaaggaagcgttgacagcaactggatcgtcggagccactttagaaaagaaactaccacctcttcccctgaccctggcactaggagcatttctaaaccatagaaagaacaagttccagtgcgggttcgggctcacaatcggatag

SEQ ID NO: 46596 - DNA, 1086 bp, Artificial Sequence
  derived and/or modified sequence
atggggaacgttcttgcggcatcttccccaccagccggccctccacctcccccagccccagctcttgtgggcttaccacccccccctccctcccccccgggtttcacgctaccgcctctgggcggcagtctgggcgctggcacttccacttcgcgaagttctgaaagaacacccggggctgccacagccagtgccagtggcgcagctgaagatggtgcatgcggttgcctccccaacccgggaacctttgaagagtgccacaggaaatgcaaagagttattccccattcagatggaaggggttaagttgacagtcaacaaggggctgagtaatcattttcaggtcaaccacactgtagccttgtctacaataggcgaatctaactaccactttggtgtgacatacgttggcacaaagcagctgagtccaacggaggcctttcctgtgctcgtgggagacatggacaactccgggagtctgaatgcccaggtgatccaccagctcggtcctgggttacggagcaaaatggccatccaaacccagcagtccaaattcgtcaattggcaggtggacggggaatatagaggttccgacttcacagccgctgtcactttaggaaacccagacgtgcttgtcggcagcggcattctggttgctcattatctacagtctatcacaccttgccttgcgctgggcggtgaactggtataccacagaagacccggtgaggaaggtacagtcatgtccctagcagggaagtacactctaaacaactggctggctactgtgaccctcggacaagctggaatgcatgctacatattaccataaggcgtccgaccagctgcaagtaggcgtggaattcgaagccagtactaggatgcaggacactagtgtgtcatttggttaccagctggatctcccaaaggccaatctgttatttaagggcagcgtagactccaactggattgtgggagctaccctggaaaagaagttgcccccacttccgctgacccttgctctgggcgctttcctcaaccacaggaagaacaagtttcagtgcgggttcggtttaaccatcggatag

SEQ ID NO: 46597 - DNA, 1086 bp, Artificial Sequence
  derived and/or modified sequence
atgggaaatgtgctggcggcctcgtccccccccgcgggcccaccaccccccccagcgccagcgttggttggactccctccaccacccccctcaccacccgggttcaccctgccacctttgggcggaagcttgggggctggtacctcgacatccagatcttcagagcgcacccctggggccgctacagcctccgcctctggcgccgcagaggacggcgcctgtgggtgtctgccaaaccctgggactttcgaggaatgtcatcggaagtgcaaagagcttttccccatccagatggaaggcgtaaagcttaccgtcaataagggcctctctaatcacttccaagttaatcacacagtggcactcagcacaatcggggaatcaaactaccacttcggtgtgacttatgttggcactaagcagcttagtcccacagaggcgtttccagtcctcgtcggagatatggataattccggctccctcaacgcccaggtgatccatcagctgggaccaggactgaggtctaagatggcaattcagacacagcagtccaaattcgtgaattggcaggtggacggggagtacagagggagcgatttcacggcagccgttacgttggggaaccccgacgtcttggtgggttccgggatcctggtcgcccactacctgcagtcaattaccccctgcttggctctcggcggggagctggtttatcatcgcaggccaggcgaggaagggaccgtcatgagtttggctggcaaatacacccttaacaactggttggctaccgttacactggggcaagctgggatgcatgcaacgtattaccataaggctagcgaccaacttcaggtcggggtggagttcgaagccagtactcgcatgcaggatacctcagtatctttcggctaccagctggatttgcctaaggctaacctgctgttcaaaggtagcgtggacagtaattggatcgtaggggctactctagagaagaagctgcctcccctgcccctgactctcgccctcggcgcatttctcaatcatcggaaaaacaaatttcagtgtgggttcggactaacaatcgggtag

SEQ ID NO: 46598 - DNA, 1086 bp, Artificial Sequence
  derived and/or modified sequence
atgggaaatgtgctggccgccagcagccccccagctggccccccacctcctccagccccagccctggtgggcctgcccccacctccacccagccccccaggcttcaccctgccccccctgggcggcagcctgggcgccggcaccagcaccagccgcagcagcgagaggacccctggggccgccacagccagcgccagcggggctgctgaagatggagcctgtggctgcctgcccaaccctggcacctttgaggagtgccacaggaagtgcaaggagctgttccccatccagatggagggcgtgaagctgactgtgaacaagggcctgagcaaccacttccaggtgaaccacacagtggccctgagcaccatcggggagagcaactaccactttggagtgacctacgtgggcaccaagcagctgagccccacagaggccttccctgtgctggtgggggacatggacaacagcggcagcctgaatgcccaggtgatccaccagctgggccctggcctgcggagcaagatggccatccagacccagcagagcaagtttgtgaactggcaggtggatggagagtaccggggcagtgacttcaccgctgctgtgaccctgggcaacccagatgtgctggtgggcagcggcatcctggtggcccactacctgcagagcatcaccccctgcctggccctgggcggggagctggtgtaccacagaagacctggagaggagggcaccgtgatgagcctggccggcaagtacaccctgaacaactggctggccaccgtgaccctgggccaggccggcatgcacgccacctactaccacaaggccagtgaccagctgcaggtgggcgtggagtttgaggccagcaccaggatgcaggacacctctgtgtcctttggctaccagctggacctgcccaaggccaacctgctcttcaagggctctgtggacagcaactggatcgtgggcgccaccctggagaagaagctgccccccctgcccctgaccctggccctgggcgccttcctgaaccacaggaagaacaagttccagtgtggcttcggcctgaccatcggctag

SEQ ID NO: 46599 - DNA, 1086 bp, Artificial Sequence
  derived and/or modified sequence
atgggcaacgtgctggccgccagcagcccccccgccggcccccccccgccacccgctcctgccctggtgggcttgccaccgcctcctcccagtcccccaggattcaccttgccccctctgggcggcagtttgggcgcagggacctctacctcgcggagttccgagagaacgcctggtgctgctacggctagtgcttcaggagccgctgaggatggggcatgtggctgcttgcccaaccccggtaccttcgaggagtgccaccgcaagtgcaaggagctcttccctattcagatggagggcgtgaagctcacggtgaacaaaggcctctcaaaccactttcaggtcaaccatacagttgccctcagtacgattggagagtccaactaccattttggggtcacatacgtcggtaccaagcaacttagccctacagaggctttcccagtcctggtcggcgacatggacaacagcggttccctcaacgctcaggttatccaccagctgggccctggcttgcgatcaaagatggccatccaaactcagcagagcaaattcgtcaactggcaagtggatggggaatatagagggtcggacttcactgctgccgtaacactaggcaacccagatgtgctggtcggctccggcattttagtcgcacattatcttcaaagcatcactccatgccttgctctgggtggagagctggtatatcaccgccggccaggagaggaggggaccgtaatgtctctcgcgggtaagtacaccctgaacaactggcttgcgaccgtgactctggggcaggcaggtatgcatgccacatactaccacaaagcgtctgatcagcttcaggtcggcgtcgagttcgaagcctccacgaggatgcaagacactagcgttagcttcggctaccagctggacctgcccaaagcaaacctgctgtttaagggctcggtggatagtaattggattgtgggcgccaccctagaaaagaagttgcctccattacccctgacattggctctaggcgcatttctgaatcatcggaagaataagttccagtgtggttttggcctgacaatcgggtag

SEQ ID NO: 46600 - DNA, 1086 bp, Artificial Sequence
  derived and/or modified sequence
atgggcaacgtgctggccgccagcagcccccccgccggccccccccctccccccgcccccgccctggttggcctgccccctccccccccatcaccaccaggttttaccctgccacccctggggggtagcctaggcgcaggcacatcaactagtcggagctccgagcgcaccccaggggccgctactgccagtgcctccggcgcagcagaggatggggcttgcgggtgccttcccaatcctggcacattcgaggaatgccaccgcaagtgcaaggagctgtttcctattcagatggagggagtgaaactgacggtcaataagggactgagtaaccacttccaggtgaatcacactgtggccctgtccactataggtgagtctaactaccatttcggagtcacctacgtagggacaaagcagttatccccgaccgaggcgtttcctgttctcgtcggcgatatggataatagcgggagtctgaacgcgcaggtgatccatcagctggggcctggactccggtcgaaaatggcgatacagactcagcaatccaaattcgtcaattggcaggtggatggagagtataggggctcggatttcactgctgcagttaccctgggcaaccccgacgtgctggtaggatccggcattctggtggcacactatctccagtccattacgccgtgcctggccttggggggtgaactggtctaccataggagacctggagaggagggaacggtcatgtctttagccggcaagtacacccttaacaactggctcgcaaccgtgactctgggtcaagctggaatgcatgcaacttactatcataaagctagcgaccagctgcaagtcggtgtagaatttgaggcctcgacaagaatgcaggacactagtgtgagctttggctatcagctcgacttacccaaagctaatctgctgtttaaagggtccgtggattcaaactggatcgtgggtgctactcttgaaaaaaagcttcccccactacctctcaccctggccctgggggcctttctgaatcatcgcaaaaataagttccagtgcggctttggcctaactatcggatag

SEQ ID NO: 46601 - DNA, 1086 bp, Artificial Sequence
  derived and/or modified sequence
atgggcaacgtgctggccgccagcagcccccccgccggccccccccctccacccgcccctgccctggttggactgcctcctcctccaccatcgccacctggctttactctgcccccactggggggaagtttgggagcaggaacatcaacctccagatcgagtgagcgcacacccggcgctgctaccgcttcagcctcaggtgcagccgaggacggggcctgtgggtgcttaccaaatcccggcacatttgaggagtgtcacaggaagtgtaaagagcttttccccattcaaatggagggcgtgaagctgacagttaacaagggcttgagtaatcattttcaggttaatcacacagtggcgctcagtacaatcggcgaatcaaattaccacttcggtgtgacttacgtggggacaaaacagttatccccgacggaggctttcccggtgctcgtgggggacatggacaacagtggtagtctgaacgcccaggtgattcaccagcttggtcccggtcttcggtccaaaatggccattcagacccagcagtccaaatttgtgaactggcaggtggacggcgaatatcgcggttccgactttaccgctgccgttaccctgggcaaccctgacgtcctggttggatccggcattttggtagcacattatctgcagtcgataaccccctgcctcgccctgggcggcgagctcgtctaccatcggcgtccaggcgaggagggcactgtcatgtctctggccgggaagtatactctgaataattggcttgccaccgtaaccctgggccaagctggaatgcacgcaacctactatcataaagcttctgatcagctgcaggtcggagtggaattcgaggccagcaccagaatgcaggacacctccgtgagttttggttaccagctggatctgcctaaagccaatttactgttcaagggtagcgtggacagtaattggattgtgggagccacattggaaaaaaaactcccccctcttcccttaaccctagccctcggggctttcctgaaccaccgcaaaaataagtttcagtgtgggttcggactcaccatagggtag

SEQ ID NO: 46602 - DNA, 1086 bp, Artificial Sequence
  derived and/or modified sequence
atggggaatgtgctggccgcatcctcacctcctgctggtcccccaccacctccagcaccggcactcgtcggactgccccctccgccaccgtctcctcccggatttaccctgccccctctgggaggttctctcggcgctggtacttctacatctagatcaagcgagcgaacccccggagccgcaacagcatcagcttcaggcgctgccgaggatggggcatgtggctgtctccccaatcccggtacatttgaagagtgccatcgcaaatgcaaagagctatttccaattcaaatggagggcgtgaagcttactgtaaacaaagggctgtcaaaccactttcaagtgaatcacactgttgctctttccaccatcggggagagcaactaccattttggagtcacatatgttggaaccaagcaactatcccccacggaggcgttccccgtgttggtcggagatatggacaactccgggtctctgaacgcgcaagttatacatcagctgggcccaggtctacggtcaaagatggccatccaaactcaacagagtaagtttgtaaattggcaggttgacggagagtacagaggatcggattttactgctgctgttaccctggggaacccagatgtgctagtgggaagcggcattctggttgcgcattacttacagagtattaccccctgcctagctctgggaggagagctggtctatcatagacgccctggtgaggaaggtactgttatgagcttagccggaaaatataccctgaacaactggttggctaccgtcaccttggggcaggcaggcatgcacgcaacctattatcacaaggcgtcagatcaactgcaggtcggtgtcgagtttgaagcctctactcggatgcaagacacttcggtcagtttcgggtaccagctggatctacccaaagccaatctgctgttcaaggggtccgtggactcgaattggattgtgggtgccacactagaaaaaaaactcccgccactgccgctgactcttgcccttggggcatttctaaatcaccgaaaaaataagttccagtgcgggttcgggctcactattggatag

SEQ ID NO: 46603 - DNA, 1086 bp, Artificial Sequence
  derived and/or modified sequence
atgggcaatgtactggctgccagttcccctcctgccggtccacccccaccccctgccccagcccttgtgggattaccccctccacccccttcccctcccggtttcacactgccccctctggggggttcactgggagctggcaccagcacatccagaagttcagagaggacacccggagccgcaacggccagcgcctctggggcagctgaggacggagcttgcggctgtttgccaaatcctggcacgttcgaggagtgccacagaaaatgcaaggaactcttcccaatccagatggaaggcgtgaagctgactgtgaataaaggcctttctaaccacttccaggtgaatcataccgtcgctttgtccaccattggtgaaagtaactatcattttggagtaacgtatgtcggaactaaacagctgtcacccaccgaggcttttccggtgttggtgggcgatatggacaattctggcagcctcaacgcccaggtcatccatcagctcggacctggactgcgctccaaaatggctatccagacccagcagagtaagttcgtcaactggcaggtcgatggcgagtaccgcggaagcgatttcacggccgctgtgacattgggcaatccggatgtcctggtgggctctggaatcctcgtggctcattatctgcagtctataactccctgtttggcattggggggtgaactagtctatcaccgcagaccgggtgaggaaggtacagtgatgtcacttgccggaaagtatacactgaataattggctagcgactgttacactgggccaggctggaatgcacgcaacatactaccacaaagcctctgatcagttgcaagttggggttgagttcgaggcctcgacgaggatgcaggatacatctgtgagcttcgggtaccagcttgatctgcctaaagctaacctgctgtttaagggctcggtggacagcaattggattgtcggcgctaccctcgagaagaagctgcctccgttgccgttgaccttggcgctaggagcttttctgaaccaccgtaagaacaagttccaatgcggtttcggcctgaccatcggatag

SEQ ID NO: 46604 - DNA, 1086 bp, Artificial Sequence
  derived and/or modified sequence
atgggaaacgtgctggccgcttccagcccccctgcagggccaccaccgcctcctgcgcctgccctagtgggcctccctcccccaccgcctagcccgcctggctttaccctccccccactgggcggatcccttggggcagggactagcacaagccgatcttccgagcggacacctggcgctgccaccgcttcagcttcaggggcagctgaggatggagcctgcggctgcctccctaatcccggtacgtttgaggagtgccataggaagtgcaaggaactgttccccattcagatggagggggtgaaactcaccgtgaataagggcctgtctaatcattttcaggtcaaccatactgttgccttgtccaccattggcgaatctaattatcacttcggggtcacctacgtaggcactaagcaactctcccccactgaggcgttcccggttttggtaggggatatggataatagtgggtcgctgaacgctcaggttattcaccagctaggacctgggcttagatccaagatggccattcaaacccaacagtctaaatttgtaaattggcaggtggatggagaatatagggggtcagactttaccgccgcagtgaccctcggcaatcccgatgttctggtagggtccggcatcctagtggctcactatttgcagtccatcacaccatgcctagcattgggcggtgagctggtctaccatcggaggcctggcgaggaagggacggtgatgtcactcgcaggaaagtataccctaaataattggctcgccacagtcaccctcggccaggcaggaatgcacgccacatattatcataaagcctctgatcagctgcaggtgggggtggagtttgaggcctccacacgcatgcaggacactagtgtaagtttcggctaccagctggatctccctaaggcgaacctgctcttcaagggcagtgtggattctaactggattgtgggagcaactttggaaaaaaagctgccccctctccctctgactttagccctgggtgcctttctgaaccatcgcaagaataagtttcaatgtggcttcggtctcactatcggctag

SEQ ID NO: 46605 - DNA, 1696 bp, Artificial Sequence
  derived and/or modified sequence
ggggcgacggtggtggcggcggcggcagcgggttcggttgcgcgtggcgcacggggtgggagcggagcccaggccgggagcaggcgccgccgccagcgaccatggggaacgtgttggctgccagctcgccgcccgcagggccgccaccgccgcctgcgccggccctcgtggggctgccgccacctccgccctcgccgccgggcttcacgctgccgccgctgggaggcagcctgggcgccggcaccagtacgagtcgaagttcggaacggacccccggggctgcaaccgccagcgcctcaggggccgccgaggatggggcctgcggctgcctgcccaacccgggcacattcgaggagtgccaccggaagtgcaaggagctgtttcccattcagatggagggtgtcaagctcacagtcaacaaagggttgagtaaccattttcaggtcaaccacacagtagccctcagcacaatcggggagtccaactaccacttcggggtcacatatgtggggacaaagcagctgagtcccacagaggcgttccctgtactggtgggtgacatggacaacagtggcagtctcaacgctcaggtcattcaccagctgggccccggtctcaggtccaagatggccatccagacccagcagtcgaagtttgtgaactggcaggtggacggggagtatcggggctctgacttcacagcagccgtcaccctggggaacccagacgtcctcgtgggttcaggaatcctcgtagcccactacctccagagcatcacgccttgcctggccctgggtggagagctggtctaccaccggcggcctggagaggagggcactgtcatgtctctagctgggaaatacacattgaacaactggttggcaacggtaacgttgggccaggcgggcatgcacgcaacatactaccacaaagccagtgaccagctgcaggtgggtgtggagtttgaggccagcacaaggatgcaggacaccagcgtctccttcgggtaccagctggacctgcccaaggccaacctcctcttcaaaggctctgtggatagcaactggatcgtgggtgccacgctggagaagaagctcccacccctgcccctgacactggcccttggggccttcctgaatcaccgcaagaacaagtttcagtgtggctttggcctcaccatcggctgagccctcctggcccccgccttccacgcccttccgattccacctccacctccacctccccctgccacagaggggagacctgagcccccctcccttccctccccccttgggggtcgggggggacattggaaaggagggaccccgccaccccagcagctgaggaggggattctggaactgaatggcgcttcgggattctgagtagcaggggcagcatgcccagtgggcctggggtcccgggagggattccggaattgaggggcacgcaggattctgagcaccaggggcagaggcggccagacaacctcagggaggagtgtcctggcgtccccatcctccaaagggcctgggcccgccccgagggggcagcgagaggagcttccccatccccggtcagtccaccctgccccgtccactttcccatctcctcggtataaatcatgtttataagttatggaagaaccgggacattttacagaaaaaaaacaaaaaacaacaaaaaatatacgtggg

SEQ ID NO: 46606 - DNA, 1699 bp, Artificial Sequence
  derived and/or modified sequence
ggggcgacggtggtggcggcggcggcagcgggttcggttgcgcgtggcgcacggggtgggagcggagcccaggccgggagcaggcgccgccgccacaggcgaccatggggaacgtgttggctgccagctcgccgcccgcagggccgccaccgccgcctgcgccggccctcgtggggctgccgccacctccgccctcgccgccgggcttcacgctgccgccgctgggaggcagcctgggcgccggcaccagtacgagtcgaagttcggaacggacccccggggctgcaaccgccagcgcctcaggggccgccgaggatggggcctgcggctgcctgcccaacccgggcacattcgaggagtgccaccggaagtgcaaggagctgtttcccattcagatggagggtgtcaagctcacagtcaacaaagggttgagtaaccattttcaggtcaaccacacagtagccctcagcacaatcggggagtccaactaccacttcggggtcacatatgtggggacaaagcagctgagtcccacagaggcgttccctgtactggtgggtgacatggacaacagtggcagtctcaacgctcaggtcattcaccagctgggccccggtctcaggtccaagatggccatccagacccagcagtcgaagtttgtgaactggcaggtggacggggagtatcggggctctgacttcacagcagccgtcaccctggggaacccagacgtcctcgtgggttcaggaatcctcgtagcccactacctccagagcatcacgccttgcctggccctgggtggagagctggtctaccaccggcggcctggagaggagggcactgtcatgtctctagctgggaaatacacattgaacaactggttggcaacggtaacgttgggccaggcgggcatgcacgcaacatactaccacaaagccagtgaccagctgcaggtgggtgtggagtttgaggccagcacaaggatgcaggacaccagcgtctccttcgggtaccagctggacctgcccaaggccaacctcctcttcaaaggctctgtggatagcaactggatcgtgggtgccacgctggagaagaagctcccacccctgcccctgacactggcccttggggccttcctgaatcaccgcaagaacaagtttcagtgtggctttggcctcaccatcggctgagccctcctggcccccgccttccacgcccttccgattccacctccacctccacctccccctgccacagaggggagacctgagcccccctcccttccctccccccttgggggtcgggggggacattggaaaggagggaccccgccaccccagcagctgaggaggggattctggaactgaatggcgcttcgggattctgagtagcaggggcagcatgcccagtgggcctggggtcccgggagggattccggaattgaggggcacgcaggattctgagcaccaggggcagaggcggccagacaacctcagggaggagtgtcctggcgtccccatcctccaaagggcctgggcccgccccgagggggcagcgagaggagcttccccatccccggtcagtccaccctgccccgtccactttcccatctcctcggtataaatcatgtttataagttatggaagaaccgggacattttacagaaaaaaaacaaaaaacaacaaaaaatatacgtggg

SEQ ID NO: 46607 - DNA, 1791 bp, Artificial Sequence
  derived and/or modified sequence
ggggcgacggtggtggcggcggcggcagcgggttcggttgcgcgtggcgcacggggtgggagcggagcccaggccgggagcaggcgccgccgccagtgagaaccggggccggagccgggtgcggatttgctggggctgagtcgggggcgcgcgggccctgacctctgccctctgacctctcccctagcaggcgaccatggggaacgtgttggctgccagctcgccgcccgcagggccgccaccgccgcctgcgccggccctcgtggggctgccgccacctccgccctcgccgccgggcttcacgctgccgccgctgggaggcagcctgggcgccggcaccagtacgagtcgaagttcggaacggacccccggggctgcaaccgccagcgcctcaggggccgccgaggatggggcctgcggctgcctgcccaacccgggcacattcgaggagtgccaccggaagtgcaaggagctgtttcccattcagatggagggtgtcaagctcacagtcaacaaagggttgagtaaccattttcaggtcaaccacacagtagccctcagcacaatcggggagtccaactaccacttcggggtcacatatgtggggacaaagcagctgagtcccacagaggcgttccctgtactggtgggtgacatggacaacagtggcagtctcaacgctcaggtcattcaccagctgggccccggtctcaggtccaagatggccatccagacccagcagtcgaagtttgtgaactggcaggtggacggggagtatcggggctctgacttcacagcagccgtcaccctggggaacccagacgtcctcgtgggttcaggaatcctcgtagcccactacctccagagcatcacgccttgcctggccctgggtggagagctggtctaccaccggcggcctggagaggagggcactgtcatgtctctagctgggaaatacacattgaacaactggttggcaacggtaacgttgggccaggcgggcatgcacgcaacatactaccacaaagccagtgaccagctgcaggtgggtgtggagtttgaggccagcacaaggatgcaggacaccagcgtctccttcgggtaccagctggacctgcccaaggccaacctcctcttcaaaggctctgtggatagcaactggatcgtgggtgccacgctggagaagaagctcccacccctgcccctgacactggcccttggggccttcctgaatcaccgcaagaacaagtttcagtgtggctttggcctcaccatcggctgagccctcctggcccccgccttccacgcccttccgattccacctccacctccacctccccctgccacagaggggagacctgagcccccctcccttccctccccccttgggggtcgggggggacattggaaaggagggaccccgccaccccagcagctgaggaggggattctggaactgaatggcgcttcgggattctgagtagcaggggcagcatgcccagtgggcctggggtcccgggagggattccggaattgaggggcacgcaggattctgagcaccaggggcagaggcggccagacaacctcagggaggagtgtcctggcgtccccatcctccaaagggcctgggcccgccccgagggggcagcgagaggagcttccccatccccggtcagtccaccctgccccgtccactttcccatctcctcggtataaatcatgtttataagttatggaagaaccgggacattttacagaaaaaaaacaaaaaacaacaaaaaatatacgtggg

SEQ ID NO: 46608 - protein, 753 aa, Artificial Sequence
  derived and/or modified sequence
MSTRTPLPTVNERDTENHTSHGDGRQEVTSRTSRSGARCRNSIASCADEQPHIGNYRLLKTIGKGNFAKVKLARHILTGREVAIKIIDKTQLNPTSLQKLFREVRIMKILNHPNIVKLFEVIETEKTLYLIMEYASGGEVFDYLVAHGRMKEKEARSKFRQIVSAVQYCHQKRIVHRDLKAENLLLDADMNIKIADFGFSNEFTVGGKLDTFCGSPPYAAPELFQGKKYDGPEVDVWSLGVILYTLVSGSLPFDGQNLKELRERVLRGKYRIPFYMSTDCENLLKRFLVLNPIKRGTLEQIMKDRWINAGHEEDELKPFVEPELDISDQKRIDIMVGMGYSQEEIQESLSKMKYDEITATYLLLGRKSSELDASDSSSSSNLSLAKVRPSSDLNNSTGQSPHHKVQRSVFSSQKQRRYSDHAGPAIPSVVAYPKRSQTSTADSDLKEDGISSRKSSGSAVGGKGIAPASPMLGNASNPNKADIPERKKSSTVPSSNTASGGMTRRNTYVCSERTTADRHSVIQNGKENSTIPDQRTPVASTHSISSAATPDRIRFPRGTASRSTFHGQPRERRTATYNGPPASPSLSHEATPLSQTRSRGSTNLFSKLTSKLTRRNMSFRFIKRLPTEYERNGRYEGSSRNVSAEQKDENKEAKPRSLRFTWSMKTTSSMDPGDMMREIRKVLDANNCDYEQRERFLLFCVHGDGHAENLVQWEMEVCKLPRLSLNGVRFKRISGTSIAFKNIASKIANELKL

SEQ ID NO: 46609 - DNA, 2262 bp, Artificial Sequence
  derived and/or modified sequence
atgtctacccgaacacctttgcccaccgtgaatgagcgtgacacagagaatcacacgagccacggagacggtcgccaggaagtgacctcccgaacctctcgttccggtgcgcggtgcagaaattctattgcatcctgtgcggacgaacagcctcatataggaaactacagactgcttaagaccataggcaagggcaattttgcaaaggtcaagcttgccagacatatcttgacggggcgcgaagtggccattaagatcattgataagacacagttaaacccgacttcccttcagaagctgtttcgcgaagtcaggatcatgaagatattgaatcatccaaacatcgtgaagctgtttgaggtgatagagacggaaaaaactctttacctcatcatggagtatgcaagcggcggtgaggttttcgattaccttgtggcgcacggaagaatgaaggaaaaggaagcccggagcaagtttcgccagattgtctctgctgtgcagtactgtcaccagaagagaattgtgcacagggacttaaaggccgagaaccttctgctggacgcagatatgaacattaagattgccgatttcggcttctcgaacgagttcacagtgggaggaaagctcgacacgttctgtgggtcacccccctatgctgcaccggaactgttccagggcaagaaatatgatggccccgaggtggacgtttggagcctgggcgttattctgtacacactcgtctccggttccctccccttcgacggacagaatctgaaagagcttagagagagagtgctgagggggaagtaccgtataccgttttacatgtcaaccgattgtgagaaccttcttaagagatttctggtgctcaatcctattaaaaggggaacgttggaacagatcatgaaggataggtggattaacgctgggcacgaagaagacgagttaaagccttttgtcgaacccgaactggatatcagcgatcaaaagcgcatagatattatggttgggatggggtattctcaagaggagatccaggagtccttgtccaaaatgaagtacgatgagatcaccgccacttacctgcttttagggcgcaagagcagcgagctggatgcctccgactctagctccagctcaaacctttctctggcgaaagtgcgtccctcttctgatctgaataacagcactgggcaaagccctcaccacaaagtgcagcggtcggtctttagctcacaaaaacaaaggagatattccgatcatgccggcccagccatcccttccgtggtagcctaccccaaacgctcgcagaccagtactgcagacagtgacctaaaggaagatggcatctcctcccgtaaaagtagtggcagtgctgttggtgggaagggtatcgccccggcatcacccatgcttggaaacgcttcaaaccccaacaaggccgatatccccgagcgcaagaagtcgagtaccgtgcccagctcaaataccgcttccggcggcatgactcggagaaacacctatgtatgcagcgagagaacaactgccgacagacatagtgtcatacagaacggcaaagagaacagtaccataccagaccaacgtacgcctgtcgcatccacacacagcatcagctccgcagccacaccagataggataaggttcccccggggcacggcatcccggtccacctttcacggccagccaagagagcgcagaaccgccacgtacaacggacctcctgctagcccctcactcagccatgaagcaacccctctttctcaaaccagaagcaggggctccacaaacctgttctctaagttgacatctaaacttacgcggcgcaacatgagtttccgattcatcaaaagacttccaacagaatacgaacgaaatggtcggtatgaaggcagttcccgcaacgtttctgctgaacagaaagatgaaaacaaagaagcaaagcccagaagtctcaggtttacctggtcaatgaagaccacttccagcatggacccaggagacatgatgcgggagatcagaaaagtgctggacgcaaataactgtgactatgagcaacgggagagattcctcctgttttgtgtgcacggggatgggcacgctgaaaacctggtgcagtgggagatggaagtttgtaaattgccgcggctgagcttgaacggggtccggtttaaacggatcagcggcacgtcaattgcattcaagaacatcgcctcgaagatcgctaatgagctcaaactgtag

SEQ ID NO: 46610 - DNA, 2262 bp, Artificial Sequence
  derived and/or modified sequence
atgagcaccaggacccccctgcccaccgtgaatgaaagagacacagagaaccacaccagccatggagatggccggcaggaggtgaccagcaggaccagccgcagcggggcccgctgcaggaacagcatcgccagctgtgctgatgagcagccccacatcggcaactaccgcctgctgaagaccatcggcaagggcaactttgccaaggtgaagctggcccggcacatcctgaccggccgggaggtggccatcaagatcatcgacaagacccagctgaaccccaccagcctgcagaagctgttccgggaggtgcgcatcatgaagatcctgaaccaccccaacatcgtgaagctgtttgaagtcatcgagacagagaagaccctgtacctgatcatggagtatgccagcggcggggaggtgtttgactacctggtggcccacggccgcatgaaggagaaggaggcccggagcaagttccggcagatcgtgtctgctgtgcagtactgccaccagaagagaattgtgcaccgggacctgaaggccgagaacctgctgctggatgctgacatgaacatcaagattgctgactttggcttcagcaatgagttcaccgtgggcggcaagctggacaccttctgtggcagccccccctatgctgcccctgagctgttccagggcaagaagtatgatggccctgaggtggatgtgtggagcctgggcgtcatcctgtacaccctggtgtctggcagcctgccctttgatggccagaacctgaaggagctgcgggagcgggtgctgcggggcaagtaccgcatccccttctacatgagcacagactgtgagaacctgctgaagcgcttcctggtgctgaaccccatcaagaggggcaccctggagcagatcatgaaggaccgctggatcaatgccggccatgaagaagatgagctgaagccctttgtggagcctgagctggacatcagtgaccagaagagaattgacatcatggtgggcatgggctacagccaggaggagatccaggagagcctgagcaagatgaagtatgatgagatcacagccacctacctgctgctgggcaggaagagcagcgagctggatgccagtgacagcagcagcagcagcaacctgagcctggccaaggtgcggcccagcagtgacctgaacaacagcacaggccagagcccccaccacaaggtgcagaggagcgtcttcagcagccagaagcagaggcgctacagcgaccacgccggccctgccatccccagcgtggtggcctaccccaagaggagccagaccagcacagctgacagcgacctgaaggaggatggcatcagcagcaggaagagcagcggcagcgctgtgggcggcaaaggaattgccccagccagccccatgctgggcaatgccagcaaccccaacaaggctgacatccctgagaggaagaagagcagcacagtgcccagcagcaacacagccagcggcggcatgaccaggaggaacacctacgtgtgcagcgagaggaccacagctgacagacacagcgtcatccagaatggcaaggagaacagcaccatcccagaccagaggacccctgtggccagcacccacagcatcagcagcgctgccaccccagaccgcatccgcttcccccggggcacagccagccgcagcaccttccacggccagccccgggagaggagaacagccacctacaacggccccccagccagccccagcctgagccatgaggccacccccctgagccagaccaggagccggggcagcaccaacctcttcagcaagctgaccagcaagctgaccaggaggaacatgtccttccgcttcatcaagaggctgcccacagaatatgaaagaaatggccgctatgagggcagcagcagaaatgtgtctgctgagcagaaggatgagaacaaggaggccaagcccaggagcctgcgcttcacctggagcatgaagaccaccagctccatggaccccggggacatgatgagggagatcaggaaggtgctggatgccaacaactgtgactatgagcagcgggagcgcttcctgctcttctgtgtgcatggagatggccatgctgagaacctggtgcagtgggagatggaggtgtgcaagctgccccggctgagcctgaatggagtgcgcttcaagaggatcagcggcaccagcatcgccttcaagaacatcgccagcaagatcgccaatgagctgaagctgtag

SEQ ID NO: 46611 - DNA, 3371 bp, Artificial Sequence
  derived and/or modified sequence
caggcgcctcctccgcagcccgctccatggtcggcgcccacagcccgcggcggcctgtcttgcgctccacttccttcacatcctcctccgcctcctcgttttcaggcgccgccggcggcgctgtgtggaggcccgcgagctgaaattcgcggtgcgacgggagggagtggagaaggaggtgagggggcccaggatcgcggggcgccctgaggcaaggggacgccggcgggccgaagcgcagcccgccgcccgcaggctcggctccgccactgccgccctcccggtctcctcgcctcggccgccgaggcagggagagaatgagccccgggacccgccgggggacggcccgggccaggcccgggatctagacggccgtagggggaagggagccgccctccccacggcgccttttcggaactgccgtggactcgaggacgctggtcgccggcctcctagggctgtgctgttttgttttgaccctcgcattgtgcagaattaaagtgcagtaaaatgtccactaggaccccattgccaacggtgaatgaacgagacactgaaaaccacacgtcacatggagatgggcgtcaagaagttacctctcgtaccagccgctcaggagctcggtgtagaaactctatagcctcctgtgcagatgaacaacctcacatcggaaactacagactgttgaaaacaatcggcaaggggaattttgcaaaagtaaaattggcaagacatatccttacaggcagagaggttgcaataaaaataattgacaaaactcagttgaatccaacaagtctacaaaagctcttcagagaagtaagaataatgaagattttaaatcatcccaatatagtgaagttattcgaagtcattgaaactgaaaaaacactctacctaatcatggaatatgcaagtggaggtgaagtatttgactatttggttgcacatggcaggatgaaggaaaaagaagcaagatctaaatttagacagattgtgtctgcagttcaatactgccatcagaaacggatcgtacatcgagacctcaaggctgaaaatctattgttagatgccgatatgaacattaaaatagcagatttcggttttagcaatgaatttactgttggcggtaaactcgacacgttttgtggcagtcctccatacgcagcacctgagctcttccagggcaagaaatatgacgggccagaagtggatgtgtggagtctgggggtcattttatacacactagtcagtggctcacttccctttgatgggcaaaacctaaaggaactgagagagagagtattaagagggaaatacagaattcccttctacatgtctacagactgtgaaaaccttctcaaacgtttcctggtgctaaatccaattaaacgcggcactctagagcaaatcatgaaggacaggtggatcaatgcagggcatgaagaagatgaactcaaaccatttgttgaaccagagctagacatctcagaccaaaaaagaatagatattatggtgggaatgggatattcacaagaagaaattcaagaatctcttagtaagatgaaatacgatgaaatcacagctacatatttgttattggggagaaaatcttcagagctggatgctagtgattccagttctagcagcaatctttcacttgctaaggttaggccgagcagtgatctcaacaacagtactggccagtctcctcaccacaaagtgcagagaagtgttttttcaagccaaaagcaaagacgctacagtgaccatgctggaccagctattccttctgttgtggcgtatccgaaaaggagtcagaccagcactgcagatagtgacctcaaagaagatggaatttcctcccggaaatcaagtggcagtgctgttggaggaaagggaattgctccagccagtcccatgcttgggaatgcaagtaatcctaataaggcggatattcctgaacgcaagaaaagctccactgtccctagtagtaacacagcatctggtggaatgacacgacgaaatacttatgtttgcagtgagagaactacagctgatagacactcagtgattcagaatggcaaagaaaacagcactattcctgatcagagaactccagttgcttcaacacacagtatcagtagtgcagccaccccagatcgaatccgcttcccaagaggcactgccagtcgtagcactttccacggccagccccgggaacggcgaaccgcaacatataatggccctcctgcctctcccagcctgtcccatgaagccacaccattgtcccagactcgaagccgaggctccactaatctctttagtaaattaacttcaaaactcacaaggagaaacatgtcattcaggtttatcaaaaggcttccaactgaatatgagaggaacgggagatatgagggctcaagtcgcaatgtatctgctgagcaaaaagatgaaaacaaagaagcaaagcctcgatccctacgcttcacctggagcatgaaaaccactagttcaatggatcccggggacatgatgcgggaaatccgcaaagtgttggacgccaataactgcgactatgagcagagggagcgcttcttgctcttctgcgtccacggagatgggcacgcggagaacctcgtgcagtgggaaatggaagtgtgcaagctgccaagactgtctctgaacggggtccggtttaagcggatatcggggacatccatagccttcaaaaatattgcttccaaaattgccaatgagctaaagctgtaacccagtgattatgatgtaaattaagtagcaattaaagtgttttcctgaacactgatggaaatgtatagaataatatttaggcaataacgtctgcatcttctaaatcatgaaattaaagtctgaggacgagagcacgcctgggagcgaaagctggccttttttctacgaatgcactacattaaagatgtgcaacctatgcgccccctgccctacttccgttaccctgagagtcggtgtgtggccccatctccatgtgcctcccgtctgggtgggtgtgagagtggacggtatgtgtgtgaagtggtgtatatggaagcatctccctacactggcagccagtcattactagtacctctgcgggagatcatccggtgctaaaacattacagttgccaaggaggaaaatactgaatgactgctaagaattaaccttaagaccagttcatagttaatacaggtttacagttcatgcctgtggttttgtgtttgttgttttgtgtttttttagtgcaaaaggtttaaatttatagttgtgaacattgcttgtgtgtgtttttctaagtagattcacaagataattaaaaattcactttttctcag

SEQ ID NO: 46612 - DNA, 2262 bp, Artificial Sequence
  derived and/or modified sequence
atgagcacccggacccccctgcccaccgtgaacgagcgggacaccgagaaccatacctctcatggagatgggcggcaagaggtaacgtcccgaactagtcgttcgggagcccgctgcagaaactctattgcatcctgtgctgacgagcagcctcacatcggcaattatcgcttgctgaagacgatagggaaagggaacttcgcgaaggtgaagctcgcacgtcacatcctgactggccgggaagtggcaatcaaaatcattgacaaaactcagttaaaccccacctctttgcaaaagctgtttagggaggtgaggattatgaaaatactgaatcatcctaatattgtcaagctgttcgaggtgatcgagacggagaaaacactctatcttatcatggagtatgcatctgggggagaggtcttcgactatcttgttgcccacggtcgcatgaaagaaaaggaggcccggtctaagtttaggcagattgtatccgcagtccaatactgccaccaaaaacggattgtgcatcgtgatttgaaagcagaaaaccttctgctggacgctgatatgaatattaagatcgccgacttcggtttctctaatgaatttacagtcgggggtaagcttgatacattctgcgggtcacctccctacgctgcccccgagctgttccagggcaagaaatatgacgggcccgaggtggatgtgtggtctctgggagtaattttatatacactggttagcggcagtctgccgttcgacggacagaatttaaaagagcttcgagagcgcgtcttgcggggcaagtaccggattcccttttatatgtcgactgattgcgaaaacctgctgaagagattcctcgtgctgaatccaattaagcgtggaacattggagcagataatgaaggacaggtggattaatgccggtcatgaggaggacgagctgaagccgttcgtggaaccggagctagacatttcagaccagaaacgtatcgacatcatggtgggtatgggatattcacaggaagagatccaggagtccctgagtaagatgaagtacgacgaaataacagcaacatatctgctactgggtcggaagagcagcgagctcgatgcttccgatagctcatctagctcgaatctgagcctcgccaaggtccgaccaagttccgatctcaacaactccaccggccaatcacctcatcacaaagttcagagatctgtgttctcatctcaaaagcagcgcaggtatagtgatcatgccggcccagcaataccgagcgtagtggcctatcctaagcggtcccagacttcaaccgctgactcagatctcaaagaagacggaatctccagccgaaagagtagcggaagcgcggttggcgggaaaggaatcgcgcctgcctctccgatgctggggaacgcatctaatcctaataaggctgacattcctgaaagaaagaagtcaagcacggtgccaagctcaaatacagctagcggaggcatgacccgccgaaacacctacgtgtgtagtgaacgcaccacggccgataggcattctgttatccagaacgggaaagagaatagcacaatccccgaccagcggacccctgtcgcatcaacacactccatcagttctgccgctaccccagatcggattcgattcccacgaggaacagcatcaagaagcactttccatgggcaacctcgggagcggcgaactgctacctacaacggtccgcctgcttctccatccttgtcacacgaggccaccccactatcacagaccagaagcagagggtctacaaatctatttagtaagttgacatcaaaattgactcgcagaaacatgtcatttcggtttattaagcgcctgcccacagagtatgaacgaaacggccggtatgagggatcatctcgtaacgtgagcgccgagcaaaaggatgagaacaaggaggctaagcccagatcgctacggttcacttggagcatgaaaacaactagcagtatggatcctggtgatatgatgagagagatcaggaaagttctcgacgcaaacaactgtgactatgagcaacgggaacgcttcttgcttttttgtgtgcatggagacggacacgccgaaaatctcgttcagtgggagatggaggtgtgtaagctgccccgtctcagccttaacggagtgcgtttcaagaggatctccggcacaagcatcgcctttaagaacatcgcctccaagatcgcgaacgagcttaagctgtag

SEQ ID NO: 46613 - DNA, 2262 bp, Artificial Sequence
  derived and/or modified sequence
atgtccacccgtacaccgctccctacggtgaatgagcgagacacagaaaatcacacttcgcacggcgacgggagacaagaagtgactagcaggacctcccgatccggggctaggtgtcggaatagtattgcctcctgcgcagatgagcaacctcatataggaaattataggctgctgaagacaattggaaaaggaaatttcgccaaagtgaaactggcaaggcatatcttgactgggcgtgaagtcgcaatcaagattattgacaagacccagctgaacccaaccagtctccaaaagctgttccgggaggtgaggattatgaagatcctgaaccatcctaacatcgtgaagctgtttgaggtgattgagacggagaaaaccctctacctaatcatggagtacgcatccgggggtgaggtttttgactatttggtcgcccatggaagaatgaaggagaaggaggctcggtcaaagttcagacaaattgtttccgccgtgcagtattgtcaccaaaagcggatcgtacatagggacctgaaggctgaaaatctcttacttgacgctgatatgaacattaagattgcagacttcggcttttcaaatgaatttacggtcggcggaaagctcgataccttttgcgggagccccccttacgcagcacccgagctctttcagggaaagaaatatgatggcccagaagtggacgtgtggtccctcggagtgatactttacacccttgtatctggcagcctgccgttcgatggccaaaacctgaaagagctgagggaaagagtcctgagaggaaagtatcgtattccattttatatgtcaactgactgcgagaatttattgaagcgcttcctggtattgaaccccattaagcgcggaacactagaacagattatgaaagatagatggattaatgcaggacatgaagaggatgagctgaaaccattcgtcgagcctgagcttgatatcagtgatcaaaagcgcattgatatcatggtggggatggggtatagccaagaagaaatccaggagtctctgtctaaaatgaagtacgacgagatcactgccacctatttgctgctgggaaggaagagcagcgagctcgatgcttccgattcctccagttcaagtaacctcagtctcgccaaagtgcgaccgtcttctgacttgaacaactcaacgggccagtccccccatcataaggtccagagatctgtgttttccagtcagaagcagagacgctactcggaccatgcaggaccagctattccatccgtggtggcgtaccccaaaaggagccagacatctaccgccgacagtgatctaaaggaggatggcatcagttcccgtaagagcagcgggtcggcagtagggggaaaagggattgctcctgcatctcccatgctcgggaatgcaagcaaccccaacaaggccgatattccggagaggaaaaaaagttccacggtacctagttccaacaccgcctcgggtggcatgactcgacgaaatacgtacgtgtgcagcgagcggaccactgctgaccggcacagcgtgatccaaaacgggaaagaaaattctacaatccccgaccagagaaccccagttgcctcgacccacagcatctcttcagccgctacccctgatagaatccggttccccagagggaccgcctcccgcagcaccttccacgggcagccacgggagcgacggacggccacttacaacggaccacctgctagtccaagcttatcacacgaagctaccccactaagccaaaccaggtctcggggatcaacaaacttgttctctaagctcacctcaaagctcacccggcgaaatatgtccttcagatttattaagagattgcccacagagtatgaaaggaacgggaggtatgagggttccagcaggaatgtatccgcagagcagaaagatgagaataaagaagctaagcctcggagcttgagatttacttggtcaatgaaaaccacctcaagtatggaccctggagacatgatgcgcgagatcagaaaggtcctggacgctaacaattgcgattatgaacagagggagcggttcttgctcttctgtgtccacggcgacgggcatgcagaaaatctggtacagtgggaaatggaagtttgcaagctccccaggctgtccctgaacggcgtgagattcaaaagaatttcagggacctctattgcttttaaaaacatcgccagtaagatcgcaaacgagctgaagctgtag

SEQ ID NO: 46614 - DNA, 2262 bp, Artificial Sequence
  derived and/or modified sequence
atgagcaccagaacccccctgcccaccgtgaacgagagagacaccgagaaccacaccagccacggcgacggcagacaggaggtgaccagcagaaccagcagaagcggcgccagatgcagaaacagcatcgccagctgcgccgacgagcagccccacatcggcaactacagactgctgaagaccatcggcaagggcaacttcgccaaggtgaagctggccagacacatcctgaccggcagagaggtggccatcaagatcatcgacaagacccagctgaaccccaccagcctgcagaagctgttcagagaggtgagaatcatgaagatcctgaaccaccccaacatcgtgaagctgttcgaggtgatcgagaccgagaagaccctgtacctgatcatggagtacgccagcggcggcgaggtgttcgactacctggtggcccacggcagaatgaaggagaaggaggccagaagcaagttcagacagatcgtgagcgccgtgcagtactgccaccagaagagaatcgtgcacagagacctgaaggccgagaacctgctgctggacgccgacatgaacatcaagatcgccgacttcggcttcagcaacgagttcaccgtgggcggcaagctggacaccttctgcggcagccccccctacgccgcccccgagctgttccagggcaagaagtacgacggccccgaggtggacgtgtggagcctgggcgtgatcctgtacaccctggtgagcggcagcctgcccttcgacggccagaacctgaaggagctgagagagagagtgctgagaggcaagtacagaatccccttctacatgagcaccgactgcgagaacctgctgaagagattcctggtgctgaaccccatcaagagaggcaccctggagcagatcatgaaggacagatggatcaacgccggccacgaggaggacgagctgaagcccttcgtggagcccgagctggacatcagcgaccagaagagaatcgacatcatggtgggcatgggctacagccaggaggagatccaggagagcctgagcaagatgaagtacgacgagatcaccgccacctacctgctgctgggcagaaagagcagcgagctggacgccagcgacagcagcagcagcagcaacctgagcctggccaaggtgagacccagcagcgacctgaacaacagcaccggccagagcccccaccacaaggtgcagagaagcgtgttcagcagccagaagcagagaagatacagcgaccacgccggccccgccatccccagcgtggtggcctaccccaagagaagccagaccagcaccgccgacagcgacctgaaggaggacggcatcagcagcagaaagagcagcggcagcgccgtgggcggcaagggcatcgcccccgccagccccatgctgggcaacgccagcaaccccaacaaggccgacatccccgagagaaagaagagcagcaccgtgcccagcagcaacaccgccagcggcggcatgaccagaagaaacacctacgtgtgcagcgagagaaccaccgccgacagacacagcgtgatccagaacggcaaggagaacagcaccatccccgaccagagaacccccgtggccagcacccacagcatcagcagcgccgccacccccgacagaatcagattccccagaggcaccgccagcagaagcaccttccacggccagcccagagagagaagaaccgccacctacaacggcccccccgccagccccagcctgagccacgaggccacccccctgagccagaccagaagcagaggcagcaccaacctgttcagcaagctgaccagcaagctgaccagaagaaacatgagcttcagattcatcaagagactgcccaccgagtacgagagaaacggcagatacgagggcagcagcagaaacgtgagcgccgagcagaaggacgagaacaaggaggccaagcccagaagcctgagattcacctggagcatgaagaccaccagcagcatggaccccggcgacatgatgagagagatcagaaaggtgctggacgccaacaactgcgactacgagcagagagagagattcctgctgttctgcgtgcacggcgacggccacgccgagaacctggtgcagtgggagatggaggtgtgcaagctgcccagactgagcctgaacggcgtgagattcaagagaatcagcggcaccagcatcgccttcaagaacatcgccagcaagatcgccaacgagctgaagctgtag

SEQ ID NO: 46615 - protein, 445 aa, Artificial Sequence
  derived and/or modified sequence
MKYDEITATYLLLGRKSSELDASDSSSSSNLSLAKVRPSSDLNNSTGQSPHHKVQRSVFSSQKQRRYSDHAGPAIPSVVAYPKRSQTSTADSDLKEDGISSRKSSGSAVGGKGIAPASPMLGNASNPNKADIPERKKSSTVPSSNTASGGMTRRNTYVCSERTTADRHSVIQNGKENSLTEMFAYAASPASVCTSTCRLRHQKSMSMSASGHPKMMLPPIDSEGDNFKAITIPDQRTPVASTHSISSAATPDRIRFPRGTASRSTFHGQPRERRTATYNGPPASPSLSHEATPLSQTRSRGSTNLFSKLTSKLTRRLPTEYERNGRYEGSSRNVSAEQKDENKEAKPRSLRFTWSMKTTSSMDPGDMMREIRKVLDANNCDYEQRERFLLFCVHGDGHAENLVQWEMEVCKLPRLSLNGVRFKRISGTSIAFKNIASKIANELKL

SEQ ID NO: 46616 - protein, 744 aa, Artificial Sequence
  derived and/or modified sequence
MSTRTPLPTVNERDTENHTSHGDGRQEVTSRTSRSGARCRNSIASCADEQPHIGNYRLLKTIGKGNFAKVKLARHILTGREVAIKIIDKTQLNPTSLQKLFREVRIMKILNHPNIVKLFEVIETEKTLYLIMEYASGGEVFDYLVAHGRMKEKEARSKFRQIVSAVQYCHQKRIVHRDLKAENLLLDADMNIKIADFGFSNEFTVGGKLDTFCGSPPYAAPELFQGKKYDGPEVDVWSLGVILYTLVSGSLPFDGQNLKELRERVLRGKYRIPFYMSTDCENLLKRFLVLNPIKRGTLEQIMKDRWINAGHEEDELKPFVEPELDISDQKRIDIMVGMGYSQEEIQESLSKMKYDEITATYLLLGRKSSELDASDSSSSSNLSLAKVRPSSDLNNSTGQSPHHKVQRSVFSSQKQRRYSDHAGPAIPSVVAYPKRSQTSTADSDLKEDGISSRKSSGSAVGGKGIAPASPMLGNASNPNKADIPERKKSSTVPSSNTASGGMTRRNTYVCSERTTADRHSVIQNGKENSTIPDQRTPVASTHSISSAATPDRIRFPRGTASRSTFHGQPRERRTATYNGPPASPSLSHEATPLSQTRSRGSTNLFSKLTSKLTRRLPTEYERNGRYEGSSRNVSAEQKDENKEAKPRSLRFTWSMKTTSSMDPGDMMREIRKVLDANNCDYEQRERFLLFCVHGDGHAENLVQWEMEVCKLPRLSLNGVRFKRISGTSIAFKNIASKIANELKL

SEQ ID NO: 46617 - DNA, 1338 bp, Artificial Sequence
  derived and/or modified sequence
atgaagtacgatgaaataaccgctacttacctgcttctgggcaggaagagctctgagctggatgctagcgacagctcctcatccagcaacctttcattagctaaagtccgaccatcaagcgacctaaacaactctaccggtcaatcaccccaccacaaggtccagcgcagcgtctttagcagtcaaaagcaaaggcgctatagcgaccacgcgggtcccgcaattcccagtgtcgtggcctatccaaagaggtcccagactagcactgccgattctgacctcaaggaggacgggatttcgtcccggaagtcaagtggaagcgcggtcggcgggaagggtatcgctccggcttctccaatgctgggcaatgcctctaacccgaacaaggcggacattcccgagcgcaaaaagtccagtaccgtgcctagtagcaacacagccagtgggggaatgacaagaagaaacacgtatgtgtgctcagagcggactactgccgatcgccactccgtcattcagaacggtaaagaaaacagcctcacagagatgttcgcttacgccgccagtcccgccagtgtctgtaccagtacttgccgcttgcgacaccagaagtccatgtctatgtcagcctccggacacccgaagatgatgctgcctcctatagattccgagggtgataattttaaggccatcactattccagaccagaggactcctgtcgcttccacgcattccatatccagcgcagcaactcccgaccgtatacgcttccctcgggggacagcatcgaggagtacttttcatgggcagcccagggaaaggagaactgcaacctacaatggaccaccagcatcccctagcctttcccacgaagccactcccctgagccagactagatcaagaggctcaacgaacctcttctctaagctgacttccaaactcacaaggcgcctgccaactgagtatgaacgaaatggccggtacgagggatcatcacggaacgtgtctgcagaacagaaagacgagaataaagaagcaaagccccgctccttgcgctttacttggagcatgaaaactacctcttcaatggatccgggcgatatgatgagggagatccgtaaggtacttgatgcaaacaattgtgattatgagcagcgcgagcgatttctgttattctgcgtacacggagatggacacgccgagaatcttgtgcagtgggagatggaggtgtgtaagctgccaagactcagcctcaatggggttcggtttaaacgcattagcggcacctcgatcgcatttaaaaatatcgcctcaaagatagccaatgaactaaagttgtag

SEQ ID NO: 46618 - DNA, 2235 bp, Artificial Sequence
  derived and/or modified sequence
atgagcactcgcactcctctaccgaccgtgaacgagcgggacacagagaaccacacatcacacggtgacggccgccaagaagtgacaagccgaactagccggtccggtgccagatgtagaaattcaattgcctcctgcgccgatgagcaacctcacatcgggaactaccggctgttgaagactatcggaaaggggaatttcgccaaagtgaagctggcccggcacatcctcaccggcagggaggttgccattaagattattgacaagacccagctgaacccaacctctctgcagaagctatttagggaagtgagaataatgaagatcctgaatcatcccaatatcgtcaagctgttcgaggtcatcgagactgaaaagactctttacctgataatggagtacgcttccggtggggaggtgttcgactacctggtggcccacggccgaatgaaggagaaggaggcccgaagtaagtttaggcaaatcgtgagcgctgttcagtattgtcatcaaaaacgtatagtgcacagagacctgaaagcagaaaatctgctgcttgatgccgatatgaatattaaaatagcagatttcggtttctcaaacgagtttaccgtaggcggtaaattggacactttctgtggctccccgccctacgccgctcctgagctatttcaaggtaaaaagtatgatgggccagaggtcgacgtgtggtctttgggcgtgattctttacacattggtaagtggatccctccctttcgacggccagaatctcaaggaactgagggagcgggtgttgcgcggcaaatatcgcatccctttctacatgagtaccgactgtgagaatctgctgaagcgctttctcgtgctgaatccgatcaagagggggaccctcgagcagataatgaaggatcgttggattaatgccggtcacgaggaggacgaactgaaaccttttgtcgagcctgaattggatatctcagatcaaaagaggattgatatcatggttgggatgggatactcccaggaagagattcaggagtctttgtccaagatgaagtatgatgaaatcaccgccacgtacttgctccttggacggaaaagttcagaactggatgcctctgatagttcctcaagctccaatttgtccctagcaaaggttcgcccttcgagcgatcttaataattccacaggccagagtccccaccacaaagtgcagcgctctgtgttttcaagccaaaagcagaggcgatactccgatcacgcgggacctgctatccccagcgtggtcgcatatccaaagagatctcagacatccaccgctgactctgatcttaaggaagacgggatttccagccggaagagttctggctcagctgtgggcggtaaaggtattgcccccgcctcccctatgctgggcaatgcgtccaaccccaataaggccgacatcccagagcgcaaaaagagctcaacggtgcctagctctaataccgcttccggaggcatgaccagacgtaacacttacgtgtgcagcgagcggactaccgctgatcgtcatagtgtcattcagaacggcaaagaaaattctaccatcccagatcagaggactccagtcgcatcaacacatagcatttcttctgccgcaactcctgatcggattagattccctcgcggaacagccagccgttccacttttcatggccagccaagagaacgccgcaccgctacttacaacgggcccccagcttccccatctctttcccacgaagccacccctctgagtcagacaagatctcggggtagcaccaaccttttctccaaattgacatccaagctgacaagacgcctgcccaccgagtacgagaggaacggacggtacgaggggagcagtaggaacgtctccgcagagcaaaaggacgagaacaaggaggcaaagccacgttccctgcgattcacctggtcaatgaagacgacctcgagcatggatcctggcgatatgatgcgcgaaattaggaaggtgctggatgcaaacaactgcgattatgaacagcgggagagattcctgctgttctgtgtccacggcgacggtcacgcggagaatctggttcaatgggagatggaggtgtgcaaactgccccgcctctctcttaacggagtgcggtttaaacggatcagcgggacctcgatcgcctttaagaacattgccagtaagattgccaatgagttaaagttgtag

SEQ ID NO: 46619 - DNA, 1338 bp, Artificial Sequence
  derived and/or modified sequence
atgaagtatgatgagatcacagccacctacctgctgctgggcaggaagagcagcgagctggatgccagtgacagcagcagcagcagcaacctgagcctggccaaggtgcggcccagcagtgacctgaacaacagcacaggccagagcccccaccacaaggtgcagaggtctgtgttcagcagccagaagcagaggcgctacagcgaccatgctggccctgccatccccagcgtggtggcctaccccaagaggagccagaccagcacagctgacagcgacctgaaggaggatggcatcagcagcaggaagagcagcggcagcgctgtgggcggcaagggcatcgccccagccagccccatgctgggcaatgccagcaaccccaacaaggctgacatccctgagaggaagaagagcagcacagtgcccagcagcaacacagccagcggcggcatgaccaggaggaacacctacgtgtgcagcgagaggaccacagctgacagacattctgtcatccagaatggcaaggagaacagcctgacagagatgtttgcctatgctgccagccctgcctctgtgtgcaccagcacctgccgcctgcggcaccagaagtccatgtccatgtctgccagcggccaccccaagatgatgctgccccccatcgacagcgagggggacaacttcaaggccatcaccatcccagaccagaggacccctgtggccagcacccacagcatcagcagcgctgccaccccagaccgcatccgcttcccccggggcacagccagccgcagcaccttccacggccagccccgggagaggagaacagccacctacaatggacctccagccagccccagcctgagccatgaggccacccccctgagccagaccaggagccggggcagcaccaacctcttcagcaagctgaccagcaagctgacccggcggctgcccacagaatatgaaagaaatggccgctatgagggcagcagcagaaatgtgtctgctgagcagaaggatgagaacaaggaggccaagcccaggagcctgcgcttcacctggagcatgaagaccaccagctccatggaccccggggacatgatgagggagatcaggaaggtgctggatgccaacaactgtgactatgagcagcgggagcgcttcctgctcttctgtgtgcatggagatggccatgctgagaacctggtgcagtgggagatggaggtgtgcaagctgccccggctgagcctgaatggagtgcgcttcaagaggatcagcggcaccagcatcgccttcaagaacatcgccagcaagatcgccaatgagctgaagctgtag

SEQ ID NO: 46620 - DNA, 2235 bp, Artificial Sequence
  derived and/or modified sequence
atgagcaccaggacccccctgcccaccgtgaatgaaagagacacagagaaccacaccagccatggagatggccggcaggaggtgaccagcaggaccagccgcagcggggcccgctgcaggaacagcatcgccagctgtgctgatgagcagccccacatcggcaactaccgcctgctgaagaccatcggcaagggcaactttgccaaggtgaagctggcccggcacatcctgaccggccgggaggtggccatcaagatcatcgacaagacccagctgaaccccaccagcctgcagaagctgttccgggaggtgcgcatcatgaagatcctgaaccaccccaacatcgtgaagctgtttgaagtcatcgagacagagaagaccctgtacctgatcatggagtatgccagcggcggggaggtgtttgactacctggtggcccacggccgcatgaaggagaaggaggcccggagcaagttccggcagatcgtgtctgctgtgcagtactgccaccagaagagaattgtgcaccgggacctgaaggccgagaacctgctgctggatgctgacatgaacatcaagattgctgactttggcttcagcaatgagttcaccgtgggcggcaagctggacaccttctgtggcagccccccctatgctgcccctgagctgttccagggcaagaagtatgatggccctgaggtggatgtgtggagcctgggcgtcatcctgtacaccctggtgtctggcagcctgccctttgatggccagaacctgaaggagctgcgggagcgggtgctgcggggcaagtaccgcatccccttctacatgagcacagactgtgagaacctgctgaagcgcttcctggtgctgaaccccatcaagaggggcaccctggagcagatcatgaaggaccgctggatcaatgccggccatgaagaagatgagctgaagccctttgtggagcctgagctggacatcagtgaccagaagagaattgacatcatggtgggcatgggctacagccaggaggagatccaggagagcctgagcaagatgaagtatgatgagatcacagccacctacctgctgctgggcaggaagagcagcgagctggatgccagtgacagcagcagcagcagcaacctgagcctggccaaggtgcggcccagcagtgacctgaacaacagcacaggccagagcccccaccacaaggtgcagaggagcgtcttcagcagccagaagcagaggcgctacagcgaccacgccggccctgccatccccagcgtggtggcctaccccaagaggagccagaccagcacagctgacagcgacctgaaggaggatggcatcagcagcaggaagagcagcggcagcgctgtgggcggcaaaggaattgccccagccagccccatgctgggcaatgccagcaaccccaacaaggctgacatccctgagaggaagaagagcagcacagtgcccagcagcaacacagccagcggcggcatgaccaggaggaacacctacgtgtgcagcgagaggaccacagctgacagacacagcgtcatccagaatggcaaggagaacagcaccatcccagaccagaggacccctgtggccagcacccacagcatcagcagcgctgccaccccagaccgcatccgcttcccccggggcacagccagccgcagcaccttccacggccagccccgggagaggagaacagccacctacaacggccccccagccagccccagcctgagccatgaggccacccccctgagccagaccaggagccggggcagcaccaacctcttcagcaagctgaccagcaagctgacccggcggctgcccacagaatatgaaagaaatggccgctatgagggcagcagcagaaatgtgtctgctgagcagaaggatgagaacaaggaggccaagcccaggagcctgcgcttcacctggagcatgaagaccaccagctccatggaccccggggacatgatgagggagatcaggaaggtgctggatgccaacaactgtgactatgagcagcgggagcgcttcctgctcttctgtgtgcatggagatggccacgccgagaacctggtgcagtgggagatggaggtgtgcaagctgccccggctgagcctgaatggagtgcgcttcaagaggatcagcggcaccagcatcgccttcaagaacatcgccagcaagatcgccaatgagctgaagctgtag

SEQ ID NO: 46621 - DNA, 3657 bp, Artificial Sequence
  derived and/or modified sequence
gtcacttccggcagccggaggcagcagaggaagccgaggggcggccatcttggctccgtgaggctctgaggtgccggggtgcggcggcggcagcggcggccagcagggcggaggctgaggcagcaagctcgctagagagggagaagcagtcgggcgcaggcgcctcctccgcagcccgctccatggtcggcgcccacagcccgcggcggcctgtcttgcgctccacttccttcacatcctcctccgcctcctcgttttcaggcgccgccggcggcgctgtgtggaggcccgcgagctgaaattcgcggtgcgacgggagggagtggagaaggaggtgagggggcccaggatcgcggggcgccctgaggcaaggggacgccggcgggccgaagcgcagcccgccgcccgcaggctcggctccgccactgccgccctcccggtctcctcgcctcggccgccgaggcagggagagaatgagccccgggacccgccgggggacggcccgggccaggcccgggatctagacggccgtagggggaagggagccgccctccccacggcgccttttcggaactgccgtggactcgaggacgctggtcgccggcctcctagggctgtgctgttttgttttgaccctcgcattgtgcagaattaaagtgcagtaaaatgtccactaggaccccattgccaacggtgaatgaacgagacactgaaaaccacacgtcacatggagatgggcgtcaagaagttacctctcgtaccagccgctcaggagctcggtgtagaaactctatagcctcctgtgcagatgaacaacctcacatcggaaactacagactgttgaaaacaatcggcaaggggaattttgcaaaagtaaaattggcaagacatatccttacaggcagagaggttgcaataaaaataattgacaaaactcagttgaatccaacaagtctacaaaagctcttcagagaagtaagaataatgaagattttaaatcatcccaatatagtgaagttattcgaagtcattgaaactgaaaaaacactctacctaatcatggaatatgcaagtggaggtgaagtatttgactatttggttgcacatggcaggatgaaggaaaaagaagcaagatctaaatttagacagattgtgtctgcagttcaatactgccatcagaaacggatcgtacatcgagacctcaaggctgaaaatctattgttagatgccgatatgaacattaaaatagcagatttcggttttagcaatgaatttactgttggcggtaaactcgacacgttttgtggcagtcctccatacgcagcacctgagctcttccagggcaagaaatatgacgggccagaagtggatgtgtggagtctgggggtcattttatacacactagtcagtggctcacttccctttgatgggcaaaacctaaaggaactgagagagagagtattaagagggaaatacagaattcccttctacatgtctacagactgtgaaaaccttctcaaacgtttcctggtgctaaatccaattaaacgcggcactctagagcaaatcatgaaggacaggtggatcaatgcagggcatgaagaagatgaactcaaaccatttgttgaaccagagctagacatctcagaccaaaaaagaatagatattatggtgggaatgggatattcacaagaagaaattcaagaatctcttagtaagatgaaatacgatgaaatcacagctacatatttgttattggggagaaaatcttcagagctggatgctagtgattccagttctagcagcaatctttcacttgctaaggttaggccgagcagtgatctcaacaacagtactggccagtctcctcaccacaaagtgcagagaagtgttttttcaagccaaaagcaaagacgctacagtgaccatgctggaccagctattccttctgttgtggcgtatccgaaaaggagtcagaccagcactgcagatagtgacctcaaagaagatggaatttcctcccggaaatcaagtggcagtgctgttggaggaaagggaattgctccagccagtcccatgcttgggaatgcaagtaatcctaataaggcggatattcctgaacgcaagaaaagctccactgtccctagtagtaacacagcatctggtggaatgacacgacgaaatacttatgtttgcagtgagagaactacagctgatagacactcagtgattcagaatggcaaagaaaacagcctgacagaaatgttcgcttacgcagctagccctgcctcagtttgtacatctacctgtcggctgagacatcagaagtcgatgtccatgtcagcctctgggcaccccaagatgatgttacctccaatagacagtgaaggagataacttcaaggctatcactattcctgatcagagaactccagttgcttcaacacacagtatcagtagtgcagccaccccagatcgaatccgcttcccaagaggcactgccagtcgtagcactttccacggccagccccgggaacggcgaaccgcaacatataatggccctcctgcctctcccagcctgtcccatgaagccacaccattgtcccagactcgaagccgaggctccactaatctctttagtaaattaacttcaaaactcacaaggaggcttccaactgaatatgagaggaacgggagatatgagggctcaagtcgcaatgtatctgctgagcaaaaagatgaaaacaaagaagcaaagcctcgatccctacgcttcacctggagcatgaaaaccactagttcaatggatcccggggacatgatgcgggaaatccgcaaagtgttggacgccaataactgcgactatgagcagagggagcgcttcttgctcttctgcgtccacggagatgggcacgcggagaacctcgtgcagtgggaaatggaagtgtgcaagctgccaagactgtctctgaacggggtccggtttaagcggatatcggggacatccatagccttcaaaaatattgcttccaaaattgccaatgagctaaagctgtaacccagtgattatgatgtaaattaagtagcaattaaagtgttttcctgaacactgatggaaatgtatagaataatatttaggcaataacgtctgcatcttctaaatcatgaaattaaagtctgaggacgagagcacgcctgggagcgaaagctggccttttttctacgaatgcactacattaaagatgtgcaacctatgcgccccctgccctacttccgttaccctgagagtcggtgtgtggccccatctccatgtgcctcccgtctgggtgggtgtgagagtggacggtatgtgtgtgaagtggtgtatatggaagcatctccctacactggcagccagtcattactagtacctctgcgggagatcatccggtgctaaaacattacagttgccaaggaggaaaatactgaatgactgctaagaattaaccttaagaccagttcatagttaatacaggtttacagttcatgcctgtggttttgtgtttgttgttttgtgtttttttagtgcaaaaggtttaaatttatagttgtgaacattgcttgtgtgtgtttttctaagtagattcacaagataattaaaaattcactttttctcagt

SEQ ID NO: 46622 - DNA, 2298 bp, Artificial Sequence
  derived and/or modified sequence
gttttgttttgaccctcgcattgtgcagaattaaagtgcagtaaaatgtccactaggaccccattgccaacggtgaatgaacgagacactgaaaaccacacgtcacatggagatgggcgtcaagaagttacctctcgtaccagccgctcaggagctcggtgtagaaactctatagcctcctgtgcagatgaacaacctcacatcggaaactacagactgttgaaaacaatcggcaaggggaattttgcaaaagtaaaattggcaagacatatccttacaggcagagaggttgcaataaaaataattgacaaaactcagttgaatccaacaagtctacaaaagctcttcagagaagtaagaataatgaagattttaaatcatcccaatatagtgaagttattcgaagtcattgaaactgaaaaaacactctacctaatcatggaatatgcaagtggaggtgaagtatttgactatttggttgcacatggcaggatgaaggaaaaagaagcaagatctaaatttagacagattgtgtctgcagttcaatactgccatcagaaacggatcgtacatcgagacctcaaggctgaaaatctattgttagatgccgatatgaacattaaaatagcagatttcggttttagcaatgaatttactgttggcggtaaactcgacacgttttgtggcagtcctccatacgcagcacctgagctcttccagggcaagaaatatgacgggccagaagtggatgtgtggagtctgggggtcattttatacacactagtcagtggctcacttccctttgatgggcaaaacctaaaggaactgagagagagagtattaagagggaaatacagaattcccttctacatgtctacagactgtgaaaaccttctcaaacgtttcctggtgctaaatccaattaaacgcggcactctagagcaaatcatgaaggacaggtggatcaatgcagggcatgaagaagatgaactcaaaccatttgttgaaccagagctagacatctcagaccaaaaaagaatagatattatggtgggaatgggatattcacaagaagaaattcaagaatctcttagtaagatgaaatacgatgaaatcacagctacatatttgttattggggagaaaatcttcagagctggatgctagtgattccagttctagcagcaatctttcacttgctaaggttaggccgagcagtgatctcaacaacagtactggccagtctcctcaccacaaagtgcagagaagtgttttttcaagccaaaagcaaagacgctacagtgaccatgctggaccagctattccttctgttgtggcgtatccgaaaaggagtcagaccagcactgcagatagtgacctcaaagaagatggaatttcctcccggaaatcaagtggcagtgctgttggaggaaagggaattgctccagccagtcccatgcttgggaatgcaagtaatcctaataaggcggatattcctgaacgcaagaaaagctccactgtccctagtagtaacacagcatctggtggaatgacacgacgaaatacttatgtttgcagtgagagaactacagctgatagacactcagtgattcagaatggcaaagaaaacagcactattcctgatcagagaactccagttgcttcaacacacagtatcagtagtgcagccaccccagatcgaatccgcttcccaagaggcactgccagtcgtagcactttccacggccagccccgggaacggcgaaccgcaacatataatggccctcctgcctctcccagcctgtcccatgaagccacaccattgtcccagactcgaagccgaggctccactaatctctttagtaaattaacttcaaaactcacaaggaggcttccaactgaatatgagaggaacgggagatatgagggctcaagtcgcaatgtatctgctgagcaaaaagatgaaaacaaagaagcaaagcctcgatccctacgcttcacctggagcatgaaaaccactagttcaatggatcccggggacatgatgcgggaaatccgcaaagtgttggacgccaataactgcgactatgagcagagggagcgcttcttgctcttctgcgtccacggagatgggcacgcggagaacctcgtgcagtgggaaatggaagtgtgcaagctgccaagactgtctctgaacggggtccggtttaagcggatatcggggacatccatagccttcaaaaatattgcttccaaaattgccaatgagctaaagctgtaacccagtgattatgatgta

SEQ ID NO: 46623 - DNA, 1338 bp, Artificial Sequence
  derived and/or modified sequence
atgaagtacgacgagatcaccgccacctacctgctgctgggccggaaatcttctgagttagacgctagtgactctagcagttcttctaatctgtcgctggcaaaagtgagaccatccagtgacctgaataactctaccgggcagtctccacatcataaagtgcagaggtctgtattttcgagccaaaagcagaggcggtattcagaccatgccggtcctgcaatcccttcagtggtggcctatccaaagcgctcgcagacatccacggctgattccgacctcaaggaggacgggatctccagtcgtaagtctagcgggagtgctgttggcggtaagggaatcgcccccgcttctccaatgctcggtaatgcatcaaaccccaacaaagccgatatccccgaaagaaagaagtcatccaccgtgcctagctccaacaccgcttccggcggtatgaccagacgtaacacgtacgtgtgctctgagaggacgactgcagatcgtcattctgttatacagaacggcaaagagaatagtctcacggaaatgtttgcctatgcggcatcacccgcttctgtttgcaccagtacctgtagactccggcaccaaaaaagcatgtcaatgtccgcaagtggccaccctaaaatgatgctgcctccaattgattccgagggcgacaattttaaggctattaccatccccgaccaaagaacaccagtggcctcgacccactcaatcagctcagccgcaaccccagataggattcgctttcctcgaggcactgcctcccggagcactttccacggccagcctagggagcggagaactgcgacgtacaatggtcccccagctagccctagtctctctcatgaggccactccactgtcacaaacacgctctaggggttcgacgaatctcttttccaagctcacatccaagctcacacgccgcctgcctactgagtatgagaggaatggcaggtatgaggggtcctcccgcaacgtatcggccgaacagaaggacgagaataaagaagctaagccccgttccctgcgttttacgtggtccatgaagaccacgtcctctatggaccctggcgacatgatgagagagataaggaaggtgttagatgccaacaactgcgattatgagcagcgcgagcggttcctcctattctgtgtgcatggcgatggacatgccgagaatctcgttcaatgggagatggaagtgtgcaaacttcctcgactttctctgaatggagttcgattcaagcggattagtggtaccagcatcgccttcaaaaacattgctagcaaaatcgctaacgaactcaagctgtag

SEQ ID NO: 46624 - DNA, 2235 bp, Artificial Sequence
  derived and/or modified sequence
atgagcacccggacccccctgcccaccgtgaacgagcgggacaccgaaaatcacacgagccacggcgacggaagacaggaagtcacgagcagaacttcacgttccggcgctcggtgccgcaatagtatcgcctcatgtgctgacgagcagccccatatcggtaattatagactcttgaaaactattggtaagggcaacttcgcaaaagtgaagctggcaagacacattctgacgggaagggaagtggccatcaagatcattgataaaacacaattgaacccgacctctctccagaaactgttcagagaggtgcgtatcatgaagatcctgaaccatccaaacatcgtgaaactattcgaggtcattgaaaccgagaagaccctatacttgattatggagtacgccagtgggggcgaggtcttcgactatctggtcgcgcacggtagaatgaaggagaaagaagcccggagcaagttcaggcaaatcgtctctgcggtgcagtactgccaccagaagagaattgtccatcgagacttgaaggccgaaaatttgctgctggatgcggatatgaacataaaaatcgctgatttcggtttctccaacgagtttacagtcggcgggaaacttgacaccttctgcggaagccctccatacgcagcaccagagctgtttcagggaaaaaagtatgacgggccagaagtggacgtctggtctctgggagtgattttatacactttggtctccgggtctctgcctttcgacggacaaaatctgaaggagctacgtgagcgggtactccgtggaaaataccggattcctttttatatgagcacggattgtgagaacctcctgaaacggttcctcgttctgaatccaattaaaagaggcactctggaacaaattatgaaagaccggtggattaatgctggccacgaggaggatgagctgaagcctttcgttgagccagagctcgatatctctgatcagaagcggattgacattatggtgggcatgggttactcccaggaagaaatacaggaatcactttctaaaatgaaatatgatgagattaccgccacttacctactgctgggtcggaaatccagcgaactcgacgcgagtgactcctccagtagcagtaatttgagtctcgctaaggtgagaccatcaagcgacctcaacaattccaccggtcagtcccctcaccataaagtgcagaggtctgtgttctcatctcagaaacagcgcaggtattccgatcacgccggccctgctatcccaagcgttgtggcttacccaaagagatctcagactagcaccgccgactccgatctgaaggaggacggaatcagcagtaggaagtcctcaggctccgctgttggtggcaaaggaatcgcacctgcttcgcctatgctggggaatgcctctaacccgaacaaggctgacatccctgagaggaagaaaagcagtactgtcccctcttcaaacactgcgagtggcggtatgaccagacggaatacatacgtatgttctgagcggacaactgcagaccggcatagcgtgatacagaatggcaaggagaatagcacaatacctgaccaacgcactcctgtggcctccacacatagcatatctagcgctgccacccccgataggattcgcttccctcggggtaccgcctctagatctaccttccatggacagccaagggaacgacgcacagctacttacaatgggcctcctgcaagtccttcactgtctcacgaggccacaccattatctcaaaccaggtctagaggttctactaatctgttcagcaagttgacctccaagttgactagacgactgccaactgagtacgagcgcaatggcagatatgaagggtcctcacggaacgtgtcagcagagcagaaggatgaaaataaagaggccaagccacggtcgttaaggtttacatggagcatgaagactacaagtagcatggatccgggcgacatgatgcgtgagattagaaaggtgctagatgccaataactgtgactatgaacagcgggagcgattcctgttattttgcgtacacggagatggtcacgctgagaaccttgtccaatgggaaatggaggtgtgcaagctaccacgtctcagtttgaacggagtccggttcaaacgcatttcgggtacaagcatcgcatttaaaaatatcgctagtaagatcgctaacgaattaaaactctag

SEQ ID NO: 46625 - DNA, 1338 bp, Artificial Sequence
  derived and/or modified sequence
atgaagtacgatgaaattactgcaacgtacctcctgttaggtcgaaagtccagcgagttggacgcttcagactcatcctcatcttctaacctgagcctggctaaagtgaggccttcatctgacctgaacaattcaaccgggcagagcccccaccacaaagtgcagagatccgttttttcctcacagaaacagagacggtactctgatcacgccggaccagccattccttccgtagttgcctacccaaaacggtcccagacttctacagcggacagtgatttgaaggaggacggaatcagcagtcggaaatcatctggcagcgccgtggggggtaaaggtattgcccctgcttctcccatgctcgggaacgcttctaacccgaataaggccgacattcccgagcggaaaaagtcatctacggtcccgagttccaatactgcatccggagggatgaccaggcggaatacctatgtatgcagtgagcgaaccacagctgatcgccactccgtgattcagaacggcaaggaaaattccctgacagaaatgtttgcgtacgccgcaagccctgcatctgtgtgcacttctacctgtcgactgcgccatcagaaaagcatgtcaatgagcgcaagtggccaccctaagatgatgttacctcctatcgatagtgaaggggacaatttcaaggccatcacaatccctgaccaacggaccccagtggcaagtacacattcgatctcctctgccgctacccccgacagaataaggttccccaggggcacggcctcgcgctctacattccacggacaacctagggagaggcgaactgccacgtataacggacctcctgcttccccatctctttcacacgaagccacaccattgtctcagacccggagcaggggaagcactaacctgttttccaaactaaccagcaaactgacgaggcggctcccgacagaatacgaacggaacgggagatatgaggggagcagccgaaacgtgtccgcagagcagaaggatgagaataaggaggctaagcctagatcattaagattcacatggagcatgaagaccacaagctccatggatcccggagatatgatgcgcgagatccgaaaagtcctggacgccaacaactgtgactatgagcagcgtgaacgctttctcctcttctgcgtccacggtgatggacatgcagaaaaccttgttcagtgggagatggaggtttgcaaactgccccgattatctctcaatggcgttcgttttaagaggatcagtggcacgtctattgctttcaaaaatatcgccagcaagatcgcgaatgaactgaagctgtag

SEQ ID NO: 46626 - DNA, 2235 bp, Artificial Sequence
  derived and/or modified sequence
atgtctactcgtaccccccttcccacagtgaacgaaagggacaccgagaatcatacatcacatggcgacggtcgccaggaggttacatcccgcaccagtcggtccggtgccaggtgtcggaacagcatcgcgtcctgcgcagatgagcagcctcacattggcaactatagattacttaagactatcggcaagggtaattttgctaaagtgaagctggcccgacacatcctcacaggccgagaagtggccataaagataatcgacaaaacccaactcaaccccacttctctacagaaactttttcgagaagtcagaataatgaagatcttgaaccaccctaacatcgtgaagctgttcgaggtcatcgaaactgagaaaactttatatttgatcatggagtatgcttctggtggtgaggtattcgattacctcgtggcacacggccgtatgaaagaaaaggaggcacggtctaagttccggcagattgtgtcagccgtgcagtactgccatcagaagaggattgtgcaccgggacctcaaagccgaaaacctcttgctggatgcggacatgaatattaagatagcagacttcggcttctcaaacgagtttaccgtgggaggaaagcttgatacattctgcggctctcccccttatgccgctcccgaactgttccagggaaagaagtacgacggtccagaggtcgatgtgtggtccttgggggtgatcctctacactctggtctcaggtagtcttccgttcgacggccagaacctcaaagagctgagagagagggtcctccggggtaagtacaggattccgttctatatgtcgacggactgcgagaacctgctcaaacggttcctggtcctcaatcctatcaagaggggaaccctggaacagatcatgaaagaccggtggatcaacgccggtcacgaagaggatgagctgaagccttttgtcgagcctgagctggacatttcggatcagaagagaatcgacataatggtcggcatgggctactcacaggaagaaattcaagaatcgctctctaagatgaaatatgatgagatcaccgcgacctatcttctgctgggcaggaaaagcagcgagttggatgcctctgattcatcctcttcttccaatctttcactcgcaaaggtccgaccttcaagtgacctgaataactcgacagggcagagcccacaccacaaagtgcaacgcagtgttttctcctcccagaagcaacgaagatactccgatcacgcaggcccagctattccatcagtggtggcctacccaaaacgatcacaaacgagcacggccgacagcgatctgaaggaggacggaatttccagcagaaagtcttccgggagtgctgttggaggtaaggggattgcaccggcttctccgatgttagggaatgcatccaaccctaacaaggctgacattccggagcgaaaaaagtcgagtactgtgcccagtagcaacactgccagcggcggtatgacacgaagaaacacctacgtgtgcagtgagcgcaccaccgctgacagacactcagtcattcaaaatggaaaagaaaactccacaatacctgatcagagaactccggtggcatcgacgcacagtatttcatctgctgcaacgcccgaccgcattcgcttcccccgagggactgcatcacggtcgacgtttcatggacagcctagagaaaggcggaccgctacatataacggcccacccgcttcgccatcactctcacacgaagccacccccctcagtcagacacgcagtcgtggctcaaccaatctgttctctaaacttacctccaagctcacacgcagattaccgacggagtacgaacgaaatggacgctacgaaggtagttcccgaaacgtgtccgccgagcagaaggatgaaaataaggaggccaaaccgcgttcattaagattcacatggtccatgaagactacttcttctatggacccaggcgacatgatgcgcgagatcagaaaggtgctggacgctaacaattgcgactatgaacaacgcgaaaggtttctgttgttctgtgtgcacggcgatggccacgcagaaaatctcgtccaatgggagatggaggtgtgcaaattaccaaggctctctctcaacggggtgaggtttaagaggatttccggaacgtctatcgcgttcaaaaatatagcaagtaaaattgctaatgagttaaagctgtag

SEQ ID NO: 46627 - DNA, 1338 bp, Artificial Sequence
  derived and/or modified sequence
atgaagtacgacgagatcaccgccacctacctgctgctgggcagaaagagcagcgagctggacgccagcgacagcagcagcagcagcaacctgagcctggccaaggtgagacccagcagcgacctgaacaacagcaccggccagagcccccaccacaaggtgcagagaagcgtgttcagcagccagaagcagagaagatacagcgaccacgccggccccgccatccccagcgtggtggcctaccccaagagaagccagaccagcaccgccgacagcgacctgaaggaggacggcatcagcagcagaaagagcagcggcagcgccgtgggcggcaagggcatcgcccccgccagccccatgctgggcaacgccagcaaccccaacaaggccgacatccccgagagaaagaagagcagcaccgtgcccagcagcaacaccgccagcggcggcatgaccagaagaaacacctacgtgtgcagcgagagaaccaccgccgacagacacagcgtgatccagaacggcaaggagaacagcctgaccgagatgttcgcctacgccgccagccccgccagcgtgtgcaccagcacctgcagactgagacaccagaagagcatgagcatgagcgccagcggccaccccaagatgatgctgccccccatcgacagcgagggcgacaacttcaaggccatcaccatccccgaccagagaacccccgtggccagcacccacagcatcagcagcgccgccacccccgacagaatcagattccccagaggcaccgccagcagaagcaccttccacggccagcccagagagagaagaaccgccacctacaacggcccccccgccagccccagcctgagccacgaggccacccccctgagccagaccagaagcagaggcagcaccaacctgttcagcaagctgaccagcaagctgaccagaagactgcccaccgagtacgagagaaacggcagatacgagggcagcagcagaaacgtgagcgccgagcagaaggacgagaacaaggaggccaagcccagaagcctgagattcacctggagcatgaagaccaccagcagcatggaccccggcgacatgatgagagagatcagaaaggtgctggacgccaacaactgcgactacgagcagagagagagattcctgctgttctgcgtgcacggcgacggccacgccgagaacctggtgcagtgggagatggaggtgtgcaagctgcccagactgagcctgaacggcgtgagattcaagagaatcagcggcaccagcatcgccttcaagaacatcgccagcaagatcgccaacgagctgaagctgtag

SEQ ID NO: 46628 - DNA, 2235 bp, Artificial Sequence
  derived and/or modified sequence
atgagcaccagaacccccctgcccaccgtgaacgagagagacaccgagaaccacaccagccacggcgacggcagacaggaggtgaccagcagaaccagcagaagcggcgccagatgcagaaacagcatcgccagctgcgccgacgagcagccccacatcggcaactacagactgctgaagaccatcggcaagggcaacttcgccaaggtgaagctggccagacacatcctgaccggcagagaggtggccatcaagatcatcgacaagacccagctgaaccccaccagcctgcagaagctgttcagagaggtgagaatcatgaagatcctgaaccaccccaacatcgtgaagctgttcgaggtgatcgagaccgagaagaccctgtacctgatcatggagtacgccagcggcggcgaggtgttcgactacctggtggcccacggcagaatgaaggagaaggaggccagaagcaagttcagacagatcgtgagcgccgtgcagtactgccaccagaagagaatcgtgcacagagacctgaaggccgagaacctgctgctggacgccgacatgaacatcaagatcgccgacttcggcttcagcaacgagttcaccgtgggcggcaagctggacaccttctgcggcagccccccctacgccgcccccgagctgttccagggcaagaagtacgacggccccgaggtggacgtgtggagcctgggcgtgatcctgtacaccctggtgagcggcagcctgcccttcgacggccagaacctgaaggagctgagagagagagtgctgagaggcaagtacagaatccccttctacatgagcaccgactgcgagaacctgctgaagagattcctggtgctgaaccccatcaagagaggcaccctggagcagatcatgaaggacagatggatcaacgccggccacgaggaggacgagctgaagcccttcgtggagcccgagctggacatcagcgaccagaagagaatcgacatcatggtgggcatgggctacagccaggaggagatccaggagagcctgagcaagatgaagtacgacgagatcaccgccacctacctgctgctgggcagaaagagcagcgagctggacgccagcgacagcagcagcagcagcaacctgagcctggccaaggtgagacccagcagcgacctgaacaacagcaccggccagagcccccaccacaaggtgcagagaagcgtgttcagcagccagaagcagagaagatacagcgaccacgccggccccgccatccccagcgtggtggcctaccccaagagaagccagaccagcaccgccgacagcgacctgaaggaggacggcatcagcagcagaaagagcagcggcagcgccgtgggcggcaagggcatcgcccccgccagccccatgctgggcaacgccagcaaccccaacaaggccgacatccccgagagaaagaagagcagcaccgtgcccagcagcaacaccgccagcggcggcatgaccagaagaaacacctacgtgtgcagcgagagaaccaccgccgacagacacagcgtgatccagaacggcaaggagaacagcaccatccccgaccagagaacccccgtggccagcacccacagcatcagcagcgccgccacccccgacagaatcagattccccagaggcaccgccagcagaagcaccttccacggccagcccagagagagaagaaccgccacctacaacggcccccccgccagccccagcctgagccacgaggccacccccctgagccagaccagaagcagaggcagcaccaacctgttcagcaagctgaccagcaagctgaccagaagactgcccaccgagtacgagagaaacggcagatacgagggcagcagcagaaacgtgagcgccgagcagaaggacgagaacaaggaggccaagcccagaagcctgagattcacctggagcatgaagaccaccagcagcatggaccccggcgacatgatgagagagatcagaaaggtgctggacgccaacaactgcgactacgagcagagagagagattcctgctgttctgcgtgcacggcgacggccacgccgagaacctggtgcagtgggagatggaggtgtgcaagctgcccagactgagcctgaacggcgtgagattcaagagaatcagcggcaccagcatcgccttcaagaacatcgccagcaagatcgccaacgagctgaagctgtag

SEQ ID NO: 46629 - protein, 713 aa, Artificial Sequence
  derived and/or modified sequence
MSTRTPLPTVNERDTENHTSHGDGRQEVTSRTSRSGARCRNSIASCADEQPHIGNYRLLKTIGKGNFAKVKLARHILTGREVAIKIIDKTQLNPTSLQKLFREVRIMKILNHPNIVKLFEVIETEKTLYLIMEYASGGEVFDYLVAHGRMKEKEARSKFRQIVSAVQYCHQKRIVHRDLKAENLLLDADMNIKIADFGFSNEFTVGGKLDTFCGSPPYAAPELFQGKKYDGPEVDVWSLGVILYTLVSGSLPFDGQNLKELRERVLRGKYRIPFYMSTDCENLLKRFLVLNPIKRGTLEQIMKDRWINAGHEEDELKPFVEPELDISDQKRIDIMVGMGYSQEEIQESLSKMKYDEITATYLLLGRKSSEVRPSSDLNNSTGQSPHHKVQRSVFSSQKQRRYSDHAGPAIPSVVAYPKRSQTSTADSDLKEDGISSRKSSGSAVGGKGIAPASPMLGNASNPNKADIPERKKSSTVPSSNTASGGMTRRNTYVCSERTTADRHSVIQNGKENSTIPDQRTPVASTHSISSAATPDRIRFPRGTASRSTFHGQPRERRTATYNGPPASPSLSHEATPLSQTRSRGSTNLFSKLTSKLTRSRNVSAEQKDENKEAKPRSLRFTWSMKTTSSMDPGDMMREIRKVLDANNCDYEQRERFLLFCVHGDGHAENLVQWEMEVCKLPRLSLNGVRFKRISGTSIAFKNIASKIANELKL

SEQ ID NO: 46630 - DNA, 2142 bp, Artificial Sequence
  derived and/or modified sequence
atgtccacacgtactccattgcccactgtgaacgaacgagacactgaaaatcacacctctcatggcgatggacgccaggaggtgacctctcgtacgtctcgatccggagcccgatgccgcaacagcatcgccagctgtgccgacgagcagccgcatataggaaactacaggctcctgaaaacaattgggaagggaaactttgcaaaagtcaagctcgccagacatatattgaccgggagggaggttgcaattaaaatcatagataaaacgcaactgaatcctacaagcctccagaagctgtttcgcgaggttcggatcatgaaaattttgaaccatccaaacattgtgaaactattcgaggtcattgaaacagagaaaacgctttacttgatcatggagtatgcgtcaggcggcgaggttttcgattacttggtcgcgcatggtcggatgaaggagaaagaggcaaggagtaagtttcggcagattgtgagcgccgtacagtactgccaccaaaaacggatcgtgcacagagatcttaaagctgagaatctgctgctcgacgccgatatgaacatcaaaatcgctgacttcgggttcagcaatgagtttactgtgggcggtaaactggataccttctgtggttcgcctccttatgcggctcctgaactctttcaggggaagaaatacgacggcccagaggtcgacgtttggtctctgggggtcatcctgtatactctagttagcggaagcctgccctttgacgggcagaatctgaaagagctacgcgaacgagtgttaagagggaaatatagaatcccgttctacatgtccactgactgcgaaaatttgctgaaacggttcctcgtgctcaaccctatcaaacgcggtacgcttgaacaaataatgaaggaccggtggatcaatgccggtcatgaggaggatgaactaaagcctttcgtagaaccagaactggatatttccgatcagaaaagaatcgacattatggtgggaatgggctactcccaggaggagatccaggaatccctaagcaaaatgaagtacgatgagattacggccacatatctgctgctgggccgaaaatcgtctgaggtgagaccaagctctgatctgaacaactccactggccagagccctcaccacaaggtgcagagatctgtgttttcgagccagaaacagcggaggtatagcgaccatgcaggcccagctatccctagcgttgtcgcctaccccaagagatctcaaacttcaacagccgacagtgatctgaaggaagacggaatctcctcgcggaaatcttctggctcagccgtgggaggtaagggtattgcgccagccagtccgatgttaggtaatgcctcaaaccccaacaaagctgatattcctgagaggaaaaagtcttctacagtgcccagctcgaacactgcttcaggtggcatgactagacgcaacacttacgtctgtagcgaaaggactacggccgaccggcattcggtgatacagaacggtaaggagaattcaaccatcccggaccagagaaccccggttgcttccacacatagtataagttcagctgctacaccagaccggattcgctttcctcgggggacagcaagtagaagcacattccatgggcagccccgtgaacgaaggactgccacatataacggaccgcctgcgtcaccctcactgagccacgaagctacccctctgtcccaaaccaggtcgaggggtagcactaacctctttagcaaattaacatcaaagctcacacggtctcgcaatgtctcggctgaacagaaggatgagaacaaggaggcgaagcctaggagtctgcggttcacatggagcatgaaaacgacaagttctatggatccgggagatatgatgcgcgagattcggaaagttctggacgccaataattgcgactacgagcagcgtgaacgctttttgctcttctgcgtgcatggagatgggcacgcagaaaacctcgtacagtgggagatggaggtgtgtaagctaccacgtctgtcgttgaatggggttaggttcaaacgcatcagcgggacatccattgcattcaaaaacatcgcatcaaaaatagccaatgaattaaagctctag

SEQ ID NO: 46631 - DNA, 2142 bp, Artificial Sequence
  derived and/or modified sequence
atgagcaccaggacccccctgcccaccgtgaatgaaagagacacagagaaccacaccagccatggagatggccggcaggaggtgaccagcaggaccagccgcagcggggcccgctgcaggaacagcatcgccagctgtgctgatgagcagccccacatcggcaactaccgcctgctgaagaccatcggcaagggcaactttgccaaggtgaagctggcccggcacatcctgaccggccgggaggtggccatcaagatcatcgacaagacccagctgaaccccaccagcctgcagaagctgttccgggaggtgcgcatcatgaagatcctgaaccaccccaacatcgtgaagctgtttgaagtcatcgagacagagaagaccctgtacctgatcatggagtatgccagcggcggggaggtgtttgactacctggtggcccacggccgcatgaaggagaaggaggcccggagcaagttccggcagatcgtgtctgctgtgcagtactgccaccagaagagaattgtgcaccgggacctgaaggccgagaacctgctgctggatgctgacatgaacatcaagattgctgactttggcttcagcaatgagttcaccgtgggcggcaagctggacaccttctgtggcagccccccctatgctgcccctgagctgttccagggcaagaagtatgatggccctgaggtggatgtgtggagcctgggcgtcatcctgtacaccctggtgtctggcagcctgccctttgatggccagaacctgaaggagctgcgggagcgggtgctgcggggcaagtaccgcatccccttctacatgagcacagactgtgagaacctgctgaagcgcttcctggtgctgaaccccatcaagaggggcaccctggagcagatcatgaaggaccgctggatcaatgccggccatgaagaagatgagctgaagccctttgtggagcctgagctggacatcagtgaccagaagagaattgacatcatggtgggcatgggctacagccaggaggagatccaggagagcctgagcaagatgaagtatgatgagatcacagccacctacctgctgctgggcaggaagagcagcgaggtgcggcccagcagtgacctgaacaacagcacaggccagagcccccaccacaaggtgcagaggagcgtcttcagcagccagaagcagaggcgctacagcgaccacgccggccctgccatccccagcgtggtggcctaccccaagaggagccagaccagcacagctgacagcgacctgaaggaggatggcatcagcagcaggaagagcagcggcagcgctgtgggcggcaaaggaattgccccagccagccccatgctgggcaatgccagcaaccccaacaaggctgacatccctgagaggaagaagagcagcacagtgcccagcagcaacacagccagcggcggcatgaccaggaggaacacctacgtgtgcagcgagaggaccacagctgacagacacagcgtcatccagaatggcaaggagaacagcaccatcccagaccagaggacccctgtggccagcacccacagcatcagcagcgctgccaccccagaccgcatccgcttcccccggggcacagccagccgcagcaccttccacggccagccccgggagaggagaacagccacctacaacggccccccagccagccccagcctgagccatgaggccacccccctgagccagaccaggagccggggcagcaccaacctcttcagcaagctgaccagcaagctgaccaggagcagaaatgtgtctgctgagcagaaggatgagaacaaggaggccaagcccaggagcctgcgcttcacctggagcatgaagaccaccagctccatggaccccggggacatgatgagggagatcaggaaggtgctggatgccaacaactgtgactatgagcagcgggagcgcttcctgctcttctgtgtgcatggagatggccatgctgagaacctggtgcagtgggagatggaggtgtgcaagctgccccggctgagcctgaatggagtgcgcttcaagaggatcagcggcaccagcatcgccttcaagaacatcgccagcaagatcgccaatgagctgaagctgtag

SEQ ID NO: 46632 - DNA, 2142 bp, Artificial Sequence
  derived and/or modified sequence
atgagcacccggacccccctgcccaccgtgaacgagcgggacaccgagaaccacacctctcacggtgacgggcggcaggaagtgacctcccgtacatccagatccggagcaaggtgcaggaacagtatcgcgtcctgtgctgacgaacaaccccatatcggcaattaccgactcctgaaaacaattggcaagggaaattttgctaaagtgaaactggcccgccacatccttacaggaagggaagttgctattaaaataatcgataaaacacagcttaaccctacctctctgcagaagctgttccgggaggtccggatcatgaagatactgaatcaccccaatattgtgaagctctttgaggtgatcgagaccgaaaagaccctttatctgattatggagtacgcctccggaggagaggtgtttgactatctggtggcacacggccgtatgaaggagaaggaggcgcggagcaagtttagacagattgtgtccgccgtgcaatactgtcaccaaaaacgtatagttcaccgggacttgaaagccgaaaacctccttctggacgctgatatgaacatcaaaattgcagacttcggcttcagtaatgagtttactgtaggtggcaagttggataccttttgtgggtctcccccctacgcagcccccgaactcttccagggcaaaaaatatgacgggcctgaagttgatgtgtggagtctgggagtgatcctttacacgttggtgtccgggtcactgcctttcgatggacagaatctcaaggagttaagggaaagggtgctgagggggaagtatcgaattccattctacatgtccacggactgtgaaaatctactgaagaggttcctggtgcttaacccaattaagcgtggaacactcgagcagatcatgaaagatcggtggattaatgcgggccatgaggaagatgaactgaaaccattcgtggagcctgaattggacatcagcgaccagaagcgaattgacatcatggtgggcatgggttatagccaggaggaaattcaagagagtctctcaaagatgaagtatgacgaaatcacagccacttatcttcttctgggcagaaagagctctgaggtccgacctagcagcgatctgaataactcgaccggacaaagcccgcatcataaggtccaaagatccgtgttctcctctcagaagcagcgacggtatagcgatcatgccgggcccgccatcccctcagtggtcgcataccctaagcgatctcagacatcaactgccgactctgacctgaaagaagatggaatcagctccaggaaaagttccggctctgccgttgggggcaagggaatagctcccgcaagtcccatgctggggaacgcttctaatccaaataaagcagatatcccagagcggaagaagtcaagcacagtcccatccagtaatactgctagcggaggcatgacacggcgcaatacctacgtctgttctgaacgcaccacagccgatcgacactccgtaatacaaaacgggaaggaaaactcaactatccccgaccagcgaacccctgtggcctctactcattctatctcttccgccgctacccccgatcgcattcggtttccccggggcacggcttcccgaagtacctttcacggccagccacgagagaggcggacggcaacctataacggcccaccggcctcacccagtttaagtcacgaagccacacctctttcacagacgagaagcagaggaagtactaatctgtttagtaaattaacatccaagctgacgagaagtcgaaatgttagtgctgagcagaaggatgagaacaaagaagcaaaaccacggagcctgagattcacatggtccatgaaaaccacctcatcaatggaccccggggatatgatgcgcgagatcagaaaggtgttggacgccaataactgtgactatgagcagcgcgagcgatttctccttttttgtgtgcatggggacgggcacgccgaaaacctggtgcagtgggaaatggaggtgtgcaagctgccccgtctttccctgaacggggtgcgctttaagaggatctccgggacttccatagcgtttaagaatatcgcctcaaagatagccaatgaactcaagctgtag

SEQ ID NO: 46633 - DNA, 2142 bp, Artificial Sequence
  derived and/or modified sequence
atgagcaccagaacccctctgccaacagtaaacgaacgcgataccgagaatcacacgtcgcacggagatgggaggcaggaagttaccagccgtacctctagaagcggtgccaggtgccggaatagcattgccagttgcgcggacgaacaaccgcacattggaaactaccggctgctcaaaacaattggaaaggggaattttgccaaggtgaaactcgctcgccatatattgaccggcagagaagtggccattaaaattattgacaaaacgcaacttaatcctacgtcactgcagaagctgtttagggaagtacgtatcatgaaaatcttgaaccatcccaatattgtaaaactgtttgaggttattgaaactgaaaagaccctgtacctgatcatggaatacgcaagcgggggagaagtgtttgattatcttgttgcccacggcaggatgaaagaaaaggaagctcgctctaagttccgacagattgtgtccgctgtccagtactgccatcagaagcggatagtgcatcgggacttgaaagctgagaatctgctgctggacgctgatatgaacatcaagatcgccgactttgggttttcaaacgagtttacagtgggcggtaaactagatacattctgcggatcgcctccctatgccgctcccgagctgttccagggaaagaagtacgacggtccagaagtagatgtgtggagcctgggcgtcattctctatactcttgtcagcggttcactccctttcgacggtcagaaccttaaggaattgcgggagcgcgtgttacgcggaaagtataggattcccttttacatgtcaactgactgcgaaaacttattgaaaaggttcctggttcttaaccccatcaagcgaggaaccctggagcagataatgaaggataggtggatcaatgcgggtcatgaggaagatgagctgaagcctttcgtcgaacccgagctcgatattagcgatcaaaagagaatagatattatggtggggatgggttacagtcaggaagagattcaagagtctctttctaagatgaaatacgatgagataacagctacatatctgctgttgggccgaaaaagctccgaagtcaggccaagcagcgaccttaacaactctacggggcaaagccctcatcacaaggtgcagagaagcgtcttctcctcacagaagcagcgacgatattcagatcatgccggaccagccatcccatcagtagtggcctaccctaaacgatcgcagacctcgaccgctgactccgacttgaaagaggacgggattagcagcagaaagtcatctggatctgctgtgggtggcaagggcatcgcaccagcctcccccatgctgggaaacgcctctaaccccaacaaggccgatattccagaaagaaaaaagagctctaccgtccctagttctaacaccgcgtccgggggaatgacccggcgtaacacctatgtgtgcagcgagagaaccactgccgaccgacacagcgtgatccagaacggtaaagagaactctactattccagatcagcggacccccgtagcatccacacactccataagctccgcggctacacctgatcgcatccgattccctcgtgggaccgcatccaggtctaccttccatggccaaccccgagaaagacggactgcaacttacaatggcccacccgcatctcctagcctttcccatgaggctacgcctctcagtcagacaaggtcccgcggaagcactaatttgttctccaaactaacttcaaaattgactcggtcaagaaacgtcagcgcagaacagaaggacgagaacaaagaggccaagccgcgtagcctgcgcttcacctggtctatgaagaccaccagtagtatggatcctggtgacatgatgcgggaaatcagaaaagtgctcgatgcaaataattgcgattatgaacagcgcgaacgctttctccttttctgtgtgcacggcgatggacatgcagaaaatctagtgcagtgggaaatggaagtatgcaaacttccacggctcagtctaaacggcgttcgatttaaaaggatttccggcacctctatcgcctttaaaaatatagcatccaagattgcgaacgagttgaaattatag

SEQ ID NO: 46634 - DNA, 2142 bp, Artificial Sequence
  derived and/or modified sequence
atgagcaccagaacccccctgcccaccgtgaacgagagagacaccgagaaccacaccagccacggcgacggcagacaggaggtgaccagcagaaccagcagaagcggcgccagatgcagaaacagcatcgccagctgcgccgacgagcagccccacatcggcaactacagactgctgaagaccatcggcaagggcaacttcgccaaggtgaagctggccagacacatcctgaccggcagagaggtggccatcaagatcatcgacaagacccagctgaaccccaccagcctgcagaagctgttcagagaggtgagaatcatgaagatcctgaaccaccccaacatcgtgaagctgttcgaggtgatcgagaccgagaagaccctgtacctgatcatggagtacgccagcggcggcgaggtgttcgactacctggtggcccacggcagaatgaaggagaaggaggccagaagcaagttcagacagatcgtgagcgccgtgcagtactgccaccagaagagaatcgtgcacagagacctgaaggccgagaacctgctgctggacgccgacatgaacatcaagatcgccgacttcggcttcagcaacgagttcaccgtgggcggcaagctggacaccttctgcggcagccccccctacgccgcccccgagctgttccagggcaagaagtacgacggccccgaggtggacgtgtggagcctgggcgtgatcctgtacaccctggtgagcggcagcctgcccttcgacggccagaacctgaaggagctgagagagagagtgctgagaggcaagtacagaatccccttctacatgagcaccgactgcgagaacctgctgaagagattcctggtgctgaaccccatcaagagaggcaccctggagcagatcatgaaggacagatggatcaacgccggccacgaggaggacgagctgaagcccttcgtggagcccgagctggacatcagcgaccagaagagaatcgacatcatggtgggcatgggctacagccaggaggagatccaggagagcctgagcaagatgaagtacgacgagatcaccgccacctacctgctgctgggcagaaagagcagcgaggtgagacccagcagcgacctgaacaacagcaccggccagagcccccaccacaaggtgcagagaagcgtgttcagcagccagaagcagagaagatacagcgaccacgccggccccgccatccccagcgtggtggcctaccccaagagaagccagaccagcaccgccgacagcgacctgaaggaggacggcatcagcagcagaaagagcagcggcagcgccgtgggcggcaagggcatcgcccccgccagccccatgctgggcaacgccagcaaccccaacaaggccgacatccccgagagaaagaagagcagcaccgtgcccagcagcaacaccgccagcggcggcatgaccagaagaaacacctacgtgtgcagcgagagaaccaccgccgacagacacagcgtgatccagaacggcaaggagaacagcaccatccccgaccagagaacccccgtggccagcacccacagcatcagcagcgccgccacccccgacagaatcagattccccagaggcaccgccagcagaagcaccttccacggccagcccagagagagaagaaccgccacctacaacggcccccccgccagccccagcctgagccacgaggccacccccctgagccagaccagaagcagaggcagcaccaacctgttcagcaagctgaccagcaagctgaccagaagcagaaacgtgagcgccgagcagaaggacgagaacaaggaggccaagcccagaagcctgagattcacctggagcatgaagaccaccagcagcatggaccccggcgacatgatgagagagatcagaaaggtgctggacgccaacaactgcgactacgagcagagagagagattcctgctgttctgcgtgcacggcgacggccacgccgagaacctggtgcagtgggagatggaggtgtgcaagctgcccagactgagcctgaacggcgtgagattcaagagaatcagcggcaccagcatcgccttcaagaacatcgccagcaagatcgccaacgagctgaagctgtag

SEQ ID NO: 46635 - DNA, 2911 bp, Artificial Sequence
  derived and/or modified sequence
gacggcccgggccaggcccgggatctagacggccgtagggggaagggagccgccctccccacggcgccttttcggaactgccgtggactcgaggacgctggtcgccggcctcctagggctgtgctgttttgttttgaccctcgcattgtgcagaattaaagtgcagtaaaatgtccactaggaccccattgccaacggtgaatgaacgagacactgaaaaccacacgtcacatggagatgggcgtcaagaagttacctctcgtaccagccgctcaggagctcggtgtagaaactctatagcctcctgtgcagatgaacaacctcacatcggaaactacagactgttgaaaacaatcggcaaggggaattttgcaaaagtaaaattggcaagacatatccttacaggcagagaggttgcaataaaaataattgacaaaactcagttgaatccaacaagtctacaaaagctcttcagagaagtaagaataatgaagattttaaatcatcccaatatagtgaagttattcgaagtcattgaaactgaaaaaacactctacctaatcatggaatatgcaagtggaggtgaagtatttgactatttggttgcacatggcaggatgaaggaaaaagaagcaagatctaaatttagacagattgtgtctgcagttcaatactgccatcagaaacggatcgtacatcgagacctcaaggctgaaaatctattgttagatgccgatatgaacattaaaatagcagatttcggttttagcaatgaatttactgttggcggtaaactcgacacgttttgtggcagtcctccatacgcagcacctgagctcttccagggcaagaaatatgacgggccagaagtggatgtgtggagtctgggggtcattttatacacactagtcagtggctcacttccctttgatgggcaaaacctaaaggaactgagagagagagtattaagagggaaatacagaattcccttctacatgtctacagactgtgaaaaccttctcaaacgtttcctggtgctaaatccaattaaacgcggcactctagagcaaatcatgaaggacaggtggatcaatgcagggcatgaagaagatgaactcaaaccatttgttgaaccagagctagacatctcagaccaaaaaagaatagatattatggtgggaatgggatattcacaagaagaaattcaagaatctcttagtaagatgaaatacgatgaaatcacagctacatatttgttattggggagaaaatcttcagaggttaggccgagcagtgatctcaacaacagtactggccagtctcctcaccacaaagtgcagagaagtgttttttcaagccaaaagcaaagacgctacagtgaccatgctggaccagctattccttctgttgtggcgtatccgaaaaggagtcagaccagcactgcagatagtgacctcaaagaagatggaatttcctcccggaaatcaagtggcagtgctgttggaggaaagggaattgctccagccagtcccatgcttgggaatgcaagtaatcctaataaggcggatattcctgaacgcaagaaaagctccactgtccctagtagtaacacagcatctggtggaatgacacgacgaaatacttatgtttgcagtgagagaactacagctgatagacactcagtgattcagaatggcaaagaaaacagcactattcctgatcagagaactccagttgcttcaacacacagtatcagtagtgcagccaccccagatcgaatccgcttcccaagaggcactgccagtcgtagcactttccacggccagccccgggaacggcgaaccgcaacatataatggccctcctgcctctcccagcctgtcccatgaagccacaccattgtcccagactcgaagccgaggctccactaatctctttagtaaattaacttcaaaactcacaaggagtcgcaatgtatctgctgagcaaaaagatgaaaacaaagaagcaaagcctcgatccctacgcttcacctggagcatgaaaaccactagttcaatggatcccggggacatgatgcgggaaatccgcaaagtgttggacgccaataactgcgactatgagcagagggagcgcttcttgctcttctgcgtccacggagatgggcacgcggagaacctcgtgcagtgggaaatggaagtgtgcaagctgccaagactgtctctgaacggggtccggtttaagcggatatcggggacatccatagccttcaaaaatattgcttccaaaattgccaatgagctaaagctgtaacccagtgattatgatgtaaattaagtagcaattaaagtgttttcctgaacactgatggaaatgtatagaataatatttaggcaataacgtctgcatcttctaaatcatgaaattaaagtctgaggacgagagcacgcctgggagcgaaagctggccttttttctacgaatgcactacattaaagatgtgcaacctatgcgccccctgccctacttccgttaccctgagagtcggtgtgtggccccatctccatgtgcctcccgtctgggtgggtgtgagagtggacggtatgtgtgtgaagtggtgtatatggaagcatctccctacactggcagccagtcattactagtacctctgcgggagatcatccggtgctaaaacattacagttgccaaggaggaaaatactgaatgactgctaagaattaaccttaagaccagttcatagttaatacaggtttacagttcatgcctgtggttttgtgtttgttgttttgtgtttttttagtgcaaaaggtttaaatttatagttgtgaacattgcttgtgtgtgtttttctaagtagattcacaagataattaaaaattcactttttctcag

SEQ ID NO: 46636 - protein, 659 aa, Artificial Sequence
  derived and/or modified sequence
MSTRTPLPTVNERDTENHTSHGDGRQEVTSRTSRSGARCRNSIASCADEQPHIGNYRLLKTIGKGNFAKVKLARHILTGREVAIKIIDKTQLNPTSLQKLFREVRIMKILNHPNIVKLFEVIETEKTLYLIMEYASGGEVFDYLVAHGRMKEKEARSKFRQIVSAVQYCHQKRIVHRDLKELRERVLRGKYRIPFYMSTDCENLLKRFLVLNPIKRGTLEQIMKDRWINAGHEEDELKPFVEPELDISDQKRIDIMVGMGYSQEEIQESLSKMKYDEITATYLLLGRKSSELDASDSSSSSNLSLAKVRPSSDLNNSTGQSPHHKVQRSVFSSQKQRRYSDHAGPAIPSVVAYPKRSQTSTADSDLKEDGISSRKSSGSAVGGKGIAPASPMLGNASNPNKADIPERKKSSTVPSSNTASGGMTRRNTYVCSERTTADRHSVIQNGKENSTIPDQRTPVASTHSISSAATPDRIRFPRGTASRSTFHGQPRERRTATYNGPPASPSLSHEATPLSQTRSRGSTNLFSKLTSKLTRRNMSFRFIKSRNVSAEQKDENKEAKPRSLRFTWSMKTTSSMDPGDMMREIRKVLDANNCDYEQRERFLLFCVHGDGHAENLVQWEMEVCKLPRLSLNGVRFKRISGTSIAFKNIASKIANELKL

SEQ ID NO: 46637 - DNA, 1980 bp, Artificial Sequence
  derived and/or modified sequence
atgtctacacggactccactgccaacagtgaatgagcgggatacagagaaccacacttcacacggcgatggcaggcaagaggtgacaagccgcacctccaggtccggtgcgaggtgcaggaactctatcgccagttgtgctgacgagcagccgcacatcgggaattataggctcctaaaaaccatcggtaaaggtaatttcgctaaagtgaaactggcaaggcacatcttaactgggagggaagtggctattaagataatagataaaacccagctaaatcctacttcactccagaaactgtttcgcgaagtgagaatcatgaaaatccttaatcatccaaacatcgtcaagttatttgaggtaatagaaacagaaaaaacgctgtacctaatcatggagtacgcctccggaggggaagttttcgactacctcgtagcacacgggagaatgaaggagaaggaggcgagaagcaagttcaggcagattgtgagtgctgttcagtattgtcaccagaaacgcattgtccacagagatttgaaggagctccgtgaaagagtcctgaggggtaaataccgaatcccgttttacatgagcacagactgtgaaaatctgctgaagcgatttcttgtgctgaatcccattaaacggggaacactggagcaaattatgaaagaccgttggatcaacgcaggtcacgaagaagatgagctgaaaccattcgtggagccagaactcgatatctccgaccagaaacggattgacatcatggttggcatgggctactctcaggaagagatacaggagtctctatccaaaatgaagtacgatgagatcaccgccacttacctcctgttgggcaggaagtcgtcagagctggacgcctccgattcttcatccagttcaaacttgagtttggcgaaagtccgccccagcagcgacctgaacaacagcaccggccagtcccctcaccacaaagtgcaaagaagcgtcttcagtagtcaaaagcaacggaggtacagcgatcacgcaggccctgccattccaagtgttgtagcgtatcctaagcggtcacagacctccacagcagatagtgatctgaaggaggatggaatctcgtccaggaagtctagcggctctgctgtggggggcaagggtatcgctccagccagtccgatgctcggaaacgccagtaaccccaataaggccgacatccccgagagaaagaagtcgtccaccgtacctagctctaacaccgcaagtggtggcatgaccagacgcaacacttatgtatgctcggagcgcacgacagctgataggcactctgtgatccaaaatgggaaggaaaattctactatccccgaccagcgaactccagtggcctctacccattcgatttcttctgcggccacccccgatcgcatccgcttcccccgcggaaccgccagtcggtccacgttccatggacagccaagagaaagaagaaccgccacctacaatggacccccagcctcgccgtctttaagtcacgaggctacgcctctgtcccagactcgcagtaggggaagtactaacctgttttctaagttgacatctaagcttacacgccggaatatgtcattccggttcattaaatcacgcaatgtgtccgcagagcagaaggacgagaacaaagaagctaaaccacggtctctgcggttcacatggtcaatgaagaccacttcgagcatggatcctggtgatatgatgcgcgagatccggaaggtattggatgccaacaactgtgactatgaacagcgtgaaagattcctgcttttttgtgtgcatggggatggtcacgccgaaaatctggtgcaatgggaaatggaagtctgcaagctgcccagactgtccctgaacggagtgaggtttaagcgaattagtggtaccagtatagcgtttaaaaatatagcctcaaaaatcgccaacgaactgaagctgtag

SEQ ID NO: 46638 - DNA, 1980 bp, Artificial Sequence
  derived and/or modified sequence
atgagcaccaggacccccctgcccaccgtgaatgaaagagacacagagaaccacaccagccatggagatggccggcaggaggtgaccagcaggaccagccgcagcggggcccgctgcaggaacagcatcgccagctgtgctgatgagcagccccacatcggcaactaccgcctgctgaagaccatcggcaagggcaactttgccaaggtgaagctggcccggcacatcctgaccggccgggaggtggccatcaagatcatcgacaagacccagctgaaccccaccagcctgcagaagctgttccgggaggtgcgcatcatgaagatcctgaaccaccccaacatcgtgaagctgtttgaagtcatcgagacagagaagaccctgtacctgatcatggagtatgccagcggcggggaggtgtttgactacctggtggcccacggccgcatgaaggagaaggaggcccggagcaagttccggcagatcgtgtctgctgtgcagtactgccaccagaagagaattgtgcaccgggacctgaaggagctgcgggagcgggtgctgcggggcaagtaccgcatccccttctacatgagcacagactgtgagaacctgctgaagcgcttcctggtgctgaaccccatcaagaggggcaccctggagcagatcatgaaggaccgctggatcaatgccggccacgaggaggatgagctgaagccctttgtggagcctgagctggacatcagtgaccagaagagaattgacatcatggtgggcatgggctacagccaggaggagatccaggagagcctgagcaagatgaagtatgatgagatcacagccacctacctgctgctgggcaggaagagcagcgagctggatgccagtgacagcagcagcagcagcaacctgagcctggccaaggtgcggcccagcagtgacctgaacaacagcacaggccagagcccccaccacaaggtgcagaggtctgtgttcagcagccagaagcagaggcgctacagcgaccatgctggccctgccatccccagcgtggtggcctaccccaagaggagccagaccagcacagctgacagcgacctgaaggaggatggcatcagcagcaggaagagcagcggcagcgctgtgggcggcaagggcatcgccccagccagccccatgctgggcaatgccagcaaccccaacaaggctgacatccctgagaggaagaagagcagcacagtgcccagcagcaacacagccagcggcggcatgaccaggaggaacacctacgtgtgcagcgagaggaccacagctgacagacattctgtcatccagaatggcaaggagaacagcaccatcccagaccagaggacccctgtggccagcacccacagcatcagcagcgctgccaccccagaccgcatccgcttcccccggggcacagccagccgcagcaccttccacggccagccccgggagaggagaacagccacctacaatggacctccagccagccccagcctgagccatgaggccacccccctgagccagaccaggagccggggcagcaccaacctcttcagcaagctgaccagcaagctgaccaggaggaacatgtccttccgcttcatcaagagcagaaatgtgtctgctgagcagaaggatgagaacaaggaggccaagcccaggagcctgcgcttcacctggagcatgaagaccaccagctccatggaccccggggacatgatgagggagatcaggaaggtgctggatgccaacaactgtgactatgagcagcgggagcgcttcctgctcttctgtgtgcatggagatggccatgctgagaacctggtgcagtgggagatggaggtgtgcaagctgccccggctgagcctgaatggagtgcgcttcaagaggatcagcggcaccagcatcgccttcaagaacatcgccagcaagatcgccaatgagctgaagctgtag

SEQ ID NO: 46639 - DNA, 2643 bp, Artificial Sequence
  derived and/or modified sequence
ggaagccgaggggcggccatcttggctccgtgaggctctgaggtgccggggtgcggcggcggcagcggcggccagcagggcggaggctgaggcagcaagctcgctagagagggagaagcagtcgggcgcaggcgcctcctccgcagcccgctccatggtcggcgcccacagcccgcggcggcctgtcttgcgctccacttccttcacatcctcctccgcctcctcgttttcaggcgccgccggcggcgctgtgtggaggcccgcgagctgaaattcgcggtgcgacgggagggagtggagaaggaggtgagggggcccaggatcgcggggcgccctgaggcaaggggacgccggcgggccgaagcgcagcccgccgcccgcaggctcggctccgccactgccgccctcccggtctcctcgcctcggccgccgaggcagggagagaatgagccccgggacccgccgggggacggcccgggccaggcccgggatctagacggccgtagggggaagggagccgccctccccacggcgccttttcggaactgccgtggactcgaggacgctggtcgccggcctcctagggctgtgctgttttgttttgaccctcgcattgtgcagaattaaagtgcagtaaaatgtccactaggaccccattgccaacggtgaatgaacgagacactgaaaaccacacgtcacatggagatgggcgtcaagaagttacctctcgtaccagccgctcaggagctcggtgtagaaactctatagcctcctgtgcagatgaacaacctcacatcggaaactacagactgttgaaaacaatcggcaaggggaattttgcaaaagtaaaattggcaagacatatccttacaggcagagaggttgcaataaaaataattgacaaaactcagttgaatccaacaagtctacaaaagctcttcagagaagtaagaataatgaagattttaaatcatcccaatatagtgaagttattcgaagtcattgaaactgaaaaaacactctacctaatcatggaatatgcaagtggaggtgaagtatttgactatttggttgcacatggcaggatgaaggaaaaagaagcaagatctaaatttagacagattgtgtctgcagttcaatactgccatcagaaacggatcgtacatcgagacctcaaggaactgagagagagagtattaagagggaaatacagaattcccttctacatgtctacagactgtgaaaaccttctcaaacgtttcctggtgctaaatccaattaaacgcggcactctagagcaaatcatgaaggacaggtggatcaatgcagggcatgaagaagatgaactcaaaccatttgttgaaccagagctagacatctcagaccaaaaaagaatagatattatggtgggaatgggatattcacaagaagaaattcaagaatctcttagtaagatgaaatacgatgaaatcacagctacatatttgttattggggagaaaatcttcagagctggatgctagtgattccagttctagcagcaatctttcacttgctaaggttaggccgagcagtgatctcaacaacagtactggccagtctcctcaccacaaagtgcagagaagtgttttttcaagccaaaagcaaagacgctacagtgaccatgctggaccagctattccttctgttgtggcgtatccgaaaaggagtcagaccagcactgcagatagtgacctcaaagaagatggaatttcctcccggaaatcaagtggcagtgctgttggaggaaagggaattgctccagccagtcccatgcttgggaatgcaagtaatcctaataaggcggatattcctgaacgcaagaaaagctccactgtccctagtagtaacacagcatctggtggaatgacacgacgaaatacttatgtttgcagtgagagaactacagctgatagacactcagtgattcagaatggcaaagaaaacagcactattcctgatcagagaactccagttgcttcaacacacagtatcagtagtgcagccaccccagatcgaatccgcttcccaagaggcactgccagtcgtagcactttccacggccagccccgggaacggcgaaccgcaacatataatggccctcctgcctctcccagcctgtcccatgaagccacaccattgtcccagactcgaagccgaggctccactaatctctttagtaaattaacttcaaaactcacaaggagaaacatgtcattcaggtttatcaaaagtcgcaatgtatctgctgagcaaaaagatgaaaacaaagaagcaaagcctcgatccctacgcttcacctggagcatgaaaaccactagttcaatggatcccggggacatgatgcgggaaatccgcaaagtgttggacgccaataactgcgactatgagcagagggagcgcttcttgctcttctgcgtccacggagatgggcacgcggagaacctcgtgcagtgggaaatggaagtgtgcaagctgccaagactgtctctgaacggggtccggtttaagcggatatcggggacatccatagccttcaaaaatattgcttccaaaattgccaatgagctaaagctgtaacccagtgattatgatgtaaattaag

SEQ ID NO: 46640 - DNA, 1980 bp, Artificial Sequence
  derived and/or modified sequence
atgagcacccggacccccctgcccaccgtgaacgagcgggacaccgagaaccatacgagtcacggagacggtcgacaggaagtcacttctagaacttcgagatccggcgcgcggtgtaggaactcaattgccagctgcgccgacgagcaacctcacatagggaactataggctgctgaagactatcggcaaaggaaattttgcgaaagtaaagctcgcgcgtcatatcttgaccggaagagaggtcgccattaaaatcatcgacaagacccaactgaatcctaccagtcttcaaaagttatttcgggaagtcagaatcatgaaaatcctcaatcaccctaatatcgttaagctgttcgaagtgatagaaaccgagaaaacgttgtatctcatcatggagtacgccagcggaggcgaggtgttcgattacctggtggcacacggcagaatgaaagagaaggaggcccgctcaaaattcagacaaatcgtatctgccgttcagtactgtcaccagaagcggatcgtccaccgggatcttaaagagctaagggagcgggttctgcgaggaaagtataggatccccttctatatgtctaccgactgtgagaacctgctcaagcgctttttagttttaaatcctattaagcggggtaccctcgagcagatcatgaaggatcgctggatcaatgcaggtcatgaggaggacgagctgaaaccattcgtcgaaccagaattagatatatccgaccagaaacgcatcgacatcatggttgggatgggctacagccaggaggaaatacaggagtcactgtcaaaaatgaagtacgacgagatcacagctacttatctgctcctaggtagaaaatcttccgaactagatgccagcgattccagctcttcgagtaatttatccctggctaaggtgaggccctcgtccgaccttaacaactcaaccggacagagccctcatcataaggtgcagaggagcgtgttttctagccaaaagcagcgcagatacagtgatcacgcgggacctgcaatacctagcgtagtggcctatcctaaacgtagccaaaccagtacggccgactccgacctcaaagaagacggcatatcctctagaaagagcagtggaagcgccgttggcggtaagggaatcgcgccggcctctcccatgctggggaacgcgagtaatccaaacaaggctgacatccccgaacggaaaaagagtagtacagtgccttccagcaacactgctagcggaggtatgacccgccgcaatacttacgtgtgctctgagcggaccaccgcggaccggcactcggttattcagaacggcaaagagaacagtacaattccagatcagcgcacccctgtcgcttctacacactctattagcagcgctgccacaccagatagaattcgcttcccacgcggaactgcaagcagatctaccttccacgggcagccacgggagaggcgcacagccacctacaatgggccgcccgcctcacccagtctttcacacgaagcaactccactgtctcagactcgttcccgaggatctaccaatttattcagcaagctgaccagcaaactcaccagaaggaacatgtcgtttcgcttcattaagagccggaatgtctccgctgagcagaaggatgaaaataaggaggccaagcccaggagcctgagatttacgtggtcaatgaaaactacctccagcatggaccccggggatatgatgcgagagatcagaaaggtactcgatgccaataactgtgactatgaacaacgcgaaagattcttgttgttttgtgtgcacggcgacggtcatgccgaaaacctggtgcagtgggaaatggaagtgtgcaaactgcctagactgtcactgaatggcgtcaggtttaaaagaatttccggtacgagcattgcattcaaaaacatagctagtaagatcgcaaacgagctcaaactttag

SEQ ID NO: 46641 - DNA, 1980 bp, Artificial Sequence
  derived and/or modified sequence
atgtctacacggacccccctgccaaccgtgaatgagcgggatactgagaaccacacaagccacggcgatgggcgacaggaagtaacaagccgaactagtaggtccggggcacgttgtagaaactcgattgcttcctgtgccgatgaacagcctcacatcggcaactaccggctcctgaagacaatcgggaaaggaaatttcgccaaggtaaaactggcccgacacattctgactggccgagaagtggcaattaagattattgataagacccaactcaatcctaccagtctccaaaagttgttcagagaggtgcgtatcatgaaaatactgaatcatcctaatattgtcaagctgtttgaagtgattgaaaccgagaagactctatatttgattatggaatatgccagcggtggtgaagtctttgattatctcgtggcacacgggaggatgaaggagaaagaagcccgatcaaagtttcggcaaatcgttagcgctgtccaatactgccaccagaagaggattgtccatcgcgaccttaaggagctgagagaaagggtactgagagggaaataccggatccctttctacatgtctacagactgtgagaatctactaaagagattcctcgtgctcaaccctataaagcggggaactttggaacagattatgaaggatcggtggattaacgctggtcatgaagaggatgagttgaaaccgtttgtcgagcccgagttagatatcagcgaccagaaaaggattgacatcatggtgggaatggggtactcacaggaagagatccaggagtcactaagtaagatgaaatacgacgaaattacggcgacatacctgctcctgggacgcaagagctccgaattagatgcttcggactcatcatcctcgagcaatttaagcctggcgaaagtgcgcccatccagcgacctcaacaactcaactgggcagtccccacatcacaaggtccagcgatccgtgttcagtagccagaagcaacggcgttattctgaccatgccggaccagccattccgtccgtggtggcctaccctaagcgctctcagacctcaaccgctgattcagacctcaaagaggacggcatttcatccaggaagtcttccggcagtgcggtgggcggaaagggtattgctcccgcatctccgatgctggggaatgcctctaaccccaataaggctgatattcccgaacggaaaaagtcttcgaccgtaccaagttccaacactgcctctgggggtatgaccaggagaaacacctacgtgtgctctgagcgaacaactgccgacaggcactctgtcatacagaacgggaaagagaatagtacaattccagaccagagaacccccgtggcgtctactcatagcataagctccgcagccacaccggaccggatccgattcccaagaggcaccgcttcgcggtctaccttccatggtcagccacgtgagagacggacagcaacctacaatggcccaccagctagcccatcactctcacatgaagcaacacccctgtctcagacaagatctagaggttccactaacttgttctcaaagctcactagcaagctcacaagacgaaacatgtcgtttcgatttatcaagtcaagaaatgtcagcgccgaacagaaagacgaaaataaggaagcaaagccccgtagtctgcggttcacctggtctatgaaaactacctcaagtatggatcctggagacatgatgcgcgaaatccgaaaggtactggatgcgaacaattgtgactatgaacagagagagagatttctgcttttctgtgtccacggtgatggacacgccgagaatctggtccagtgggaaatggaggtctgtaagcttcctcgcctgtcactgaacggggtgaggttcaaacggatctcaggtaccagtatcgcttttaaaaacatagccagtaaaatcgcaaacgagctaaagttgtag

SEQ ID NO: 46642 - DNA, 1980 bp, Artificial Sequence
  derived and/or modified sequence
atgagcaccagaacccccctgcccaccgtgaacgagagagacaccgagaaccacaccagccacggcgacggcagacaggaggtgaccagcagaaccagcagaagcggcgccagatgcagaaacagcatcgccagctgcgccgacgagcagccccacatcggcaactacagactgctgaagaccatcggcaagggcaacttcgccaaggtgaagctggccagacacatcctgaccggcagagaggtggccatcaagatcatcgacaagacccagctgaaccccaccagcctgcagaagctgttcagagaggtgagaatcatgaagatcctgaaccaccccaacatcgtgaagctgttcgaggtgatcgagaccgagaagaccctgtacctgatcatggagtacgccagcggcggcgaggtgttcgactacctggtggcccacggcagaatgaaggagaaggaggccagaagcaagttcagacagatcgtgagcgccgtgcagtactgccaccagaagagaatcgtgcacagagacctgaaggagctgagagagagagtgctgagaggcaagtacagaatccccttctacatgagcaccgactgcgagaacctgctgaagagattcctggtgctgaaccccatcaagagaggcaccctggagcagatcatgaaggacagatggatcaacgccggccacgaggaggacgagctgaagcccttcgtggagcccgagctggacatcagcgaccagaagagaatcgacatcatggtgggcatgggctacagccaggaggagatccaggagagcctgagcaagatgaagtacgacgagatcaccgccacctacctgctgctgggcagaaagagcagcgagctggacgccagcgacagcagcagcagcagcaacctgagcctggccaaggtgagacccagcagcgacctgaacaacagcaccggccagagcccccaccacaaggtgcagagaagcgtgttcagcagccagaagcagagaagatacagcgaccacgccggccccgccatccccagcgtggtggcctaccccaagagaagccagaccagcaccgccgacagcgacctgaaggaggacggcatcagcagcagaaagagcagcggcagcgccgtgggcggcaagggcatcgcccccgccagccccatgctgggcaacgccagcaaccccaacaaggccgacatccccgagagaaagaagagcagcaccgtgcccagcagcaacaccgccagcggcggcatgaccagaagaaacacctacgtgtgcagcgagagaaccaccgccgacagacacagcgtgatccagaacggcaaggagaacagcaccatccccgaccagagaacccccgtggccagcacccacagcatcagcagcgccgccacccccgacagaatcagattccccagaggcaccgccagcagaagcaccttccacggccagcccagagagagaagaaccgccacctacaacggcccccccgccagccccagcctgagccacgaggccacccccctgagccagaccagaagcagaggcagcaccaacctgttcagcaagctgaccagcaagctgaccagaagaaacatgagcttcagattcatcaagagcagaaacgtgagcgccgagcagaaggacgagaacaaggaggccaagcccagaagcctgagattcacctggagcatgaagaccaccagcagcatggaccccggcgacatgatgagagagatcagaaaggtgctggacgccaacaactgcgactacgagcagagagagagattcctgctgttctgcgtgcacggcgacggccacgccgagaacctggtgcagtgggagatggaggtgtgcaagctgcccagactgagcctgaacggcgtgagattcaagagaatcagcggcaccagcatcgccttcaagaacatcgccagcaagatcgccaacgagctgaagctgtag

SEQ ID NO: 46643 - protein, 767 aa, Artificial Sequence
  derived and/or modified sequence
MNIMNTEQSQNSIVSRIKVFEGQTNIETSGLPKKPEITPRSLPPKPTVSSGKPSVAPKPAANRASGEWDSGTENRLKVTSKEGLTPYPPLQEAGSIPVTKPELPKKPNPGLIRSVNPEIPGRGPLAESSDSGKKVPTPAPRPLLLKKSVSSENPTYPSAPLKPVTVPPRLAGASQAKAYKSLGEGPPANPPVPVLQSKPLVDIDLISFDDDVLPTPSGNLAEESVGSEMVLDPFQLPAKTEPIKERAVQPAPTRKPTVIRIPAKPGKCLHEDPQSPPPLPAEKPIGNTFSTVSGKLSNVERTRNLESNHPGQTGGFVRVPPRLPPRPVNGKTIPTQQPPTKVPPERPPPPKLSATRRSNKKLPFNRSSSDMDLQKKQSNLATGLSKAKSQVFKNQDPVLPPRPKPGHPLYSKYMRGDVLVMLKQTENNYLECQKGEDTGRVHLSQMKIITPLDEHLRSRPNDPSHAQKPVDSGAPHAVVLHDFPAEQVDDLNLTSGEIVYLLEKIDTDWYRGNCRNQIGIFPANYVKVIIDIPEGGNGKRECVSSHCVKGSRCVARFEYIGEQKDELSFSEGEIIILKEYVNEEWARGEVRGRTGIFPLNFVEPVEDYPTSGANVLSTKVPLKTKKEDSGSNSQVNSLPAEWCEALHSFTAETSDDLSFKRGDRIQILERLDSDWCRGRLQDREGIFPAVFVRPCPAEAKSMLAIVPKGRKAKALYDFRGENEDELSFKAGDIITELESVDDDWMSGELMGKSGIFPKNYIQFLQIS

SEQ ID NO: 46644 - DNA, 2304 bp, Artificial Sequence
  derived and/or modified sequence
atgaatatcatgaatactgaacagagccagaattctatagtgtctcgtatcaaggtgtttgagggacaaaccaatatcgaaacctcgggtctccccaaaaaaccagagatcaccccccgaagcctaccccctaagcccactgtctcctcaggaaagccgagcgtggctcccaagcctgccgccaacagggcatctggagaatgggactcaggaaccgagaatcggctaaaggtaacaagtaaggaaggtctcacaccctacccccccctccaggaagcgggaagtattccggtgaccaagcccgagctccctaagaagccaaacccaggcctcatccgtagtgtgaatcccgaaatacctggccgcgggccccttgctgaatccagtgattcaggcaagaaggtacccacgcctgctcccaggccattactccttaagaagtctgtaagctctgaaaaccctacatatcctagtgctccactgaagccagtgactgtgccacccaggctggctggagcaagccaggccaaagcatacaaaagcctaggtgaaggaccacccgccaatcctcccgtacctgtgctgcagtccaaacccctcgttgacatcgatctcattagtttcgatgacgacgtcctccccacgccttcaggaaatttagcagaggaatccgtggggtctgagatggttctggatccttttcaactgcctgctaagaccgagccaatcaaggagagagctgtccagccagcccccacccgcaagcctacagtgattcgcatacctgctaagccaggcaaatgtctgcacgaggacccccagtcccctccccctctgccagcagaaaaacccattggaaacacgttctcaacggtttcgggcaagctcagtaacgtggagcgtacccggaacctcgaatccaaccaccccggccagacagggggctttgtgagggtcccccccaggttgcctccaagacctgtgaacggtaagacgataccgacccaacagcctcccaccaaggtcccccccgagaggccaccgccgcctaaactttctgcaaccaggcggagcaacaaaaagctgccttttaacaggtctagctctgatatggacctgcaaaaaaaacaatctaatctggctactggactctctaaagctaaatcccaggtgttcaagaatcaggatccagtactccccccacggcctaagccaggccatccattgtacagcaaatacatgcgaggtgatgtgctggtgatgttgaaacagaccgagaataactacctggagtgtcagaagggagaggataccgggcgtgtccacctttctcagatgaaaatcatcactcctttggatgaacacttgagaagcaggcctaatgacccatcccatgcccagaaacccgtggatagtggggctccccacgccgtcgtgctgcacgactttcccgccgagcaggttgacgatctgaatctgacgagcggcgaaattgtgtacctcctggaaaaaatagataccgattggtaccgaggcaattgcaggaaccagattggcatcttcccagctaactacgttaaagtgattattgatattcctgagggcggcaatggcaagcgtgaatgcgtctcttctcactgtgtcaaaggatcacgatgcgtggcccggtttgagtatataggggaacagaaggacgagctctcatttagcgaaggcgaaatcatcattctgaaagaatacgtgaacgaggaatgggcccggggcgaagtgaggggtagaacggggattttccctctgaacttcgtggagccagtcgaggactaccctacctctggagctaacgtactgtcaacaaaggtccctttgaaaaccaagaaagaagactctggatcaaactcacaagtcaactctctgcccgcggaatggtgtgaagctctacactcgttcaccgctgaaacaagtgatgacttatcattcaaaaggggcgatcggatccagatactggagcgcctagattcggactggtgtcgaggaagactccaggaccgggaaggaatatttccagctgtgtttgtaaggccctgtccagccgaggccaagtcaatgctcgccatagtgcccaaaggacgaaaggccaaggctctatacgattttcgaggggagaatgaagatgaactgtctttcaaagcaggtgatattattaccgagctggagtccgtcgatgacgattggatgtcaggggaactcatgggcaagtccgggatctttccaaagaattacatacagttcctgcagatttcatag

SEQ ID NO: 46645 - DNA, 2304 bp, Artificial Sequence
  derived and/or modified sequence
atgaatattatgaacaccgagcaatcccagaactccatcgtgtccaggataaaagtgtttgagggacagaccaatatcgaaactagcgggttgcccaagaagccagagatcactccccgctccctgcctccaaagccaacagtcagctctgggaagcccagcgtggcgccaaaaccggcagccaaccgggcctcaggggaatgggactccggcacagagaaccgtctcaaggtgacttctaaggaaggtctcacgccttaccctcccctgcaggaagctggatcaatccctgtcaccaaacccgagctgccgaagaagcctaaccctggactcatcaggagtgtgaaccccgagatccccgggagaggtcctttagccgagagtagcgatagtggaaagaaagtacctacacctgcccctagacccctgctgctgaagaaaagcgtaagcagcgagaatcctacgtatccatctgcgcccttaaagccagtgacggttccacccagattggccggtgcgagccaagccaaggcctataagtctctgggtgaaggccctccagcaaacccccctgtaccagtcctccagtctaaacccctcgtggatatcgacctcattagtttcgacgatgacgtgttgcccacaccatccgggaacctggctgaggagtccgtggggtcagagatggtgcttgatccgtttcaactcccagccaagactgagcctattaaagaaagagctgtgcagcccgcgcccacccgaaaaccgacggtcatccgcatccccgccaaaccagggaagtgcctgcacgaagacccccagagcccaccacctttgcctgctgagaaaccaatcgggaatacattctcaaccgtctcaggcaaactgtccaatgtggagcggacgcgcaacttggagtctaatcaccccgggcagacgggagggtttgtgagagtgccacctaggctgccaccaagacctgttaatggcaaaaccattcctacccagcaaccccctaccaaggtccctccggaaagacctccacctccgaagctgtccgccacccggcggtctaataagaagctgcctttcaatagaagttccagcgacatggatctgcagaagaaacaaagcaacctggccacaggtctcagtaaggctaaatcgcaggtgtttaaaaatcaggaccccgtgctgccccctcgccccaaaccagggcacccattatacagtaaatatatgaggggcgatgtgctcgttatgctgaagcaaactgaaaacaactacctggaatgtcagaagggggaagacaccggacgggtgcatctgtcgcagatgaagatcattacacctctggacgagcatttgaggtctaggcccaatgacccatctcacgcccagaaacctgtggattccggagctccgcacgcggtggtgttgcacgacttcccggctgagcaagttgacgatcttaacctgacctcaggagaaatagtctatctgctggagaagatcgatacggactggtacagagggaattgtaggaatcagatcgggatatttcccgccaattacgtgaaggtcattatcgacattccagaaggcgggaatggcaaacgggagtgcgtgtcttcacattgcgtgaaaggttctcgctgtgtcgcgcgattcgagtacatcggggaacagaaggatgagctgtctttttcagaaggggagatcataatcttgaaggagtatgtgaatgaggagtgggcgcgcggcgaagtgcggggccggacaggcattttcccattgaatttcgtggaaccagtggaggattaccccacctccggagcgaacgtcttatccactaaagtgccattaaaaactaagaaggaagactctggcagtaattcccaagtgaacagtcttccggccgagtggtgcgaggccctgcactcgttcacggccgaaacatccgacgatctttccttcaagaggggtgacagaatacaaatcctggagcgactggactctgactggtgccgaggcaggcttcaagatcgcgaaggcatcttcccagccgttttcgtacggccctgtccagcagaagcgaagtctatgctagctatcgtgccaaagggccgaaaagcaaaagccttatatgactttcggggggaaaacgaagacgaactgtcattcaaggccggcgacatcatcacagagttggagtcagtagatgatgactggatgtccggggagttaatgggaaagagtggaatatttccaaagaactacattcaattccttcagataagctag

SEQ ID NO: 46646 - DNA, 2304 bp, Artificial Sequence
  derived and/or modified sequence
atgaatatcatgaataccgaacagtcacagaactctattgtatctcggatcaaggtgttcgagggccagactaacatcgagaccagtggacttcccaagaagcctgagatcactcctaggagtttgccaccaaagccaacagtttccagtgggaagccatccgtggcccctaaacctgctgcaaaccgcgctagtggcgaatgggattcggggaccgagaatcgtttgaaggttaccagcaaagagggcctcacaccctaccctccactgcaggaggctgggtcgattcccgtcaccaagccggagttgcccaaaaagcccaatccaggactcatcagatctgtgaaccccgagatccctggaagaggacctctcgctgaaagttccgatagtgggaaaaaggtgcccactcctgcgcctcgccccctgctgctaaaaaaatcagtttccagcgaaaatcctacgtatccgtcggcaccgttaaaaccagtgacggtcccaccacggctcgccggggccagccaggccaaagcatataagtcacttggagagggaccgccggcaaatcccccagtcccagttctgcagtctaagcctctcgtagacattgacctgattagcttcgatgatgacgtactgcctacaccatccggcaacttagccgaggagtctgtaggttcagagatggttctggatccttttcagctgcccgccaaaactgagcctatcaaagagagagcggtacaacccgcaccaacgagaaagcctaccgtgatccgaattcccgccaagcccggtaaatgcctgcatgaagatcctcaatcgcccccacctctccccgctgagaaacctatcgggaataccttctcaaccgtgtcaggcaaactatccaacgttgaacgcaccagaaacctggaatcaaaccatccagggcagacagggggcttcgtacgtgtcccccctaggctgcctccaaggcctgtgaacggcaagactattccgacacagcagccaccaacaaaagtcccacccgaaagacccccacccccaaaactctcggccacacggcggagcaacaagaagctgccattcaaccgctcctcctcagacatggacctccagaaaaaacaatccaatctggcgacggggctctctaaagccaagtctcaggtgttcaagaatcaagatccagtcctccctccgcgtccaaagcctggacacccgctgtacagcaaatacatgcgcggcgatgtgcttgtgatgctcaagcagactgaaaacaactacttggagtgccaaaagggagaggataccgggcgcgtccatcttagtcagatgaagataattacaccactcgatgaacatctgaggagcagacctaatgatccgtcccatgcccagaaacccgtcgactcaggcgccccacatgctgtcgtgttacacgatttccccgctgaacaggtggatgatctgaatctgacttcgggggaaattgtgtacctcctggagaaaatcgacaccgattggtatcgcggtaactgtcgtaaccaaatcggtatattcccagcaaactacgtaaaggttatcatagatattccagaaggtgggaatggcaaaagggagtgcgtttcctctcattgcgtaaagggctcacggtgtgtcgcacgctttgagtacattggagagcaaaaggacgaactatctttttccgagggggagatcattattttgaaggagtacgtgaacgaggagtgggctcgtggcgaggtacgaggccgaacaggaatctttcccctcaacttcgtcgaaccggtcgaggattaccctacctcaggcgctaatgtgctatctaccaaagtgcctctgaagacaaaaaaggaggacagtgggagtaattctcaagttaactccctacctgcagaatggtgtgaagctttgcactcgttcacagccgaaaccagcgacgacctttcattcaagaggggagacagaattcagatcctcgagcgcttggacagcgattggtgccgcggtcggctgcaggaccgggaggggatttttcctgctgtgttcgttagaccatgtccggctgaagctaagtctatgctagccattgtgcccaaaggacggaaagccaaggcactgtatgactttcgtggtgaaaatgaagacgaactctcgtttaaggccggggatatcatcacagagctggaatctgtggatgacgattggatgtcaggcgagttgatgggcaagagtgggatctttcctaagaactacatccagttcctgcagatcagttag

SEQ ID NO: 46647 - DNA, 2304 bp, Artificial Sequence
  derived and/or modified sequence
atgaacatcatgaacacagagcagagccagaacagcatcgtgagccgcatcaaggtgtttgagggccagaccaacatcgagaccagcggcctgcccaagaagccagagatcacccccaggagcctgccccccaagcccaccgtgagcagcggcaagcccagcgtggcccccaagccagctgccaacagagccagcggggagtgggacagcggcacagaaaatcggctgaaggtgaccagcaaggagggcctgaccccctacccacccctgcaggaggccggcagcatccctgtgaccaagccagagctgcccaagaagcccaaccctggcctcatccgctctgtgaaccctgagatccctggccggggccccctggccgagagcagtgacagcggcaagaaggtgcccaccccagccccccggcccctgctgctgaagaagtctgtgtcctctgagaaccccacctaccccagcgcccccctgaagcctgtgacagtgcccccccggctggccggggccagccaggccaaggcctacaagagcctgggggagggccccccagccaacccccctgtgcctgtgctgcagagcaagcccctggtggacatcgacctgatcagctttgatgatgatgtgctgcccaccccatctggcaacctggccgaggagagcgtgggcagcgagatggtgctggaccccttccagctgcctgccaagacagagcccatcaaggagagagctgtgcagcctgcccccaccaggaagcccaccgtcatccgcatcccagccaagccaggcaagtgcctgcacgaggacccccagagccccccacccctgcctgctgagaagcccatcggcaacaccttcagcacagtgtctgggaagctgagcaatgtggagaggaccaggaacctggagagcaaccaccctggccagacaggaggctttgtgcgggtgcccccccggctgccccccaggcctgtgaatggcaagaccatccccacccagcagccccccaccaaggtgcccccagagaggcctcctccacccaagctgagcgccacccggcgcagcaacaagaagctgcccttcaacagaagcagcagtgacatggacctgcagaagaagcagagcaacctggccaccggcctgagcaaggccaagagccaggtgttcaagaaccaggaccctgtgctgcccccccggcccaagccaggccaccccctgtacagcaagtacatgagaggagatgtgctggtgatgctgaagcagacagagaacaactacctggagtgccagaagggggaggacaccggccgggtgcacctgagccagatgaagatcatcacccccctggatgagcacctgcggagccggcccaatgaccccagccacgcccagaagcctgtggacagcggggcccctcatgctgtggtgctgcatgacttccctgctgagcaggtggatgacctgaacctgaccagcggggagatcgtgtacctgctggagaagattgacacagactggtaccggggcaactgcaggaaccagatcggcatcttccctgccaactacgtgaaggtgatcatcgacatccctgagggcggcaatggcaagagagaatgtgtgagcagccactgtgtgaagggcagccgctgtgtggccaggtttgagtacatcggggagcagaaggatgagctgtccttcagcgagggggagatcatcatcctgaaggagtatgtgaatgaggagtgggcccggggggaggtgcggggccgcacaggcatcttccccctgaactttgtggagcctgtggaggactaccccaccagcggggccaacgtgctgagcaccaaggtgcccctgaagaccaagaaggaggacagcggcagcaacagccaggtgaacagcctgcctgctgagtggtgtgaggccctgcacagcttcaccgctgagaccagtgatgacctgtccttcaagagaggagaccgcatccagatcctggagcggctggacagcgactggtgccggggccgcctgcaggaccgggagggcatcttccctgctgtgtttgtgcggccctgcccagctgaggccaagtccatgctggccatcgtgcccaagggcaggaaggccaaggccctgtatgacttcagaggagaaaatgaagatgagctgtccttcaaggccggggacatcatcacagagctggagagcgtggatgatgactggatgtctggagagctgatgggcaagagcggcatcttccccaagaactacatccagttcctgcagatctcctag

SEQ ID NO: 46648 - DNA, 2304 bp, Artificial Sequence
  derived and/or modified sequence
atgaacatcatgaacaccgagcagagccagaacagcatcgtgagcaggattaaagtttttgagggccagacaaatattgagacctccggtttacctaagaaacccgaaataaccccccgctccttaccccccaagccgacggtgagctccgggaagccatcggtggcaccaaagcctgcagccaaccgcgcgagcggcgagtgggacagcgggacagagaacagactgaaagtgacctctaaggagggtcttacaccgtaccctccactccaagaggcaggctcaatacccgtgacaaagcccgagctgcccaagaaaccaaaccccgggttaattcgatccgtgaatccagaaatcccaggcaggggcccgctagctgaaagtagcgactctggaaaaaaggtgcctacacctgcgccacgtcccctgctcctgaagaagtccgtctcttccgagaatcccacatatcctagcgcaccactgaagccagtcacagtgccaccacgactcgctggtgcaagccaggccaaagcctacaaaagcctgggcgaagggccccccgctaatcccccagttcccgtgctgcagtcgaagccccttgtggatatcgatcttatcagctttgatgatgacgtcttgccgaccccctcaggcaacctcgctgaagaaagcgtaggatcagaaatggtgttggacccttttcaattacccgctaaaactgaaccaatcaaggagagagccgtgcagcccgcaccaaccagaaagcctacagtgattcgcatcccagctaaacccggcaaatgtcttcacgaagacccacagtcccctccgcccctccccgccgaaaagcctatcggcaacacattctctacagtttcaggaaaattatccaatgtggagagaacgcgcaatttagagtccaatcacccaggtcagacagggggcttcgtgcgcgtgccgccacggctgcccccacgaccagtgaatggcaagactatcccaacacagcagcctcccaccaaggtcccgccagagcggcctccaccccccaagctgagcgcaacccggcggtcaaataaaaaactgcctttcaatagatcatcgtccgacatggaccttcagaagaaacagagtaatttggccacggggctaagcaaagccaagtcacaggtgtttaaaaatcaggacccagtcctcccgcctaggcccaagcccgggcaccctctttattcaaagtacatgcgcggggatgtcttggttatgctgaaacaaacggagaacaattacctggaatgtcagaagggagaggatacaggcagagtgcacttgtctcagatgaaaatcattactccactagacgaacatctgcgatcacgcccgaacgacccatcgcacgcccagaagcccgtggatagcggcgctccacacgctgtggtgctgcatgactttcctgctgaacaggttgacgacctcaacctcacctccggtgagatagtctatctcctcgagaaaatcgataccgattggtatagagggaattgtcgaaatcaaatcggcatctttcctgcaaattacgtcaaggtgattattgacatacctgaggggggcaacggaaagagggaatgtgtgtccagccattgcgtgaaaggtagtcgttgcgttgctcggttcgaatatataggtgagcaaaaagatgagctctcattcagtgaaggcgagatcatcatactgaaggagtacgtaaatgaagagtgggccagaggggaggtgagaggacgaaccggcatttttccactgaacttcgtggaacctgtggaggattaccccaccagcggagctaatgttctgagcactaaggtgccactcaagacgaagaaggaggactcgggaagcaattcccaggtaaactctttgccagccgagtggtgcgaagccttgcatagcttcacagcagagactagtgatgacctatcgttcaagcggggggatcgcattcagatcctagaaaggctggactccgattggtgtaggggtagacttcaggatcgggagggaatctttccagccgtttttgtcaggccttgtccggccgaggccaagagcatgctggcaatcgttcctaaagggcgtaaggctaaggctctttacgacttccgtggcgagaacgaggatgaacttagctttaaggccggcgacataattacggaactagagtctgtggatgacgactggatgtccggagagttgatgggtaagtccggcattttcccaaagaactacatacaatttctacagatctcttag

SEQ ID NO: 46649 - DNA, 2304 bp, Artificial Sequence
  derived and/or modified sequence
atgaacatcatgaacaccgagcagagccagaacagcatcgtgagccggattaaggtgtttgagggacagactaacatcgaaacgagcggattgcctaagaagcccgaaattactccgcgctcactgccgccgaaacctaccgtgtcgtctgggaaacccagcgtggcccccaaacccgctgcaaatagggcttcgggggaatgggattcgggaaccgagaaccggttgaaggtgacctctaaggagggcttaactccataccctcctctgcaagaggccggatccattccagtaacaaagcccgaattacccaagaagccaaatcccgggctgattaggagcgtgaaccctgagataccagggaggggaccactggctgaaagttctgactctggaaaaaaggttcccaccccggctcctaggccacttttacttaagaagtcagtgtccagtgagaatcctacatatcctagcgctcctttaaaaccagtaaccgtgcccccccgcctcgccggggcttcccaggccaaggcctacaagtctctcggcgaggggcctcccgcaaatcccccagtgccagttttgcagtctaaacctctcgtggatattgaccttatttccttcgacgatgatgtgctgcctactccgtccggtaatcttgcagaggagagtgtggggtccgagatggttcttgacccatttcagctcccagccaaaaccgagccaataaaggaacgggccgtccagccagcccccaccagaaagcccacggtaatccgcattcctgctaaaccaggaaagtgtctgcatgaagaccctcaatccccccctcccctacctgcggagaagcctatcgggaacaccttctctactgtctccggcaagctgtcgaacgtagagaggacacgaaatctggagagcaatcaccctggacagaccggagggtttgttagggtgcccccccgccttcccccccgccccgtgaatggcaagaccattcccacccagcagcctcccacaaaggtcccacctgagcgaccccctcctccaaagctttccgccactcggcggtcaaacaaaaagcttccgttcaaccgttccagtagcgatatggatctccagaagaagcagtctaaccttgcaaccggtctgagcaaagccaaatctcaggtctttaagaatcaagatcctgttctcccacctaggcctaagcccggtcacccactgtattctaagtatatgagaggagacgtgctagtgatgctgaagcagacagaaaacaactatttggaatgccagaaaggcgaagacaccggaagggtccatttgtcccagatgaagattattaccccattagatgaacatctgcgcagcaggccgaatgatccctcccacgcccagaagcccgttgactccggcgctccccacgcagttgtactccacgactttcctgctgagcaagtcgacgatctcaacttgaccagcggcgagattgtgtatctgctggaaaagatagatacagactggtacagaggtaattgcagaaaccagattggcattttcccggcaaattatgtcaaggtcattatcgatatccctgagggaggaaacgggaagcgggagtgcgtgtcctcacattgcgtcaaaggctccagatgcgtggccagattcgagtatattggagagcagaaggatgagctgtctttctctgaaggagaaatcatcatcttgaaggagtacgttaatgaggagtgggctcggggggaagtcaggggtcggactggcatcttcccactgaacttcgtggagccagtggaggactatcctacgagtggcgctaatgtgctaagtaccaaggtgcccttgaagactaaaaaggaggattccgggtccaactcccaggtgaattctctcccggccgaatggtgtgaagcgctgcactctttcacagcagagactagtgatgatttgtccttcaagcgcggagacaggattcaaatacttgagagactggattctgattggtgtcgcggacgccttcaagacagagagggtatcttcccggcagtgttcgtgcggccctgccccgcagaggctaaaagcatgctggctatcgttccaaagggccggaaagcaaaagccctgtatgacttcagaggtgagaatgaagatgaactttctttcaaggcaggggatatcattacggaactggaatctgtggatgatgactggatgagcggcgaactgatgggtaagagcggcattttcccaaagaactacatccaattcctgcagatttcttag

SEQ ID NO: 46650 - DNA, 2304 bp, Artificial Sequence
  derived and/or modified sequence
atgaacatcatgaacaccgagcagagccagaacagcatcgtgagccgcatcaaagtgttcgaaggtcaaaccaatatcgagacttccgggctgccgaagaagcccgagatcactcccaggagcctcccacccaagcccacagtgtcatcagggaaaccctcagtggccccaaagccggccgccaacagggcttctggtgagtgggacagcggtactgaaaataggttaaaggtcaccagcaaggagggcctcacaccgtaccctcctctccaggaagccggctctatcccagtgaccaagcctgagctgccaaagaagcccaatccagggctgattcggtcggtgaatcctgagatcccagggaggggtccattagctgaaagtagtgactccggaaaaaaggtgccgacacctgccccacgcccactgcttctaaaaaagtcagtctcatccgaaaaccccacatacccttcagccccactcaagcctgtaaccgtgccacctagactggctggcgctagccaggccaaggcatataaatcacttggagagggccccccggccaaccctcccgtgcctgtcctccaaagcaaaccactcgtcgatattgatctcatctccttcgacgatgatgtgcttcccacaccatcaggcaacctggctgaagagtccgttgggtctgagatggttctggacccattccagctgccggccaaaacagagccgatcaaagagcgcgcagttcagcctgctcctacgaggaagcccaccgtaatccgaatcccagcaaaacctggcaagtgcctgcacgaagaccctcagagccctccccccctacccgctgagaagccaatcggcaatacattttccacggtgtcaggcaagctctctaatgtcgaaagaactagaaatctagagagtaaccacccgggccagaccgggggtttcgtaagggttcctccccgcttaccacctcggcccgtcaatggaaaaacaatcccaacccagcagccccccaccaaagtgccacccgagcgccccccgccccctaaactgagcgctacgagacgcagcaataaaaagttgccctttaatcgttcatctagcgacatggaccttcagaaaaaacagagtaacctcgccacaggcttatcaaaggccaaaagccaggtgttcaaaaaccaggaccctgttctgcctccccgccccaagcctggccaccctctgtattcaaagtacatgaggggcgacgtccttgtcatgctgaagcagaccgagaacaactatcttgaatgtcagaaaggagaggataccggccgggtccacctgagccagatgaagatcattacccctcttgacgaacatctccgatctcggcctaatgacccttctcacgcacagaagccagtggatagcggggcgcctcatgcagtcgtgttgcacgactttccggccgagcaagttgatgatcttaacttgacctctggcgaaatcgtgtacttactagaaaaaatagatacggactggtacagaggtaattgtcgaaaccagataggcatctttcccgcaaattacgtgaaggtcattattgatattccggaggggggcaatgggaagcgcgagtgcgtttcgtcacactgcgtcaagggaagcagatgcgtggccaggtttgagtacatcggggagcaaaaggatgagctgtcgttctcggaaggggaaattataatcctcaaagagtatgtcaatgaagagtgggctaggggcgaggtcaggggtcggaccggaatcttccctctgaatttcgttgaacctgtggaggactaccctacatctggggcgaacgtcctatctaccaaagtccccctgaaaactaaaaaggaggatagcggtagcaattcacaggtgaattcactcccggcagagtggtgcgaggcgctgcacagctttactgcagaaacgtcagatgacctcagcttcaagcgcggagacaggattcaaatcctggaacgccttgattccgactggtgtagagggaggcttcaggatagggaggggatcttcccagctgttttcgtgagaccctgcccagccgaggcgaagagcatgttggccattgtcccaaagggtaggaaagccaaggccctttacgatttccgtggcgagaacgaggatgagctctcctttaaagctggcgacattataacggagctggagtctgtcgacgacgactggatgagcggcgaacttatggggaagtctggtatttttccaaagaattatatccagttcttgcagatctcctag

SEQ ID NO: 46651 - DNA, 2304 bp, Artificial Sequence
  derived and/or modified sequence
atgaatattatgaacactgagcagtcccagaattccatcgtgtcccgaatcaaagtgttcgaaggccagactaacatagagacatcgggccttcccaagaagcccgagattacaccaaggtcgctccctccaaaaccgacagtgtcaagtggcaagccttcagtggctccaaagccagccgctaatagagcgagtggagagtgggacagcgggactgaaaaccggttgaaggtgacatccaaagaaggactgacaccttacccccctttgcaggaggccggatctatacccgtgaccaaaccagaacttcctaagaagcccaatcctgggttgatacgtagcgttaatcccgagatccctggacgtggccctctagccgaatcttctgactctggtaagaaggtacccacccccgctccgagacctctgctgctgaagaagtccgtgtcgagcgaaaacccaacgtacccttcagctcccctgaaacccgtcacagtccctcctcgactagccggagctagccaggctaaggcttataagtctctgggtgagggcccaccagctaacccacctgtgccagtcctccagagtaaacctctagtcgatattgacctgatcagcttcgacgacgatgttctccccaccccaagcggcaacctggcagaggagtctgtagggtcagagatggttctggacccattccaactaccagcaaaaacagagcctataaaagaaagggcagtgcagccagcaccaacccgcaagcccacggtgatccgcattccagccaagccaggcaagtgccttcacgaagacccgcagtccccacctcccctgcctgccgaaaagcctattgggaataccttcagtacggtgtctgggaagctgtctaacgttgagcgcacgagaaacctggaatcaaatcaccccggtcagacgggtggcttcgtcagagtcccacccaggctccctcccaggcccgtgaacggcaaaaccatcccaacacagcagccgccaaccaaggttccaccagaacggcctccaccacctaagctgtccgccactcgtcggtccaacaagaaactcccttttaacaggtcaagttctgacatggatcttcagaagaaacaaagcaatctcgcaaccggtctgtcaaaggccaagagccaggtttttaaaaaccaggaccccgtgctgccacctcggccaaagcctggccacccactctactccaagtatatgaggggcgatgtcttagttatgcttaagcagacggaaaataattacttagaatgccagaagggggaagataccggccgagtccatttatcgcaaatgaaaattattacgccactggatgagcacctgcgctctagaccaaatgacccctcacatgcccagaagccagtagattccggcgctcctcacgccgtagtgctccacgatttcccagcggagcaagtggatgacctcaatctgacttcaggggagatcgtgtacttactagagaagatcgatacagactggtaccgagggaactgtcggaatcagattggaatctttccagcaaattacgttaaggttatcattgatatccccgaaggtggcaatggcaaacgggagtgcgtgtctagtcattgcgtgaagggctctcgttgcgtggcacgtttcgaatatatcggcgagcagaaggacgagctatctttctcagagggggagataatcatcctgaaggagtacgtcaatgaggagtgggcgcgaggcgaggtgcgcggaaggactggaatttttcctctaaactttgtggagcctgtggaagattatccaaccagtggcgctaatgtactctcaaccaaggtgccattaaagaccaaaaaagaggattcaggttctaattcacaggttaatagcctgcccgctgaatggtgtgaggccctgcactccttcacggccgagacaagcgatgatctatcattcaaaaggggagaccggatacagatcctggagcgcttggattccgactggtgccggggacggttgcaagacagagaaggaatcttccccgctgtgtttgttcgcccatgtcccgctgaggccaagtcaatgctggccatcgtgccaaaaggtagaaaggccaaagctttgtacgacttccgcggtgaaaacgaggacgaattatcatttaaagccggtgacataataacagaacttgaatccgtcgatgatgattggatgtcaggcgagttgatgggaaagagcgggatcttccccaaaaattacatccagtttctccaaattagctag

SEQ ID NO: 46652 - DNA, 2304 bp, Artificial Sequence
  derived and/or modified sequence
atgaacatcatgaacactgaacagagtcagaattctatcgtctccaggatcaaagtcttcgagggccagactaatatcgaaacaagcggactgcctaagaaacccgagatcacgcccagatctcttcccccaaagcccactgtgagctctggaaaaccatccgtggctccaaagcccgctgccaatagggcctctggggaatgggatagcggcaccgagaatagattgaaagtcacgtccaaggaaggtctgaccccctatcctccgctgcaggaggctgggtccattccagttaccaagccagagttgcccaaaaaaccaaatcccggattgatccgttcagtgaaccctgagattccaggaagaggccctctggccgagtcttcggatagcgggaaaaaagtgccaacgcctgccccacgacccctgctgttgaagaagagcgtctcttccgaaaatcctacttacccttctgctcctttaaaacccgtaaccgtgccaccaagacttgccggagctagtcaagcgaaggcctacaaatcattgggggagggtcctccagctaatcctcctgtgcccgtgctgcaatccaaaccccttgtggacatcgacctaatttcctttgacgacgatgtattgcctactcctagcgggaacctagctgaggagtcagtggggtctgaaatggtcctggatccatttcaactgcccgcaaaaaccgagcctattaaggaacgagccgtgcagcccgctcctacaagaaagcccacagtgatacgaatccctgcaaagcctgggaagtgtctgcacgaggatcctcagagcccgcctcctcttccggctgagaagcccattgggaacactttctctaccgtctcaggtaagctgagtaatgtggagagaacacgaaacctggaatccaaccaccccggacagaccggaggctttgtgcgcgtgcctcctagactcccccctagacctgtaaatggaaaaacaatccctacacagcaaccacccacaaaagtccctccagagagaccccctccacctaagctgagtgctacaaggcgcagtaacaaaaagttgcccttcaacaggtcctcatccgacatggatttacagaaaaagcaaagcaaccttgcaacaggattatccaaggcaaagagccaagtgtttaaaaaccaagatccagtcctgcctccaaggccaaagcccggtcacccactgtattccaaatatatgcggggagacgtgctggtcatgctaaagcagacagaaaacaactatctggaatgtcaaaagggagaggacactgggcgagtacatctgagtcagatgaagatcatcaccccactcgacgagcaccttcggtcacgcccaaatgatccttctcacgcccagaaacccgtggatagcggggcaccacacgccgtagtacttcacgatttccctgccgagcaggttgacgaccttaacttgacctctggtgaaatagtctacctcctcgagaaaattgatactgattggtatcggggtaattgtcgaaatcaaataggaatattccctgccaattacgtgaaagttattatcgatatccctgaggggggaaatggtaagagagagtgcgtgtcatcgcactgcgttaaggggtctcggtgcgtagcgaggtttgagtacatcggggaacagaaggatgagctctcttttagcgaaggcgaaataattatcttaaaggagtacgtcaacgaagaatgggcaaggggggaagtacgaggcagaacgggaatctttccactgaattttgtggaaccggtggaagattatcctacttccggggctaacgtactgtcaaccaaggtccccctgaaaacgaagaaggaagatagcgggagcaacagccaagtgaatagtctccctgccgagtggtgcgaagcgttgcactcttttaccgccgagacttccgatgacttgtcattcaaacggggtgaccgaatccaaatcttagaacgccttgattcggattggtgccgcggtcgcctgcaggatcgggagggaatctttccggctgtgtttgtgcgcccatgtccggctgaagccaaaagcatgttggcaattgtgcccaagggacgcaaggcgaaggccctttatgactttcgcggagagaacgaggacgaattgtcgttcaaagccggagatataatcaccgagttggaatccgttgatgacgactggatgtcaggggagcttatgggcaaatccgggatctttccaaagaactatatccagttcctacagatttcctag

SEQ ID NO: 46653 - DNA, 2304 bp, Artificial Sequence
  derived and/or modified sequence
atgaacatcatgaacaccgaacaaagccagaactccatcgtgtccaggatcaaggtttttgaaggccagacgaatatcgaaacttctggcctcccaaagaagccggagatcactcccagaagcctcccaccgaaacctaccgttagcagcggaaaaccttctgtggctccaaagcccgctgccaacagggccagcggagaatgggactcaggcacagaaaaccgactaaaagtcactagtaaagagggcttaactccctaccctcccctgcaggaagcgggaagcattccggtcacgaagcccgagctacctaagaagcctaaccctggactcattaggagcgtcaatccggaaatccccggaagagggcctctggccgagtcatccgatagcggcaagaaagtcccaaccccggctcctcgtccgctgcttctgaagaaatccgtgtcttccgagaaccccacatacccttccgcgccactgaagcccgtcaccgttcctcctagactggctggcgcttcacaggctaaggcctataagtctcttggagaaggccctcccgcaaatccacccgttccagtgctgcagagcaaacccctagtcgatatagatctgatctccttcgacgatgacgttctgccgacaccctcaggtaacctcgccgaggagtctgtcggctctgaaatggtgctcgatcccttccaactgcctgctaagacggaacctatcaaagaaagagcagtacagcctgcccctacccggaaacccacagtgattagaatcccggctaagccgggaaaatgcctccatgaagatccacagtcgcctccaccgctgcctgcagagaaacctattggcaacactttttccacagtctccggtaagttgagtaatgtggagagaactcgtaatcttgaatccaaccatccaggacagacgggtggctttgtccgagtacctccccgactgcctcctaggccagtaaatggaaaaaccatcccaactcagcagccccctacaaaagtcccccctgagcggccaccgcctccgaaactaagtgccacacggaggagcaataagaagctaccttttaatagaagttcatctgacatggacctccaaaaaaagcagtctaatctcgccactggcctgtctaaggccaaatcccaagtgttcaaaaatcaggaccccgtgttgcccccacggcctaaaccgggacaccccctgtactcaaaatacatgcgaggagatgttctggttatgctgaaacagacagagaataattatcttgaatgtcagaaaggggaagatacaggacgcgttcacttgtcccagatgaaaatcattacccccctggacgagcacctcaggagccgccctaatgacccgtctcacgctcagaaaccagtggactctggcgcaccacatgcagtggtactgcacgactttccagcggaacaggtggacgacctgaacctgacttccggtgagattgtatacctcctggagaaaatcgatactgactggtacaggggcaattgtaggaaccaaatagggatctttcccgcaaactacgttaaagtgatcatcgatatcccagagggaggaaatggcaagcgtgagtgcgtgtcctcccattgcgtaaagggttctcgctgtgtcgcccgtttcgagtatataggggaacagaaagacgagctctccttcagcgagggcgagattattatactaaaggagtacgtgaatgaggagtgggctcgaggtgaggtgcggggtagaactggaatcttccccctgaattttgtcgagccagtcgaggattaccccacttccggggctaatgtgctgagcactaaagtcccattgaaaacaaagaaagaggacagtggaagcaactcacaggtaaactcactgccagctgaatggtgtgaagcgctacatagcttcaccgccgaaacctccgacgacctttccttcaagcgtggcgacagaattcagatactggaacgtctcgatagcgactggtgtcgcggacggctgcaggatcgggagggcatctttccagctgtattcgtccggccttgtccggctgaggcgaagagtatgctggcgatcgtcccgaagggcagaaaggccaaggctctttatgattttcggggtgagaatgaggacgaactgtcatttaaggccggtgacatcattacggagctggaatccgttgatgacgattggatgagtggagaactgatgggtaagagtgggatttttccaaaaaattacatccagttcctgcagatcagttag

SEQ ID NO: 46654 - DNA, 2304 bp, Artificial Sequence
  derived and/or modified sequence
atgaacatcatgaacaccgagcagagccagaacagcatcgtgagcagaatcaaggtgttcgagggccagaccaacatcgagaccagcggcctgcccaagaagcccgagatcacccccagaagcctgccccccaagcccaccgtgagcagcggcaagcccagcgtggcccccaagcccgccgccaacagagccagcggcgagtgggacagcggcaccgagaacagactgaaggtgaccagcaaggagggcctgaccccctacccccccctgcaggaggccggcagcatccccgtgaccaagcccgagctgcccaagaagcccaaccccggcctgatcagaagcgtgaaccccgagatccccggcagaggccccctggccgagagcagcgacagcggcaagaaggtgcccacccccgcccccagacccctgctgctgaagaagagcgtgagcagcgagaaccccacctaccccagcgcccccctgaagcccgtgaccgtgccccccagactggccggcgccagccaggccaaggcctacaagagcctgggcgagggcccccccgccaacccccccgtgcccgtgctgcagagcaagcccctggtggacatcgacctgatcagcttcgacgacgacgtgctgcccacccccagcggcaacctggccgaggagagcgtgggcagcgagatggtgctggaccccttccagctgcccgccaagaccgagcccatcaaggagagagccgtgcagcccgcccccaccagaaagcccaccgtgatcagaatccccgccaagcccggcaagtgcctgcacgaggacccccagagccccccccccctgcccgccgagaagcccatcggcaacaccttcagcaccgtgagcggcaagctgagcaacgtggagagaaccagaaacctggagagcaaccaccccggccagaccggcggcttcgtgagagtgccccccagactgccccccagacccgtgaacggcaagaccatccccacccagcagccccccaccaaggtgccccccgagagaccccccccccccaagctgagcgccaccagaagaagcaacaagaagctgcccttcaacagaagcagcagcgacatggacctgcagaagaagcagagcaacctggccaccggcctgagcaaggccaagagccaggtgttcaagaaccaggaccccgtgctgccccccagacccaagcccggccaccccctgtacagcaagtacatgagaggcgacgtgctggtgatgctgaagcagaccgagaacaactacctggagtgccagaagggcgaggacaccggcagagtgcacctgagccagatgaagatcatcacccccctggacgagcacctgagaagcagacccaacgaccccagccacgcccagaagcccgtggacagcggcgccccccacgccgtggtgctgcacgacttccccgccgagcaggtggacgacctgaacctgaccagcggcgagatcgtgtacctgctggagaagatcgacaccgactggtacagaggcaactgcagaaaccagatcggcatcttccccgccaactacgtgaaggtgatcatcgacatccccgagggcggcaacggcaagagagagtgcgtgagcagccactgcgtgaagggcagcagatgcgtggccagattcgagtacatcggcgagcagaaggacgagctgagcttcagcgagggcgagatcatcatcctgaaggagtacgtgaacgaggagtgggccagaggcgaggtgagaggcagaaccggcatcttccccctgaacttcgtggagcccgtggaggactaccccaccagcggcgccaacgtgctgagcaccaaggtgcccctgaagaccaagaaggaggacagcggcagcaacagccaggtgaacagcctgcccgccgagtggtgcgaggccctgcacagcttcaccgccgagaccagcgacgacctgagcttcaagagaggcgacagaatccagatcctggagagactggacagcgactggtgcagaggcagactgcaggacagagagggcatcttccccgccgtgttcgtgagaccctgccccgccgaggccaagagcatgctggccatcgtgcccaagggcagaaaggccaaggccctgtacgacttcagaggcgagaacgaggacgagctgagcttcaaggccggcgacatcatcaccgagctggagagcgtggacgacgactggatgagcggcgagctgatgggcaagagcggcatcttccccaagaactacatccagttcctgcagatcagctag

SEQ ID NO: 46655 - protein, 731 aa, Artificial Sequence
  derived and/or modified sequence
MNIMNTEQSQNSIVSRIKVFEGQTNIETSGLPKKPEITPRSLPPKPTVSSGKPSVAPKPAANRASGEWDSGTENRLKVTSKEGLTPYPPLQEAGSIPVTKPELPKKPNPGLIRSVNPEIPGRGPLAESSDSGKKVPTPAPRPLLLKKSVSSENPTYPSAPLKPVTVPPRLAGASQAKAYKSLGEGPPANPPVPVLQSKPLVDIDLISFDDDVLPTPSGNLAEESVGSEMVLGLHEDPQSPPPLPAEKPIGNTFSTVSGKLSNVERTRNLESNHPGQTGGFVRVPPRLPPRPVNGKTIPTQQPPTKVPPERPPPPKLSATRRSNKKLPFNRSSSDMDLQKKQSNLATGLSKAKSQVFKNQDPVLPPRPKPGHPLYSKYMRGDVLVMLKQTENNYLECQKGEDTGRVHLSQMKIITPLDEHLRSRPNDPSHAQKPVDSGAPHAVVLHDFPAEQVDDLNLTSGEIVYLLEKIDTDWYRGNCRNQIGIFPANYVKVIIDIPEGGNGKRECVSSHCVKGSRCVARFEYIGEQKDELSFSEGEIIILKEYVNEEWARGEVRGRTGIFPLNFVEPVEDYPTSGANVLSTKVPLKTKKEDSGSNSQVNSLPAEWCEALHSFTAETSDDLSFKRGDRIQILERLDSDWCRGRLQDREGIFPAVFVRPCPAEAKSMLAIVPKGRKAKALYDFRGENEDELSFKAGDIITELESVDDDWMSGELMGKSGIFPKNYIQFLQIS

SEQ ID NO: 46656 - DNA, 2196 bp, Artificial Sequence
  derived and/or modified sequence
atgaacataatgaacactgaacagagccagaactcgattgtatctcgaattaaggtgttcgaggggcaaaccaatatagagacctccggattgcctaagaagcctgaaatcaccccacggtccctgcctcctaagccaaccgtgagcagcgggaagccctctgtggccccgaaacctgcagcgaacagagcttcaggtgaatgggactcaggaaccgaaaataggttgaaggttaccagcaaggaagggttaaccccttacccgcctctccaggaggcaggttctatcccagtgaccaaacctgagcttccaaaaaaaccaaatcctggcctgatccgcagcgttaacccggagatccctgggcggggaccactggcagaatcctctgatagtggcaagaaagttcctactcccgccccccggccattgcttttgaaaaagagtgtgtcgagcgagaaccccacttacccgagcgctccactgaaaccagttaccgtgccccccaggcttgccggcgcttctcaagccaaggcttacaagagcctcggggagggacccccagcgaatccgccggtaccagttctccagtccaagcctctcgtagatatcgacctcattagctttgatgacgacgttctgcccactccatcaggcaatctggctgaagaatccgtgggctccgagatggttctgggtctgcacgaggaccctcaaagtccccccccactccccgccgagaagcccattgggaatactttctctacagtatcagggaaactgtctaatgtggagaggaccagaaatcttgaatcaaatcatcccggccaaacaggcgggttcgtgagggtgccgccacggctccccccaaggcccgtgaacggcaagaccatcccgactcagcaacctccaaccaaggtgccccccgaaagaccaccgcctcctaaactgagcgccacgcgtcgatctaacaaaaagctcccgtttaatcgctcctcaagtgacatggatctgcaaaaaaagcagtcaaatctagccacggggttgtcaaaagccaagagtcaggtgttcaaaaaccaggatccggtgcttcctcctagacctaaacctggccacccattgtactctaaatatatgaggggggatgtgctggtgatgctgaagcaaacggagaacaactacctggagtgccagaaaggagaggacacggggagggtccacctgtcccagatgaaaataatcacgcctctcgatgaacacctccgctcccggcctaatgatccctctcatgctcagaagccagttgactccggggcacctcatgccgtcgtgctgcacgacttcccagctgagcaagtcgatgatctgaaccttaccagcggcgagatcgtgtatctccttgagaaaatcgatactgattggtacagaggcaactgtcggaaccagattggcatatttccagccaactatgtcaaggtgatcatcgatatacctgaaggcggtaacggcaagcgggaatgtgtgtccagccactgcgtgaaaggatctcgctgtgtggcaaggtttgagtacatcggcgaacagaaggatgagctctcattttctgaaggagagattattattctcaaggagtacgtgaacgaggagtgggccaggggagaggtaaggggccggaccggtatctttcctctgaatttcgtggaaccagtagaggattaccccacctctggcgcaaatgtgctctctactaaggtcccacttaaaacgaagaaagaggacagtgggtccaattctcaggtgaacagtctgcctgcggagtggtgcgaagccttgcattctttcacagccgagacatcggatgacctgtcctttaaacgcggagatcgaatccaaattttagagaggttggacagtgactggtgtcgcggccggcttcaggatcgcgagggaatattccccgcggtgtttgtccgaccctgtcccgccgaggctaaatcaatgcttgctatcgtgcctaagggtaggaaggctaaggctttgtacgatttcagaggagagaatgaggacgagttatcattcaaagcgggtgacattatcactgagctggagagtgttgatgacgactggatgagtggcgagctcatggggaaaagcgggatcttccctaaaaactacatacagttccttcagatctcatag

SEQ ID NO: 46657 - DNA, 2196 bp, Artificial Sequence
  derived and/or modified sequence
atgaacataatgaacactgaacagtctcagaactccatcgtgtcacgaatcaaggtttttgaaggacagactaacatagaaacctccggcctgcctaaaaaacctgagataactccgcgatctttgccgcctaagcctacagtaagctccgggaagccttctgtggccccaaagcccgctgcaaaccgggcttccggcgagtgggacagcggcactgaaaatcgattgaaggtaacttctaaggaaggattgaccccttatcccccattgcaagaagccggctctattcccgtaactaaaccggaattaccgaaaaagcccaaccccggactgatccgctctgtcaacccagagatccctggcaggggaccactggctgaatcaagtgatagtggaaagaaagtgcccaccccggctccgagaccgttgctcttgaaaaagtcagtttcaagcgaaaaccccacgtatccaagcgcccccctgaagcccgtgacggttcctcctcgcttagctggggcttctcaggcaaaagcttacaaatcactaggagaaggtcctcccgctaacccacccgtacccgtcctccagagcaagccactcgtagacatcgatctcatttcattcgacgatgatgtgttgccaactcctagcggaaacctcgctgaagagagtgttggttctgagatggtactgggactccacgaagacccccagtctccaccaccgctgccagcagagaagccaattgggaacactttcagtacggtgtccggcaaactcagtaacgtggaacggacccgcaatctggagagcaaccacccaggccagacgggcggttttgtccgggtgcccccccgtcttccacccagacctgtgaatggtaagaccattcctacccaacagccccccaccaaagtgcccccagaacggcccccaccccctaaattgagtgccacacggagaagcaacaagaaactgccattcaatcggagctccagtgacatggatctgcagaaaaagcaaagcaacctagccaccggcctgtccaaggcaaagagtcaagtgtttaagaatcaggacccggttttgcctcctagacccaagcctgggcacccactctacagcaaatacatgcgtggcgatgtactagtgatgcttaagcaaacagagaacaactatctggagtgccaaaagggcgaggacactggtcgtgtccacctatcacaaatgaagattattactccgctggatgaacatttacgctctagacccaatgacccctctcacgctcaaaagcccgttgattccggcgcacctcacgccgtggtgctccacgactttcctgcagagcaggttgacgacctcaatctcactagtggcgagatcgtgtacctcctggagaagattgacacagattggtatcgtggtaactgtcgcaaccagatcgggatctttcccgccaactacgttaaggtgatcatcgacatccctgagggcggtaatgggaagcgggagtgtgtgagctctcattgtgtaaagggcagccggtgtgtggccaggttcgagtacattggagaacagaaagatgagctgtccttcagtgagggcgagattatcattctgaaagagtatgttaacgaggaatgggcccgaggtgaggtcagaggaaggaccggaatttttccgctcaactttgtggagcccgtcgaggactaccctacctctggagctaatgtgttgtctacgaaagtgccactgaaaactaagaaagaagattccgggagtaatagccaggtgaacagcttgccagccgaatggtgcgaggcactgcattcattcacggccgagacatccgacgatctgagcttcaagcgcggtgaccgcatacagattctggagaggctggatagtgactggtgtaggggcagactgcaagatcgcgaggggatctttcccgcggtgtttgttcgaccctgccccgccgaagccaaaagcatgttagccatagtccctaaaggccggaaggcaaaggccttgtatgactttcggggagagaacgaggacgaactgtccttcaaggctggggacattatcacggaacttgaatccgtcgacgacgactggatgtctggcgagctgatgggaaaaagcgggattttccccaagaactatatccagttcctccaaatctcgtag

SEQ ID NO: 46658 - DNA, 2196 bp, Artificial Sequence
  derived and/or modified sequence
atgaacatcatgaacacagagcagagccagaacagcatcgtgagccgcatcaaggtgtttgagggccagaccaacatcgagaccagcggcctgcccaagaagccagagatcacccccaggagcctgccccccaagcccaccgtgagcagcggcaagcccagcgtggcccccaagccagctgccaacagagccagcggggagtgggacagcggcacagaaaatcggctgaaggtgaccagcaaggagggcctgaccccctacccacccctgcaggaggccggcagcatccctgtgaccaagccagagctgcccaagaagcccaaccctggcctcatccgctctgtgaaccctgagatccctggccggggccccctggccgagagcagtgacagcggcaagaaggtgcccaccccagccccccggcccctgctgctgaagaagtctgtgtcctctgagaaccccacctaccccagcgcccccctgaagcctgtgacagtgcccccccggctggccggggccagccaggccaaggcctacaagagcctgggggagggccccccagccaacccccctgtgcctgtgctgcagagcaagcccctggtggacatcgacctgatcagctttgatgatgatgtgctgcccaccccatctggcaacctggccgaggagagcgtgggcagcgagatggtgctgggcctgcacgaggacccccagagccccccacccctgcctgctgagaagcccatcggcaacaccttcagcacagtgtctgggaagctgagcaatgtggagaggaccaggaacctggagagcaaccaccctggccagacaggaggctttgtgcgggtgcccccccggctgccccccaggcctgtgaatggcaagaccatccccacccagcagccccccaccaaggtgcccccagagaggcctcctccacccaagctgagcgccacccggcgcagcaacaagaagctgcccttcaacagaagcagcagtgacatggacctgcagaagaagcagagcaacctggccaccggcctgagcaaggccaagagccaggtgttcaagaaccaggaccctgtgctgcccccccggcccaagccaggccaccccctgtacagcaagtacatgagaggagatgtgctggtgatgctgaagcagacagagaacaactacctggagtgccagaagggggaggacaccggccgggtgcacctgagccagatgaagatcatcacccccctggatgagcacctgcggagccggcccaatgaccccagccacgcccagaagcctgtggacagcggggcccctcatgctgtggtgctgcatgacttccctgctgagcaggtggatgacctgaacctgaccagcggggagatcgtgtacctgctggagaagattgacacagactggtaccggggcaactgcaggaaccagatcggcatcttccctgccaactacgtgaaggtgatcatcgacatccctgagggcggcaatggcaagagagaatgtgtgagcagccactgtgtgaagggcagccgctgtgtggccaggtttgagtacatcggggagcagaaggatgagctgtccttcagcgagggggagatcatcatcctgaaggagtatgtgaatgaggagtgggcccggggggaggtgcggggccgcacaggcatcttccccctgaactttgtggagcctgtggaggactaccccaccagcggggccaacgtgctgagcaccaaggtgcccctgaagaccaagaaggaggacagcggcagcaacagccaggtgaacagcctgcctgctgagtggtgtgaggccctgcacagcttcaccgctgagaccagtgatgacctgtccttcaagagaggagaccgcatccagatcctggagcggctggacagcgactggtgccggggccgcctgcaggaccgggagggcatcttccctgctgtgtttgtgcggccctgcccagctgaggccaagtccatgctggccatcgtgcccaagggcaggaaggccaaggccctgtatgacttcagaggagaaaatgaagatgagctgtccttcaaggccggggacatcatcacagagctggagagcgtggatgatgactggatgtctggagagctgatgggcaagagcggcatcttccccaagaactacatccagttcctgcagatctcctag

SEQ ID NO: 46659 - DNA, 2196 bp, Artificial Sequence
  derived and/or modified sequence
atgaacatcatgaacaccgagcagagccagaacagcatcgtgagccggattaaggtgttcgaggggcagactaatatagagacaagcggattgcctaaaaaacctgaaattacaccacgctcacttcccccaaaacccacagtctcaagcggcaaaccaagcgtggctccaaaacctgcggcgaaccgcgccagtggggaatgggattcagggaccgagaatagactgaaggtgaccagcaaagaaggactgaccccttacccccccttgcaggaagccgggagtattccagtcacaaagcccgaattacccaagaaacccaacccaggacttattcggtccgtgaatcccgaaatcccaggccggggaccactcgctgaatcttccgacagcggaaagaaagtacctaccccagcgccgaggccacttcttctgaagaaatctgtgtccagcgagaatccgacatacccctcagcaccacttaaacctgtgactgtcccaccccgactggccggagcatcacaggcaaaggcttacaaatctctcggcgagggacccccggccaatcctcccgtgccagtactgcagagtaagccccttgtggatatcgatctaatcagcttcgacgacgatgtgctgccaactccctccggtaatcttgccgaagagtccgtgggttccgaaatggtgctgggactgcacgaggaccctcagagcccaccccctttgccagcagaaaagccaattggcaataccttcagcacagtgagcgggaaattgtccaacgttgagagaacacggaacctggagtccaaccatccaggacagactggcggattcgtccgcgtaccgcccaggctgccaccacgcccagtgaacggaaagactattcccactcagcagccccctacaaaagtgcctcccgagcggcccccccctcctaaactgagcgccacaagacgcagtaataagaaactcccattcaatagatctagctctgacatggaccttcagaaaaaacaatctaatcttgctaccggcctgtccaaagcaaagtcacaggtgtttaagaaccaggatcccgttctgcctccaagaccaaaacctggccaccccttgtattctaaatatatgagaggcgacgttctggtcatgctcaaacagactgagaacaactacctcgaatgtcaaaagggcgaggatacaggccgagtgcacctatcccagatgaagattataacacccctggatgagcacttgcggtccaggccaaatgatccaagccacgcccagaagccagttgatagtggcgctccccatgccgttgtgcttcacgactttcccgcggaacaagttgatgatctgaatctgacctctggagagattgtatatctgctggagaaaatcgatacagactggtacaggggaaactgtcgcaaccagattggaatctttcccgcgaactatgttaaggtgattatcgatatcccagaaggcggtaacggcaagcgcgagtgcgtttcttcccactgtgtaaaaggctctagatgcgtcgcacgctttgaatacattggggagcagaaggatgagctgtctttcagcgaaggggaaatcattatactgaaggagtacgttaacgaggagtgggcccggggcgaagtacggggtaggacgggaatctttccactgaactttgtggaaccggtcgaggattatccaaccagtggagctaatgtcctctccaccaaggttccattgaagacaaaaaaggaagacagcggctcgaatagtcaggtgaactctttgccagccgaatggtgcgaggccctgcactctttcacagcagagacgtcagatgatctgtctttcaagcgcggtgatcgtatacagattctggagcgtttggacagcgattggtgccgaggcagactgcaggatcgggaaggcattttccctgcagtatttgtaagaccctgccccgcagaagctaaatctatgctggcgatcgttccgaaaggcaggaaagctaaggctctgtacgactttagaggtgagaacgaggatgaactgagctttaaagccggagatattatcactgagttggagagtgtggatgacgactggatgagtggtgagctgatgggaaagagtggtatttttcccaagaactacattcaattcttgcagatatcttag

SEQ ID NO: 46660 - DNA, 2196 bp, Artificial Sequence
  derived and/or modified sequence
atgaacatcatgaacaccgagcagagccagaacagcatcgtgagccgcataaaagtgtttgagggacagacgaacatagaaacatccggactgccgaaaaaacctgaaattactccacgttcgcttcctcctaagcccactgtttcttcaggtaaaccttccgttgccccaaagcccgcagcaaatcgggccagcggagagtgggatagcggcacagagaatcgcttgaaagtaacttctaaagaggggctgaccccttatccacctctgcaggaggctgggtcaattcccgtgactaaacctgaactgcccaagaagcctaatcctggcctgatccggtccgtgaaccccgagattcctgggcgggggcctcttgccgagtccagcgactccggcaagaaggtgccgacccccgcaccacgccctttgctgctaaagaaaagtgtttcgagcgagaatccaacgtatcccagcgccccgctaaagcccgtgactgttccacccaggctcgctggagcctcacaggccaaggcctacaagtcattgggcgagggaccgcctgctaacccgccggtcccagtgttgcagtccaaacccctggtcgacatcgatctaatcagctttgacgacgatgtgcttccgacaccctctgggaaccttgctgaggagtcagtggggtctgaaatggtgctgggcttacacgaagatccacagtccccgcctcctttgcctgccgaaaagccgatcggcaacacattttccactgtgtcagggaagctgtctaacgtcgaacggacaagaaaccttgaaagtaatcaccctggacagacaggcggatttgtgcgggtccctccccgcttaccaccccggccagtcaacgggaagacgatccccactcaacagccgcctactaaggtgccaccagagcgccctccgccacccaaactgtctgctaccaggcgcagcaacaaaaaactacccttcaataggagttcatctgatatggacctccagaaaaagcagtccaacctcgcaacaggactttccaaagccaagtcccaggtgtttaagaatcaggacccagtgctccccccgcgcccgaaacctggacatccactttattctaaatacatgcgtggggacgtgctggtgatgctaaaacagaccgagaataactacctcgaatgccaaaagggtgaagataccgggcgagttcacctcagccagatgaaaataatcaccccactggatgagcacctgcgctcacgaccaaatgacccatctcatgctcagaaaccagtggactccggcgctccccacgcggtcgtgctccatgattttccagcagaacaggtcgacgatctcaacctcacctctggggagattgtttacctgttagaaaagattgataccgactggtaccgcggtaactgcagaaaccagatcggaatatttcccgcgaactacgtcaaggtcatcattgacatccccgagggcggcaacggaaaacgcgagtgtgttagttcgcattgcgttaaaggcagtcggtgtgtggctcggttcgagtatatcggagagcagaaagacgaattatccttcagcgaaggcgagattatcatcctgaaggaatacgtgaacgaggagtgggcccggggggaggtccgcgggcggactggcatctttcctctgaactttgttgagcccgtggaagactaccccacaagcggcgctaatgtgctatctacaaaagtgcccctgaagaccaaaaaggaggattccgggtcaaattctcaggttaactccctgcctgctgaatggtgcgaggctctacacagcttcacagccgagactagcgatgacctttcatttaagaggggggatcgaatccagatattggagaggctggattccgattggtgcagagggcgactacaggatagggaagggatctttccagccgtgttcgtgaggccctgtcccgcagaagcaaagtccatgctggccatcgtcccaaaaggtagaaaggcgaaggcactatatgattttcggggagagaacgaagatgaactcagttttaaagccggtgatattataaccgagcttgaaagtgtggatgatgattggatgtctggggaattgatgggtaagtctggcattttcccgaagaattatattcagttcctccagattagttag

SEQ ID NO: 46661 - DNA, 2196 bp, Artificial Sequence
  derived and/or modified sequence
atgaacattatgaatacagagcaaagccagaactcaattgtatctcgcattaaagtgttcgaggggcaaacaaatatagaaacttccggccttcctaagaaacccgagatcacacctaggagcttgccacccaaacctactgtttcatccgggaaaccatctgtagctcccaagcccgctgcaaacagggcctcaggagaatgggactccgggaccgaaaacaggttgaaggttacaagtaaggagggactgacgccataccctcccctccaggaagcaggaagcatcccagtcacaaaacccgaactgccaaagaaacctaatccaggacttatcagatctgtgaatccagagattccaggtagagggccactggccgagagttcagattcagggaaaaaagtccccacccccgcacctcgtcccctgctgctgaagaagtccgtgagcagcgagaatccaacctatccttcagctcctctgaaacccgtaacggtacctcctaggctggccggagcttcacaagctaaggcctataaaagccttggcgaggggcctcccgcaaacccccctgtgccagtgctccagtctaagccccttgtcgatatcgacttgatatcttttgatgacgatgtcctacctaccccaagtggtaacttagccgaggagagtgtaggtagcgaaatggtcctcggactgcacgaggacccacaaagcccaccacccctgcctgccgagaagcctattggcaacacatttagcacagtgtcaggcaagcttagcaatgtggagagaacgagaaacctcgagagcaaccacccaggccagactggcggttttgtgcgagtgccccctcggcttcccccacgacctgtgaacgggaagactatcccaacacaacaaccccctaccaaagtgcccccagagcgccctccccctccgaagctctccgcaacccggaggtctaacaagaagttaccctttaataggtcatcctccgacatggatctgcagaagaaacagtcaaacctggcgaccgggctatcaaaggccaagtcccaggtgttcaaaaaccaggaccctgtgttaccaccaaggcctaaaccaggccatccattatactcaaagtacatgcgaggggatgttctcgtcatgctgaagcagactgagaacaattatctggagtgtcagaaaggggaagacacaggcagggtgcacctctctcaaatgaagatcatcacgccgctggacgagcatctgcgcagtcggcctaacgatcccagtcatgcgcagaagcccgtggactcaggggctccccacgctgtcgtgctgcatgatttccctgcagaacaggtggatgacctcaatctgacttccggtgagatagtgtatctgctggagaaaatcgacacagactggtatcggggaaactgtaggaatcagattggcatctttcccgctaactacgtgaaagtcattatagatatccccgaaggcggaaatggtaaacgcgagtgcgtttctagtcattgtgtgaagggatcccgctgtgtggcaagattcgagtacatcggagagcaaaaagacgaactgagcttttccgaaggggagatcatcatcctgaaagagtacgtaaatgaggagtgggcccgaggtgaggttcggggacgaacaggaatctttccgctgaattttgtggagccggttgaggattatcctacatcaggggcaaatgtcctgagtactaaagtgccattaaagacaaagaaggaggattcaggaagcaactcacaggttaacagcttacctgcagaatggtgcgaggcactgcatagctttacagcagagacttcagatgacctgagtttcaaacggggagatcggatacagatcctggagagactggattccgactggtgtagaggaagactccaggaccgcgagggaatcttcccagccgtgttcgtcagaccctgtccagcggaggccaaatcaatgcttgcaatcgtgccaaagggacggaaagccaaagctctgtacgattttcgaggtgagaacgaggacgaactctcctttaaggctggcgacattatcactgaacttgagtctgtggacgacgattggatgtcaggagagctgatgggaaaatcaggaatttttcccaagaactacattcagtttctccagatatcctag

SEQ ID NO: 46662 - DNA, 2196 bp, Artificial Sequence
  derived and/or modified sequence
atgaatatcatgaatacagagcagagtcagaatagcatagttagtagaatcaaggtgtttgaggggcagacaaatattgaaacatctggtctgccgaagaagccggaaatcaccccccgttctcttcccccaaagcccaccgtgtcctctggaaaaccgtctgtggctccgaagccagcagcaaatagggccagcggcgaatgggactctgggacagagaatcgcctcaaggtcacttctaaggagggactgacgccgtaccctccgttgcaggaagcgggaagtataccagtcactaaaccggagttacctaagaagccaaatcctggtctcatcaggtcggtcaatccagaaattcctggaagggggccactggctgagagttcagacagtgggaagaaagtgcccactcccgctccaagaccgctgctcctaaaaaaaagcgtgtcaagtgaaaaccccacctacccttcggcgccactgaagcccgttacggtgcccccacgtctcgccggtgcctcccaggccaaagcttacaaaagcctgggcgaaggccctccggctaaccctcctgtcccagtgctgcagagcaaaccgctggtcgatattgacctcatcagcttcgacgacgacgtgcttcctacaccatctggcaacctggctgaggagagcgtgggatcggagatggtactcggactgcatgaggacccgcaatcacccccaccactgcctgccgaaaagcctattggtaacaccttctccaccgtttccgggaaactctccaatgtggagagaacacggaacctggagtccaatcacccaggccaaacaggcggattcgtccgggttcccccaaggttgcccccacgcccagtcaatggaaagaccatacctacacagcagccccctacaaaagtgccacccgagcgaccaccgcctccaaaattatcggccacaagacgaagtaataaaaagctcccattcaaccggagttcctctgacatggatctacagaagaagcaatcgaacttggccaccgggctgagcaaggccaaatctcaggtgtttaagaaccaggacccggtgcttcccccaaggccaaagcccggtcaccccctgtactccaagtacatgaggggggacgtgctggtaatgctgaagcagaccgagaataattaccttgagtgccaaaaaggcgaggacaccggtagagttcacctgagtcagatgaagatcatcactccactcgatgaacatttgagaagcagacccaacgatccctcccacgcccaaaaacctgtggactcaggtgcaccccatgctgtcgttctgcatgatttcccggctgaacaggttgacgacctgaacctgacttcaggtgagatcgtctatctactggagaaaatagacactgattggtacagagggaactgccggaaccagattggaattttccccgctaactacgtgaaagtcatcatcgatatcccggaggggggtaatggtaagcgcgaatgcgtgtcctcgcactgcgttaaaggttccagatgcgtcgccaggtttgaatatatcggtgagcagaaggacgagctgagcttttcggaaggagagattattatcctgaaagagtatgtcaacgaagagtgggcccgaggcgaggtcagaggacgtaccggcatcttcccactgaactttgttgaaccagtggaggattatccaacgtccggggctaacgtgttgagcacgaaagttcccctcaaaacaaaaaaggaggacagcggctccaatagtcaagtgaactcattgcccgctgagtggtgcgaggcacttcattctttcacagcagaaaccagcgacgatttgtctttcaaacgcggtgatagaatccaaatactcgagcgcctcgactccgactggtgtcgtgggagattacaggatcgggaggggatcttcccagccgtgttcgtacgcccttgtcccgcagaggccaagtctatgttggcaatcgttccgaagggtaggaaagccaaggccctatacgattttcgtggggaaaacgaggacgagctgtcctttaaggcgggtgatatcatcactgagctcgagagcgtggacgatgattggatgagtggagaactgatgggaaaaagtggcatatttcccaaaaattacatacaatttctacaaattagctag

SEQ ID NO: 46663 - DNA, 2196 bp, Artificial Sequence
  derived and/or modified sequence
atgaacatcatgaacaccgagcagagccagaacagcatcgtgagcagaatcaaggtgttcgagggccagaccaacatcgagaccagcggcctgcccaagaagcccgagatcacccccagaagcctgccccccaagcccaccgtgagcagcggcaagcccagcgtggcccccaagcccgccgccaacagagccagcggcgagtgggacagcggcaccgagaacagactgaaggtgaccagcaaggagggcctgaccccctacccccccctgcaggaggccggcagcatccccgtgaccaagcccgagctgcccaagaagcccaaccccggcctgatcagaagcgtgaaccccgagatccccggcagaggccccctggccgagagcagcgacagcggcaagaaggtgcccacccccgcccccagacccctgctgctgaagaagagcgtgagcagcgagaaccccacctaccccagcgcccccctgaagcccgtgaccgtgccccccagactggccggcgccagccaggccaaggcctacaagagcctgggcgagggcccccccgccaacccccccgtgcccgtgctgcagagcaagcccctggtggacatcgacctgatcagcttcgacgacgacgtgctgcccacccccagcggcaacctggccgaggagagcgtgggcagcgagatggtgctgggcctgcacgaggacccccagagccccccccccctgcccgccgagaagcccatcggcaacaccttcagcaccgtgagcggcaagctgagcaacgtggagagaaccagaaacctggagagcaaccaccccggccagaccggcggcttcgtgagagtgccccccagactgccccccagacccgtgaacggcaagaccatccccacccagcagccccccaccaaggtgccccccgagagaccccccccccccaagctgagcgccaccagaagaagcaacaagaagctgcccttcaacagaagcagcagcgacatggacctgcagaagaagcagagcaacctggccaccggcctgagcaaggccaagagccaggtgttcaagaaccaggaccccgtgctgccccccagacccaagcccggccaccccctgtacagcaagtacatgagaggcgacgtgctggtgatgctgaagcagaccgagaacaactacctggagtgccagaagggcgaggacaccggcagagtgcacctgagccagatgaagatcatcacccccctggacgagcacctgagaagcagacccaacgaccccagccacgcccagaagcccgtggacagcggcgccccccacgccgtggtgctgcacgacttccccgccgagcaggtggacgacctgaacctgaccagcggcgagatcgtgtacctgctggagaagatcgacaccgactggtacagaggcaactgcagaaaccagatcggcatcttccccgccaactacgtgaaggtgatcatcgacatccccgagggcggcaacggcaagagagagtgcgtgagcagccactgcgtgaagggcagcagatgcgtggccagattcgagtacatcggcgagcagaaggacgagctgagcttcagcgagggcgagatcatcatcctgaaggagtacgtgaacgaggagtgggccagaggcgaggtgagaggcagaaccggcatcttccccctgaacttcgtggagcccgtggaggactaccccaccagcggcgccaacgtgctgagcaccaaggtgcccctgaagaccaagaaggaggacagcggcagcaacagccaggtgaacagcctgcccgccgagtggtgcgaggccctgcacagcttcaccgccgagaccagcgacgacctgagcttcaagagaggcgacagaatccagatcctggagagactggacagcgactggtgcagaggcagactgcaggacagagagggcatcttccccgccgtgttcgtgagaccctgccccgccgaggccaagagcatgctggccatcgtgcccaagggcagaaaggccaaggccctgtacgacttcagaggcgagaacgaggacgagctgagcttcaaggccggcgacatcatcaccgagctggagagcgtggacgacgactggatgagcggcgagctgatgggcaagagcggcatcttccccaagaactacatccagttcctgcagatcagctag

SEQ ID NO: 46664 - protein, 431 aa, Artificial Sequence
  derived and/or modified sequence
MDPAVALVLCLSCLFLLSLWRQSSGRGRLPSGPTPLPIIGNILQLDVKDMSKSLTNFSKVYGPVFTVYFGLKPIVVLHGYEAVKEALIDHGEEFSGRGSFPVAEKVNKGLGILFSNGKRWKEIRRFCLMTLRNFGMGKRSIEDRVQEEARCLVEELRKTNASPCDPTFILGCAPCNVICSVIFHDRFDYKDQRFLNLMEKFNENLRILSSPWIQEKHNQQSEFTVESLIATVTDMFGAGTETTSTTLRYGLLLLLKYPEVTAKVQEEIECVVGRNRSPCMQDRSHMPYTDAVVHEIQRYIDLLPTNLPHAVTCDVKFKNYLIPKGTTIITSLTSVLHNDKEFPNPEMFDPGHFLDKSGNFKKSDYFMPFSAGKRMCMGEGLARMELFLFLTTILQNFNLKSQVDPKDIDITPIANAFGRVPPLYQLCFIPV

SEQ ID NO: 46665 - DNA, 1296 bp, Artificial Sequence
  derived and/or modified sequence
atggaccccgccgtggccctggtgctgtgcctgagctgcctgttcctgctgagcctgtggagacagagcagcggcagaggcagactgcccagcggccccacccccctgcccatcatcggcaacatcctgcagctggacgtgaaggacatgagcaagagcctgaccaacttcagcaaggtgtacggccccgtgttcaccgtgtacttcggcctgaagcccatcgtggtgctgcacggctacgaggccgtgaaggaggccctgatcgaccacggcgaggagttcagcggcagaggcagcttccccgtggccgagaaggtgaacaagggcctgggcatcctgttcagcaacggcaagagatggaaggagatcagaagattctgcctgatgaccctgagaaacttcggcatgggcaagagaagcatcgaggacagagtgcaggaggaggccagatgcctggtggaggagctgagaaagaccaacgccagcccctgcgaccccaccttcatcctgggctgcgccccctgcaacgtgatctgcagcgtgatcttccacgacagattcgactacaaggaccagagattcctgaacctgatggagaagttcaacgagaacctgagaatcctgagcagcccctggatccaggagaagcacaaccagcagagcgagttcaccgtggagagcctgatcgccaccgtgaccgacatgttcggcgccggcaccgagaccaccagcaccaccctgagatacggcctgctgctgctgctgaagtaccccgaggtgaccgccaaggtgcaggaggagatcgagtgcgtggtgggcagaaacagaagcccctgcatgcaggacagaagccacatgccctacaccgacgccgtggtgcacgagatccagagatacatcgacctgctgcccaccaacctgccccacgccgtgacctgcgacgtgaagttcaagaactacctgatccccaagggcaccaccatcatcaccagcctgaccagcgtgctgcacaacgacaaggagttccccaaccccgagatgttcgaccccggccacttcctggacaagagcggcaacttcaagaagagcgactacttcatgcccttcagcgccggcaagagaatgtgcatgggcgagggcctggccagaatggagctgttcctgttcctgaccaccatcctgcagaacttcaacctgaagagccaggtggaccccaaggacatcgacatcacccccatcgccaacgccttcggcagagtgccccccctgtaccagctgtgcttcatccccgtgtag

SEQ ID NO: 46666 - DNA, 2366 bp, Artificial Sequence
  derived and/or modified sequence
gagatcttgccattgcactccagcctgggcaacaagagcgaaactccatctcaaggaaaaacaacaacaacaacaacaaaatcctgggctctgcttcagactagttaaaccagaatctccagggtggggcaccggaaagaacaagaaaaaagaacaccttatttttatcttcttcagtgagccaatgttcattcaaaagagagattaaagtgctttttgctgactagtcacagtcagagtcagaatcacaggtggattagtagggagtgttataaaagccttgaagtgaaagcccgcagttgtcttactaagaagagaagccttcaatggatccagctgtggctctggtgctctgtctctcctgtttgtttctcctttcactctggaggcagagctctggaagagggaggctcccgtctggccccactcctctcccgattattggaaatatcctgcagttagatgttaaggacatgagcaaatccttaaccaatttctcaaaagtctatggccctgtgttcactgtgtattttggcctgaagcccattgtggtgttgcatggatatgaagcagtgaaggaggccctgattgatcatggagaggagttttctggaagaggaagttttccagtggctgaaaaagttaacaaaggacttggaatccttttcagcaatggaaagagatggaaggagatccggcgtttctgcctcatgactctgcggaattttgggatggggaagaggagcatcgaggaccgtgttcaagaggaagcccgctgccttgtggaggagttgagaaaaaccaatgcctcaccctgtgatcccactttcatcctgggctgtgctccctgcaatgtgatctgctctgttattttccatgatcgatttgattataaagatcagaggtttcttaacttgatggaaaaattcaatgaaaacctcaggattctgagctctccatggatccaggaaaagcacaatcaacagtctgaatttactgttgaaagcttgatagccactgtaactgatatgtttggggctggaacagagacaacgagcaccactctgagatatggactcctgctcctgctgaagtacccagaggtcacagctaaagtccaggaagagattgaatgtgtagttggcagaaaccggagcccctgtatgcaggacaggagtcacatgccctacacagatgctgtggtgcacgagatccagagatacattgacctcctccccaccaacctgccccatgcagtgacctgtgatgttaaattcaaaaactacctcatccccaagggcacgaccataataacatccctgacttctgtgctgcacaatgacaaagaattccccaacccagagatgtttgaccctggccactttctggataagagtggcaactttaagaaaagtgactacttcatgcctttctcagcaggaaaacggatgtgtatgggagagggcctggcccgcatggagctgtttttattcctgaccaccattttgcagaactttaacctgaaatctcaggttgacccaaaggatattgacatcacccccattgccaatgcatttggtcgtgtgccacccttgtaccagctctgcttcattcctgtctgaagaagggcagatagtttggctgctcctgtgctgtcacctgcaattctcccttatcagggccattggcctctcccttctctctgtgagggatattttctctgacttgtcaatccacatcttcccattccctcaagatccaatgaacatccaacctccattaaagagagtttcttgggtcacttcctaaatatatctgctattctccatactctgtatcacttgtattgaccaccacatatgctaatacctatctactgctgagttgtcagtatgttatcactagaaaacaaagaaaaatgattaataaatgacaattcagagccatttattctctgcatgctctagataaaaatgattattatttactgggtcagttcttagatttctttcttttgagtaaaatgaaagtaagaaatgaaagaaaatagaatgtgaagaggctgtgctggccctcatagtgttaagcacaaaaagggagaaaggtaagagggtaggaaagctgttttagctaaatgccacctagagttattggaggtctgaatttggaaaaaaaaactatgtccaggagcagctgtaacctgtagggaaatactggaacaatcatccataagagggatgaacattaagtgtttgaattcatgctctgcttttgtgttactgtaaacacaagatcaagatttggataatctttttcctttgtgtttccaacttagatcatgtctaaatatatgctttcatatggct

SEQ ID NO: 46667 - DNA, 1296 bp, Artificial Sequence
  derived and/or modified sequence
atggaccccgcggtggcactcgtgctgtgcttaagctgcctgttcctgctgtcactgtggcggcaaagctccggcagggggagactccctagcggacctacccctctcccaatcatcgggaatattctgcagctcgacgtgaaggatatgagtaagagcctcacaaacttctctaaggtctatgggcccgttttcactgtgtatttcggcctgaaacccattgtggtcctccacggttatgaagctgtgaaggaagcattgatcgatcatggcgaagagttcagtggacggggctcatttcccgtggccgagaaggtcaacaagggccttggaatcttgttctcgaatggtaaaaggtggaaagagatccggaggttctgtctgatgactctccgcaattttggaatgggaaaacgaagtattgaagatagagtccaagaggaagcccggtgccttgtggaggagctgcgcaaaacaaacgccagtccatgtgatccaactttcatcctcgggtgcgccccctgtaacgtgatctgctcagttatttttcatgacaggttcgactataaagaccagcggttccttaatctcatggagaagtttaacgaaaatctccgcatcctatctagtccctggatccaagaaaaacacaatcagcaatccgaatttacagtcgagtcacttatcgcgaccgtcacggatatgtttggtgccggcaccgaaacgacctcaactacactcaggtacgggctattacttcttctcaagtatcccgaagtgacggcaaaagtacaggaggagattgaatgcgtggtcgggcggaaccgcagcccatgtatgcaggatcgtagccacatgccttacacagatgcggtagttcacgagattcagagatacatcgacctcctgccaacaaatttgccccacgcagtgacatgtgacgtgaaattcaagaattaccttatcccaaaagggactaccatcatcacgagcctgaccagcgtgcttcataatgacaaggaatttcccaatcctgagatgtttgacccagggcacttcctggataagtccgggaatttcaaaaaatcagactacttcatgcctttcagcgcgggtaagcgcatgtgtatgggagaagggctggcccgcatggagctgttccttttcctcaccaccatccttcagaattttaatctcaagtcccaggtggacccaaaggacatcgatatcacaccgatcgcaaatgctttcggcagggtgcccccgctttatcagctctgtttcatcccagtgtag

SEQ ID NO: 46668 - DNA, 1296 bp, Artificial Sequence
  derived and/or modified sequence
atggaccctgctgtggccctggtgctgtgcctgagctgcctcttcctgctgagcctgtggaggcagagcagcggccggggccgcctgcccagcggccccacccccctgcccatcatcggcaacatcctgcagctggatgtgaaggacatgagcaagagcctgaccaacttcagcaaggtgtatggccctgtgttcaccgtgtacttcggcctgaagcccatcgtggtgctgcacggctatgaggccgtgaaggaggccctgattgaccacggggaggagttcagcggccggggcagcttccctgtggccgagaaggtgaacaagggcctgggcatcctcttcagcaatggcaagcgctggaaggagatccgccgcttctgcctgatgaccctgaggaactttggcatgggcaagaggagcattgaggacagagtgcaggaggaggcccgctgcctggtggaggagctgaggaagaccaatgccagcccctgtgaccccaccttcatcctgggctgtgccccctgcaacgtcatctgcagcgtcatcttccatgacagatttgactacaaggaccagcgcttcctgaacctgatggagaagttcaatgaaaacctgcgcatcctgagcagcccctggatccaggagaagcacaaccagcagagcgagttcaccgtggagagcctgattgccaccgtgacagacatgtttggagctggaacagagaccaccagcaccaccctgcgctatggcctgctgctgctgctgaagtacccagaggtgacagccaaggtgcaggaggagattgaatgtgtggtgggcaggaacagaagcccctgcatgcaggacaggagccacatgccctacacagatgctgtggtgcatgagatccagcgctacatcgacctgctgcccaccaacctgccccatgctgtgacctgtgatgtgaagttcaagaactacctgatccccaagggcaccaccatcatcaccagcctgacctctgtgctgcacaatgacaaggagttccccaaccctgagatgtttgaccccggccacttcctggacaagagcggcaacttcaagaagagtgactacttcatgcccttctctgctgggaagaggatgtgcatgggagagggcctggccaggatggagctgttcctgttcctgaccaccatcctgcagaacttcaacctgaagagccaggtggaccccaaggacatcgacatcacccccatcgccaatgccttcggccgggtgccccccctgtaccagctgtgcttcatccctgtgtag

SEQ ID NO: 46669 - DNA, 1296 bp, Artificial Sequence
  derived and/or modified sequence
atggaccccgccgtggccctggtgctgtgcctgagctgcctgttcctgctcagcctgtggcgccaatcttctggccgcggacgactcccttctggccccacaccattgcctattataggcaacatcttgcaactggacgtgaaagatatgtcgaaatccctcactaactttagtaaggtctacggccctgtgtttacagtctatttcggtctcaaaccaatagtggtgctgcacggatacgaagctgtgaaggaggcactgatagaccatggagaagaattctcaggtcggggctcattcccagtggctgagaaagttaataagggccttggcatcttgttcagtaacgggaaacgatggaaagagatccgcaggttttgcctgatgacattgagaaatttcggtatgggaaagcggagcattgaggatcgagttcaggaggaagcgcgttgtcttgttgaggagctccggaagaccaatgcaagtccgtgcgatcctactttcatcctagggtgtgccccttgcaacgttatttgctctgtgattttccatgataggtttgactacaaggaccaacgcttcctgaacctcatggaaaaatttaatgagaatctgcgcattctcagcagtccttggattcaggagaagcacaatcaacaatcagagtttacagttgaatctctgatagccacagtgaccgacatgtttggcgctggcacagagacaacctcgaccacacttcgatatggtttacttctgctcctgaaatatcccgaagtcacggcaaaagtccaggaggagatcgagtgcgttgttgggcggaaccggtcaccctgcatgcaggacaggtcacatatgccctacaccgatgccgtggtccatgagatacagagatacattgatctgttgccaacaaacttgccccatgctgtgacctgtgatgtgaagtttaagaattatttgatcccaaaaggcaccacaatcattactagcctgacaagtgtgttacataatgacaaggaattcccaaacccagaaatgttcgaccccggacattttctggataagtcaggcaacttcaaaaaatccgattattttatgccattctcggcaggaaagcggatgtgcatgggtgaaggcctggctagaatggagttgtttctatttcttacaacaatcctccagaactttaacctcaagtcccaggtcgaccccaaggacattgacattaccccaatagctaacgcatttgggcgtgttccaccactttaccagctgtgcttcatcccagtgtag

SEQ ID NO: 46670 - DNA, 1296 bp, Artificial Sequence
  derived and/or modified sequence
atggatcccgcagtggcattggtactttgcctaagctgtctgttcttgctgagcctgtggaggcagagctccgggaggggtcggctgccttcgggcccaaccccgctaccaataatcggcaacattctgcagctggacgtgaaagatatgagtaaatcactaactaatttctccaaagtgtacggaccagtatttacggtctatttcggcctgaaaccaatagtggtccttcacggatacgaggccgtgaaggaagccctcatagatcatggggaggaattttcagggagagggagcttccctgtggccgaaaaagtaaataagggcctcgggatacttttttccaacggcaagcgctggaaggagatccgacgattttgcctgatgacgcttagaaattttggcatgggaaaaagaagcattgaagaccgggtgcaagaggaagctcgatgccttgtcgaagagctgagaaaaacgaacgccagcccatgcgacccaaccttcatcctcggatgtgctccatgtaatgtcatctgctcagtgatttttcatgacaggttcgattacaaggatcaacgattcttgaacttgatggagaaattcaatgagaatctgcggatcctctccagcccctggatccaagagaagcacaaccagcagagcgagttcactgtggaatcacttatcgcaacagtgacagatatgttcggagccggtaccgagactacaagtaccacgctccgatacggactccttctactgctcaagtatcctgaggtcactgcgaaagtacaagaggagattgaatgtgtagttggcagaaaccggagtccatgcatgcaggataggagtcatatgccgtacactgacgccgttgtgcatgagattcagaggtacattgacctgctgcccaccaacctgccccatgctgtgacgtgcgatgttaagttcaaaaactatctcatcccaaaaggtacaactattattactagcctcacttctgtcttacacaacgataaagagtttccgaaccccgagatgtttgacccaggtcactttctggataaatcagggaacttcaagaagagcgactactttatgcctttttctgctggtaagagaatgtgcatgggagaggggcttgcgagaatggaactgttcctgtttttgacgacaatactgcagaactttaatctaaaaagtcaggttgaccctaaagacattgatatcacccccattgcaaacgctttcggtcgcgtccctcccttataccagctgtgctttatacctgtctag

SEQ ID NO: 46671 - protein, 300 aa, Artificial Sequence
  derived and/or modified sequence
MSKIRGLPPEVREPGPGVELGVENGLLCQLIHSPEFNLFSNSVVFESNFIQVTKPGNWRDVCEGSATVILGVTSSVPSLPLPNVLLMANVTWPQGPFTTWSTPGDAPVINLSRLLPLKYVELRIYDRLQRILRVRTVTEKIYYLKLHEKHPEIVFQFWVRLVKILQKGLSITTKDPRIKFTHCLVPKMPTNSTETTPENSLLSSPQPSEPLVLLAAEQTSGSFSQLSGKPQLTADRNNDTAIEIDNCSSYKIPSPVASPINLNIPMRAALSHSLWEQEDWNEHLLQVHIASYLGEHFLGA

SEQ ID NO: 46672 - DNA, 903 bp, Artificial Sequence
  derived and/or modified sequence
atgagcaagatcagaggcctgccccccgaggtgagagagcccggccccggcgtggagctgggcgtggagaacggcctgctgtgccagctgatccacagccccgagttcaacctgttcagcaacagcgtggtgttcgagagcaacttcatccaggtgaccaagcccggcaactggagagacgtgtgcgagggcagcgccaccgtgatcctgggcgtgaccagcagcgtgcccagcctgcccctgcccaacgtgctgctgatggccaacgtgacctggccccagggccccttcaccacctggagcacccccggcgacgcccccgtgatcaacctgagcagactgctgcccctgaagtacgtggagctgagaatctacgacagactgcagagaatcctgagagtgagaaccgtgaccgagaagatctactacctgaagctgcacgagaagcaccccgagatcgtgttccagttctgggtgagactggtgaagatcctgcagaagggcctgagcatcaccaccaaggaccccagaatcaagttcacccactgcctggtgcccaagatgcccaccaacagcaccgagaccacccccgagaacagcctgctgagcagcccccagcccagcgagcccctggtgctgctggccgccgagcagaccagcggcagcttcagccagctgagcggcaagccccagctgaccgccgacagaaacaacgacaccgccatcgagatcgacaactgcagcagctacaagatccccagccccgtggccagccccatcaacctgaacatccccatgagagccgccctgagccacagcctgtgggagcaggaggactggaacgagcacctgctgcaggtgcacatcgccagctacctgggcgagcacttcctgggcgcctag

SEQ ID NO: 46673 - DNA, 903 bp, Artificial Sequence
  derived and/or modified sequence
atgtccaagatcagaggcctgcctccagaggtgcgggagccaggtcccggcgtggaactcggagttgaaaacggcctgctgtgtcagctgattcacagcccagaatttaatctgttttcaaactcagtggtgtttgaatcaaattttatccaggttacaaagcctggaaactggagggatgtatgcgagggatccgctacagtaatcttaggggttacaagcagtgtgcctagcctccccctgccaaatgtcttactgatggccaacgtaacatggccccagggccccttcaccacttggagcacccccggtgatgctccagtgataaatttaagcaggctgctgcccttgaagtacgtcgagttgaggatttacgaccggctgcagcgcatcctgcgtgtacgaacagtcacggaaaagatctactaccttaaactacatgaaaaacatcccgaaattgtatttcaattttgggtgaggctggtgaaaatccttcagaagggtcttagtatcactaccaaggacccccgtattaagttcactcactgcctagtccccaagatgcccacaaattctaccgagactactcccgaaaactccttgctgagcagtccgcagccaagcgagcctctggtcctgttggcggctgagcagacttctggatctttttcgcagctctccggaaaacctcagctgacggccgataggaacaatgataccgctattgaaatcgacaattgctcctcttataagatcccaagtcctgtggcaagtccgattaacctgaacataccaatgcgagccgcactcagccactccctttgggagcaagaggattggaatgaacatctcctgcaggtgcacattgctagttacttgggcgagcactttctgggagcgtag

SEQ ID NO: 46674 - DNA, 903 bp, Artificial Sequence
  derived and/or modified sequence
atgtctaaaattaggggcctgccccccgaggtgcgcgaaccaggaccgggagtggagctaggagtggaaaatggattgctctgtcagctgatccactctcccgagttcaatctctttagcaactcagtggtttttgagtcgaactttatccaggtgactaaacctggtaactggagagacgtttgtgaggggagtgcaaccgttattttgggagtgacctcatcagtcccctctctgccactaccaaatgtgcttctgatggccaacgtaacttggccccagggcccattcaccacctggagcactcctggcgatgcccccgtgataaatctgtcccgtttactcccacttaaatacgtggagttaagaatctatgatagactccagcgcatcctacgggtgcgaaccgtgaccgagaagatttattacttaaaactccacgagaaacaccccgagatcgtatttcagttttgggtgaggctcgtgaagattttacagaaaggtctgagtatcacaacaaaagacccccgtatcaagtttactcattgtctggtgcctaagatgcctacaaattctaccgagaccacccccgagaatagcctgctgagttctcctcagcccagtgagcccctggtactgttagctgctgaacagacgtctgggagcttctcccagttgagtggcaaaccccagttgactgccgacaggaataatgacactgctatagaaatcgataactgttccagttataagattccgtctcccgtggcgagtccgatcaacttaaacatacctatgcgcgctgcattgtctcatagcctgtgggaacaggaggattggaacgaacacttactgcaggtccatatcgcatcatacttgggtgaacatttccttggcgcttag

SEQ ID NO: 46675 - DNA, 903 bp, Artificial Sequence
  derived and/or modified sequence
atgagcaagatcaggggactgcctcctgaggtgcgtgagcccggtcccggggtggagctgggtgtcgagaatggactgctttgccaacttatccattctcccgaatttaatttgttctcgaactcagtcgtttttgaatctaattttattcaggtaacaaagccagggaactggcgggacgtgtgtgagggctcagctacggtgattctgggtgttacgtcctctgtgccgtccctacccctgccaaacgtcttactgatggccaacgtcacttggccacagggtccattcacaacttggagcactcccggcgatgctccagtcattaacctgtcaaggctgttgcctctgaaatacgtcgaactacgcatttacgacaggttgcagcggatcctgcgggttcgtaccgtcacagaaaagatatactacctgaaactgcatgagaaacacccagagattgtcttccagttttgggtgagactcgttaagatcctccaaaagggactgtcaatcaccactaaggacccacggatcaagtttacccattgtctcgtccctaaaatgccgaccaatagcaccgagacaactcccgagaactcgctgctgtcaagccctcagccttcagaaccactggtactgcttgcagccgagcagacatctgggagcttcagtcagctgtctgggaaaccacagctcactgcagacagaaacaacgacactgccatcgaaattgataattgttcatcctataaaatcccaagccctgtagcctccccaattaatttgaacatccctatgcgggctgcccttagccactccctctgggaacaggaggattggaacgaacaccttctgcaggtgcatatagcatcttatttgggcgaacactttttaggcgcatag

SEQ ID NO: 46676 - DNA, 1105 bp, Artificial Sequence
  derived and/or modified sequence
aggaaatgctggggaggtgggggcagatcacatcaacatcctggcattgggctgggtcggcgtggagccccagaaatgttcccaagcccattcttaccaagaaccaatgagtaaaatcaggggcctcccacctgaggtcagggaaccaggccctggagtggaacttggggtggaaaatggccttctttgtcaactgattcattctccagaattcaatttgttctccaactcggtggtgtttgaaagcaactttatccaggtcactaagcccgggaactggagagatgtctgtgaagggtctgccaccgtgatcctcggggtcacctcctcggtgccctccctgccactccccaatgtcctcctgatggccaatgttacctggccccagggtccatttaccacctggagcacacctggtgacgccccagtcatcaacctcagcaggcttctccccctgaagtacgtggagctacgaatctacgaccggctccagcgcatcctgagggttaggacagtgaccgaaaagatctactatctgaagctccacgaaaaacacccagagattgtgtttcaattctgggtccgcttggtgaaaattctgcagaaaggcctgtccatcaccaccaaagacccgagaatcaaattcactcactgcctggtgcccaagatgcccaccaactccacagaaacaacacctgaaaacagcctcctgtcatccccccagcccagcgagcccctcgtgctgctggcggctgagcagaccagtggcagtttctcacagctctcaggaaagccccagctcacagcagacaggaacaatgacactgccattgaaatagacaactgcagcagctacaagataccctctccagtggcatctccaatcaatttgaatatacccatgagagctgccttgagccacagcctctgggaacaagaggactggaatgagcaccttctacaagttcatatagccagttacctaggagagcacttcttgggagcctgacacctaggcaaaacatgctcttccttgcatacgtgtacttgctaccacctcttataatgctccttttccactgtgagccaagtgaccttgggagag

SEQ ID NO: 46677 - DNA, 1582 bp, Artificial Sequence
  derived and/or modified sequence
ggaaatgctggggaggtgggggcagatcacatcaacatcctggcattgggctgggtcggcgtggagccccagaaatgttcccaagcccattcttaccaagaaccaatgagtaaaatcaggggcctcccacctgaggtcagggaaccaggccctggagtggaacttggggtggaaaatggccttctttgtcaactgattcattctccagaattcaatttgttctccaactcggtggtgtttgaaagcaactttatccaggtcactaagcccgggaactggagagatgtctgtgaagggtctgccaccgtgatcctcggggtcacctcctcggtgccctccctgccactccccaatgtcctcctgatggccaatgttacctggccccagggtccatttaccacctggagcacacctggtgacgccccagtcatcaacctcagcaggcttctccccctgaagtacgtggagctacgaatctacgaccggctccagcgcatcctgagggttaggacagtgaccgaaaagatctactatctgaagctccacgaaaaacacccagagattgtgtttcaattctgggtccgcttggtgaaaattctgcagaaaggcctgtccatcaccaccaaagacccgagaatcaaattcactcactgcctggtgcccaagatgcccaccaactccacagaaacaacacctgaaaacagcctcctgtcatccccccagcccagcgagcccctcgtgctgctggcggctgagcagaccagtggcagtttctcacagctctcaggaaagccccagctcacagcagacaggaacaatgacactgccattgaaatagacaactgcagcagctacaagataccctctccagtggcatctccaatcaatttgaatatacccatgagagctgccttgagccacagcctctgggaacaagaggactggaatgagcaccttctacaagttcatatagccagttacctaggagagcacttcttgggagcctgacacctaggcaaaacatgctcttccttgcatacgtgtacttgctaccacctcttataatgctccttttccactgtgagccaagtgaccttgggagaggtaagatggtgtttccaacaaggtgcttctctacttccaccaataaacttccaagctgtacaggaagcatgactggggaggcctcaggaaacttacaatcaaggcagaaggcaaaagagaagcagacctgtcctacgagtctggagcaggagaaagaaagaagtgggaggtgctatgcacttttaaacaaccaaatctcgtgagaactcactatcatgagaacagcaaggaggaaatccacccccatgatccaatcacctcccaccaggcacctcctccaacactggggattaaattcaacatgagatttgggcagggagacagatccaaatcatatatcagtctgctcagttgaaaccacacaatagccaagcaaagccaagaaagccagtccaaggctggcttggaaagggcctctgaggagaaatcaactttcaaaggggcagggggaaatagaggttgagctactgcaagccca

SEQ ID NO: 46678 - DNA, 1529 bp, Artificial Sequence
  derived and/or modified sequence
aggaaatgctggggaggtgggggcagatcacatcaacatcctggcattgggctgggtcggcgtggagccccagaaatgttcccaagcccattcttaccaagaaccaatgagtaaaatcaggggcctcccacctgaggtcagggaaccaggccctggagtggaacttggggtggaaaatggccttctttgtcaactgattcattctccagaattcaatttgttctccaactcggtggtgtttgaaagcaactttatccaggtcactaagcccgggaactggagagatgtctgtgaagggtctgccaccgtgatcctcggggtcacctcctcggtgccctccctgccactccccaatgtcctcctgatggccaatgttacctggccccagggtccatttaccacctggagcacacctggtgacgccccagtcatcaacctcagcaggcttctccccctgaagtacgtggagctacgaatctacgaccggctccagcgcatcctgagggttaggacagtgaccgaaaagatctactatctgaagctccacgaaaaacacccagagattgtgtttcaattctgggtccgcttggtgaaaattctgcagaaaggcctgtccatcaccaccaaagacccgagaatcaaattcactcactgcctggtgcccaagatgcccaccaactccacagaaacaacacctgaaaacagcctcctgtcatccccccagcccagcgagcccctcgtgctgctggcggctgagcagaccagtggcagtttctcacagctctcaggaaagccccagctcacagcagacaggaacaatgacactgccattgaaatagacaactgcagcagctacaagataccctctccagtggcatctccaatcaatttgaatatacccatgagagctgccttgagccacagcctctgggaacaagaggactggaatgagcaccttctacaagttcatatagccagttacctaggagagcacttcttgggagcctgacacctaggcaaaacatgctcttccttgcatacgtgtacttgctaccacctcttataatgctccttttccactgtgagccaagtgaccttgggagaggctgtacaggaagcatgactggggaggcctcaggaaacttacaatcaaggcagaaggcaaaagagaagcagacctgtcctacgagtctggagcaggagaaagaaagaagtgggaggtgctatgcacttttaaacaaccaaatctcgtgagaactcactatcatgagaacagcaaggaggaaatccacccccatgatccaatcacctcccaccaggcacctcctccaacactggggattaaattcaacatgagatttgggcagggagacagatccaaatcatatatcagtctgctcagttgaaaccacacaatagccaagcaaagccaagaaagccagtccaaggctggcttggaaagggcctctgaggagaaatcaactttcaaaggggcagggggaaatagaggttgagctactgcaagccca

SEQ ID NO: 46679 - DNA, 903 bp, Artificial Sequence
  derived and/or modified sequence
atgagcaagatccggggcctgcccccagaggtgcgggagcccggccctggggtggagctgggcgtggagaatggcctgctgtgccagctgatccacagccctgagttcaacctcttcagcaacagcgtggtgtttgagagcaacttcatccaggtgaccaagccaggcaactggagagatgtgtgtgagggcagcgccaccgtcatcctgggcgtgaccagctctgtgcccagcctgcccctgcccaacgtgctgctgatggccaacgtgacctggccccagggccccttcaccacctggagcaccccaggagatgcccctgtgatcaacctgagccggctgctgcccctgaagtatgtggagctgcgcatctatgaccggctgcagaggatcctgcgggtgaggacagtgacagagaagatctactacctgaagctgcacgagaagcaccctgagatcgtgttccagttctgggtgcggctggtgaagatcctgcagaagggcctgagcatcaccaccaaggacccccgcatcaagttcacccactgcctggtgcccaagatgcccaccaacagcacagagaccaccccagagaacagcctgctgagcagcccccagcccagcgagcccctggtgctgctggccgctgagcagaccagcggcagcttcagccagctgagcggcaagccccagctgacagctgacaggaacaatgacacagccatcgagattgacaactgcagcagctacaagatccccagccctgtggccagccccatcaacctgaacatccccatgagagctgccctgagccacagcctgtgggagcaggaggactggaatgagcacctgctgcaggtgcacatcgccagctacctgggggagcacttcctgggcgcctag

SEQ ID NO: 46680 - DNA, 903 bp, Artificial Sequence
  derived and/or modified sequence
atgagcaagatccggggcctgccccccgaggtgcgggagcccggcccaggtgttgagctgggggtggaaaatggcctcctctgtcaactgattcatagccccgagttcaacctcttctcaaatagcgttgtcttcgagagcaactttatccaggtgacaaagcctggaaattggagagacgtgtgtgaggggtctgcaaccgtgattctgggcgtgactagcagcgtacctagtttgccactgcccaatgtgctgcttatggccaacgtaacttggccccagggaccttttacaacctggtccaccccgggagatgcgcccgtgatcaatctgtctagattgctgcccctaaaatatgtcgaactcagaatttacgacaggcttcagagaatactgagggtcaggactgtgaccgaaaagatttactatctgaaactgcatgagaagcatccagaaattgtctttcaattttgggtccggctggtcaaaatcctgcagaaaggtctgtctattacaaccaaggatccgcgcatcaaattcactcattgccttgttcctaagatgcccaccaacagcacagagaccacacctgagaatagcctgctgagttccccacaacccagtgaacctcttgtcctgctagccgccgaacagacgagcggcagcttctcccagcttagtggcaaaccacaactcactgccgataggaataatgatacagcgattgagattgacaattgtagctcatataagatcccatccccggtggccagtccaatcaacctcaatatccctatgcgggcagcgctttcccactctttgtgggagcaagaagactggaacgaacacctgttacaggtgcacattgcctcctatctgggggagcattttctgggagcttag

SEQ ID NO: 46681 - DNA, 903 bp, Artificial Sequence
  derived and/or modified sequence
atgagcaagatccggggcctgccccccgaggtgcgggagcccggcccaggcgtggaattgggcgtagaaaacgggctgctttgtcaactgatccatagccccgaatttaacctgttttcaaattctgtcgtcttcgagtcgaacttcatccaggtcaccaaacctgggaattggagagacgtgtgtgagggctccgccaccgtcatactcggggtgacttccagtgtcccctctttgcccctgcccaatgtgctgctgatggcaaacgttacttggccacagggaccgtttactacatggtcaaccccaggtgatgcaccagtcataaatctttcccggcttctgccgctgaaatacgtcgagctacgaatctacgaccgcttgcagagaatcctgagggtgcgaacggtgactgaaaaaatctattacctgaagctgcacgagaagcaccccgagatcgtgttccagttctgggtccggctggtcaagatcttacaaaaaggcttaagtataactacaaaagacccgcgcattaagttcacgcactgtctggtgccgaagatgccaaccaatagcaccgaaactactcccgagaacagcttgctgagcagtccccaaccgagtgaacctcttgtgctcctggccgctgagcaaacctccggttctttttctcaactctctggcaagccccaactgactgctgacagaaataatgataccgctattgaaatcgataattgctcttcttataagattccaagcccagtggcctctcccattaatctgaacatccctatgagggccgctctgtctcattctctgtgggagcaagaagactggaacgaacaccttttacaggtacatatagcctcatacctcggggaacactttctgggggcttag

SEQ ID NO: 46682 - DNA, 903 bp, Artificial Sequence
  derived and/or modified sequence
atgagcaagatccggggcctgccccccgaggtgcgggagcccggcccgggggtcgaactgggcgttgagaatgggctcctgtgtcaactgatccacagcccagagtttaacctgtttagtaactccgtggttttcgagtcaaatttcatccaggtaaccaaacccggaaactggcgggacgtatgcgagggatctgccactgtcatactcggggtcacctctagcgtgcccagtctgcctctgccgaatgtgctgctgatggccaatgtgacttggccacagggaccctttacaacatggtcaacaccgggcgacgcccccgtgatcaacttaagccggttactgcctctcaaatatgtggagttgagaatatacgacagactgcaaagaatccttagagtgcggactgtgaccgagaaaatatactacctgaaactacatgagaagcacccagagatagtgtttcagttttgggtccggctcgtcaaaattctgcaaaaaggcctgtcaatcactacaaaggatccacggatcaaattcacccattgtctcgtgccaaagatgccgactaatagcaccgagaccacccccgaaaactccctcctttcttcgccacagcccagcgaacctttagtgcttcttgcagccgagcagacgagcggaagtttcagccagcttagtgggaagcctcagcttactgctgaccgtaacaacgatactgccattgaaattgacaactgcagctcatacaagatcccatcgcctgtcgcctccccaattaacctgaatatccccatgcgcgcagctctaagtcattctctgtgggagcaggaagattggaatgaacatctcttgcaggtacacattgcctcctacctaggtgagcactttctgggcgcttag

SEQ ID NO: 46683 - DNA, 903 bp, Artificial Sequence
  derived and/or modified sequence
atgtccaaaatcagaggtctgccacctgaagtgcgcgaaccaggacctggcgttgaactcggggtcgagaacgggctcctttgtcagctgatccatagcccagagttcaacctcttctcaaactctgttgtctttgagagcaatttcatccaagttacaaagcccggaaactggcgggacgtttgtgagggatctgctaccgtcattttaggtgttacctcctctgtcccctcactccctctcccaaatgtgctcctgatggccaatgtgacttggccgcagggcccattcactacctggagcactccgggtgacgcgcctgtcatcaatctgagcaggctcttgcccttgaaatatgtggagcttagaatctatgacaggctccagcggattctgcgagtgaggaccgtcactgagaagatttactacttgaagttgcatgagaagcacccagagatcgtttttcagttttgggtacggctggttaagatcttacaaaaaggcctgagtattactacgaaagaccccaggataaaatttacccattgcctggtcccaaagatgcctacaaacagcacagaaaccacgccagagaactcactcctgtcatcccctcagccttccgagcctttggtactcttagctgctgaacagacttccgggagcttctcacagctatccgggaaaccccagttgacagcggaccgcaacaatgacacagccatcgagatcgacaactgttcgagttataaaatcccttcgcctgtggccagccctattaatctgaacataccgatgcgcgcagccctctcacactccctgtgggagcaggaggattggaacgaacatctgctgcaagtgcacatcgcgtcttatctcggtgagcattttctgggagcgtag

SEQ ID NO: 46684 - DNA, 903 bp, Artificial Sequence
  derived and/or modified sequence
atgtcaaagattcgaggccttcctcctgaggtacgagagcccggtccaggggtagaattaggggtggagaacggtttgctatgccagctgatccattcacccgaatttaacctattttctaatagcgtggtcttcgagtcaaactttatccaggtcaccaagccaggcaactggcgcgatgtatgtgagggatccgcgaccgtaatcctcggagtgacatctagcgtcccatcactcccgcttcccaacgtactgctaatggccaatgtgacttggccccaggggcctttcaccacctggtcaacaccgggagacgcccctgtgatcaacctgtctcgtcttctgcctttgaaatatgtggaactgagaatatacgacaggctccaacggatcctgagggtgcgaactgtcacagaaaagatttactacctgaaattgcacgaaaagcaccctgagattgtgttccagttctgggtgaggctggttaagattttgcagaaagggctgagcatcactacaaaagaccctagaattaaattcacacactgtctcgtgccaaagatgccaaccaacagcaccgaaacaactcccgagaactcacttctgtcaagcccacagccatcagagcctttggtgttgttagccgctgagcaaacatcggggtccttcagccaactgtcaggcaaaccccagttgacggcagaccgcaacaatgacaccgcaatcgaaatcgataactgctcctcttataaaataccgtcccccgttgcgtctcccataaacctcaacattcctatgcgcgctgctttatcacacagtttgtgggagcaggaagattggaatgaacaccttctgcaggtgcacatcgcatcctacctaggagaacattttctcggcgcatag

SEQ ID NO: 46685 - DNA, 903 bp, Artificial Sequence
  derived and/or modified sequence
atgagtaagatccggggactgccgcctgaggttcgggagcccggacccggagtggagttaggagttgaaaatggactcctgtgccagctgatccattcaccagagttcaatctcttcagcaactctgtagtattcgagtcaaattttattcaggtaacgaaacctggcaattggagggatgtttgcgaggggagtgccactgtgattctgggtgtgaccagctcggtgcccagcctgcctctccccaatgtactcctcatggcaaatgtgacctggccacagggtccctttaccacttggagcacacccggagacgccccagtgatcaatctgagccggctcctcccattgaagtacgttgaacttaggatctatgatcggttacagcgaatcctgagagttcggaccgtgacagaaaagatctactacctgaaactgcatgaaaaacaccctgagatagttttccagttttgggtgcgattggtaaagattctccagaaggggctgtctatcaccacaaaggacccccgtatcaagttcacccactgtcttgtgccaaagatgcctaccaactctacagaaaccacacctgaaaacagcctcttgagctctcctcagccttcagagccccttgtcctcctcgccgcagagcagacaagcggaagctttagccaactatccggaaaaccccagttgactgcagataggaacaatgacaccgcaattgaaattgataattgctcgagctacaaaatcccttctcccgtagcttccccaattaacttaaacatcccaatgagagctgctctgtcccattctttgtgggaacaggaagattggaacgaacatctgttacaggttcatatcgcttcctatctaggagaacacttcctgggagcctag

SEQ ID NO: 46686 - protein, 399 aa, Artificial Sequence
  derived and/or modified sequence
MSDILRELLCVSEKAANIARACRQQEALFQLLIEEKKEGEKNKKFAVDFKTLADVLVQEVIKQNMENKFPGLEKNIFGEESNEFTNDWGEKITLRLCSTEEETAELLSKVLNGNKVASEALARVVHQDVAFTDPTLDSTEINVPQDILGIWVDPIDSTYQYIKGSADIKSNQGIFPCGLQCVTILIGVYDIQTGVPLMGVINQPFVSRDPNTLRWKGQCYWGLSYMGTNMHSLQLTISRRNGSETHTGNTGSEAAFSPSFSAVISTSEKETIKAALSRVCGDRIFGAAGAGYKSLCVVQGLVDIYIFSEDTTFKWDSCAAHAILRAMGGGIVDLKECLERNPETGLDLPQLVYHVENEGAAGVDRWANKGGLIAYRSRKRLETFLSLLVQNLAPAETHT

SEQ ID NO: 46687 - protein, 155 aa, Artificial Sequence
  derived and/or modified sequence
MSDILRELLCVSEKAANIARACRQQEALFQLLIEEKKEGEKNKKFAVDFKTLADVLVQEVIKQNMENKFPGLEKNIFGEESNEFTNDWGEKITLRLCSTEEETAELLSKVLNGNKVASEALARVVHQDVAFTDPTLDSTEINVPQDILGIWVDPI

SEQ ID NO: 46688 - protein, 88 aa, Artificial Sequence
  derived and/or modified sequence
MSDILRELLCVSEKAANIARACRQQEALFQLLIEEKKEGEKNKKFAVDFKTLADVLVQEVIKQNMENKFPGLEKNIFGEESNEFTNDW

SEQ ID NO: 46689 - protein, 212 aa, Artificial Sequence
  derived and/or modified sequence
MSDILRELLCVSEKAANIARACRQQEALFQLLIEEKKEGEKNKKFAVDFKTLADVLVQEVIKQNMENKFPGLEKNIFGEESNEFTNDWGEKITLRLCSTEEETAELLSKVLNGNKVASEALARVVHQDVAFTDPTLDSTEINVPQDILGIWVDPIDSTYQYIKGSADIKSNQGIFPCGLQCVTILIGVYDIQTGVPLMGVINQPFVSRDPNT

SEQ ID NO: 46690 - protein, 213 aa, Artificial Sequence
  derived and/or modified sequence
MSDILRELLCVSEKAANIARACRQQEALFQLLIEEKKEGEKNKKFAVDFKTLADVLVQEVIKQNMENKFPGLEKNIFGEESNEFTNDWGEKITLRLCSTEEETAELLSKVLNGNKVASEALARVVHQDVAFTDPTLDSTEINVPQDILGIWVDPIDSTYQYIKGSADIKSNQGIFPCGLQCVTILIGVYDIQTGVPLMGVINQPFVSRDPNTL

SEQ ID NO: 46691 - protein, 190 aa, Artificial Sequence
  derived and/or modified sequence
MSDILRELLCVSEKAANIARACRQQEALFQLLIEEKKEGEKNKKFAVDFKTLADVLVQEVIKQNMENKFPGLEKNIFGEESNEFTNDWGEKITLRLCSTEEETAELLSKVLNGNKVASEALARVVHQDVAFTDPTLDSTEINVPQDILGIWVDPIDSTYQYIKGSADIKSNQGIFPCGLQCVTILIGVYD

SEQ ID NO: 46692 - protein, 30 aa, Artificial Sequence
  derived and/or modified sequence
MSDILRELLCVSEKAANIARACRQQEALFQ

SEQ ID NO: 46693 - protein, 68 aa, Artificial Sequence
  derived and/or modified sequence
MSDILRELLCVSEKAANIARACRQQEALFQLLIEEKKEGEKNKKFAVDFKTLADVLVQEVIKQNMENK

SEQ ID NO: 46694 - protein, 143 aa, Artificial Sequence
  derived and/or modified sequence
MSDILRELLCVSEKAANIARACRQQEALFQLLIEEKKEGEKNKKFAVDFKTLADVLVQEVIKQNMENKFPGLEKNIFGEESNEFTNDWGEKITLRLCSTEEETAELLSKVLNGNKVASEALARVVHQDVAFTDPTLDSTEINV

SEQ ID NO: 46695 - DNA, 1200 bp, Artificial Sequence
  derived and/or modified sequence
atgagcgatattcttcgcgagctgctgtgtgttagcgaaaaagcggccaacattgccagagcctgtcggcagcaggaagcactctttcagttgctgattgaagagaaaaaggaaggagaaaagaataaaaagttcgctgtcgactttaaaacgcttgccgacgtcctcgtccaggaggtgataaaacagaatatggagaataaattcccgggcctggagaagaacatctttggggaagagagtaatgaatttaccaatgactggggggaaaagataaccctgcgcctctgctcaactgaggaggagaccgccgagctgctcagcaaggtgctaaacggtaataaagtcgcctccgaggccctggcaagagtggttcaccaggatgtcgccttcaccgatccaaccctcgattctacggaaataaatgtcccgcaagatatcttgggaatttgggtcgaccccattgattccacttaccagtacatcaaaggaagtgccgacattaagagcaatcagggcatctttccttgtggattgcagtgcgtaaccatcctaatcggagtgtacgatatacagaccggagtgccgcttatgggagtcatcaatcagccattcgtgtcaagggaccctaacacactacggtggaagggccaatgttattggggactgtcttatatgggaacaaacatgcatagtcttcagttaacgattagccgaagaaatggctcagagactcacactggaaacaccggcagcgaggccgctttttcgcccagcttctctgctgtgatctctacgtccgaaaaagagacaatcaaagctgcgttaagtagagtctgtggggacagaatctttggagcagctggggcaggctacaaatctctttgtgtcgtccagggactagtggatatctacatatttagcgaagacacaactttcaagtgggattcttgtgcagcccacgccatcctgcgcgccatgggtggcggcatagtcgatctgaaggaatgtctcgagcggaacccagagaccgggctggacttgcctcagctcgtgtatcatgtcgagaatgagggcgcggcgggggtggatcggtgggccaataaaggcggcctgatcgcatatagaagtcggaagcgattagagacattcctcagcctgctggtgcaaaacttggcgcctgcagaaactcacacatag

SEQ ID NO: 46696 - DNA, 1200 bp, Artificial Sequence
  derived and/or modified sequence
atgagcgacatcctaagagagttgctgtgcgtttccgaaaaggctgcaaatattgcaagagcatgcagacaacaggaggccctttttcaactgcttatagaagagaaaaaagagggagagaaaaacaaaaaatttgccgtggatttcaagaccctggctgacgtcctggtgcaagaagtgattaagcagaacatggaaaacaaatttccaggactagagaaaaacatcttcggagaagagtcaaacgaatttaccaatgactggggagagaaaattactttgagactatgttccaccgaggaggagacggccgagctgctctcaaaagtgttgaatggaaacaaagtggctagcgaagctttggcaagagtagtccaccaggatgtagccttcacggaccccactctcgactctacagaaatcaatgtgccccaagacatacttggcatctgggtggaccctatcgattccacttatcaatacatcaagggaagcgcagacatcaagtctaatcaaggcattttcccatgtggacttcagtgcgtaacgattctcataggtgtgtatgacatacaaaccggggtgccattgatgggtgtgattaaccaaccttttgtgtctagggacccgaatactcttcggtggaagggacagtgttactggggcctgtcatacatgggcacaaatatgcatagtctccagctgacgattagcaggagaaacggatctgaaacacacacagggaatacagggtctgaggcagctttttccccgagtttttccgctgttatttctacaagtgaaaaagagaccattaaagccgctctgtctagagtctgcggtgaccggatcttcggcgctgccggcgcgggttataaaagcctctgtgtggtccaggggttggtggacatctatattttttcggaggacaccacctttaaatgggacagttgcgctgcacatgctattctcagagcgatgggaggcggaattgtcgacctgaaagaatgcctggagcggaaccctgaaacaggcctggatttgccccagctcgtgtaccacgttgaaaatgaaggcgcagctggagtagatcgttgggcaaacaagggcggcttgatcgcttacagatcacgaaagcgattagaaacattcctctctcttctagtgcagaacctggcacccgctgagacacacacttag

SEQ ID NO: 46697 - DNA, 468 bp, Artificial Sequence
  derived and/or modified sequence
atgtccgatatcctgcgcgaactgctctgtgtctccgaaaaggcagctaatatagctcgtgcttgccggcagcaggaagctctctttcagttacttatcgaggagaaaaaggaaggagaaaagaacaagaaattcgcagtagattttaaaaccctcgcggacgtgctggtgcaggaagtaattaagcaaaacatggagaataagtttcctgggttggaaaaaaacattttcggggaagagtccaacgagttcactaatgattggggagaaaagattaccctgcgcctgtgtagcactgaagaagagactgcagaactccttagtaaagttctgaacggaaacaaggtcgcctcagaagccttggctagagtggttcaccaggacgtggccttcacggatccaacccttgactctaccgagattaacgttccccaggacattctcggtatctgggtggatccaatttag

SEQ ID NO: 46698 - DNA, 267 bp, Artificial Sequence
  derived and/or modified sequence
atgtccgatattctcagggagcttctgtgtgtgtccgaaaaagcagccaacatcgccagggcctgcaggcaacaggaagcccttttccagctgctgatcgaagaaaaaaaagaaggagagaagaataaaaagtttgccgtggacttcaagaccctggctgatgtgcttgtacaggaggtgattaagcagaacatggaaaataagttcccgggcctcgaaaagaacatattcggtgaagagagcaacgaattcaccaacgattggtag

SEQ ID NO: 46699 - DNA, 639 bp, Artificial Sequence
  derived and/or modified sequence
atgagcgatatcttgcgcgaactgctatgtgtgagcgagaaagccgcaaatatagctcgtgcgtgccggcagcaggaagccctgttccagcttctcatcgaagagaagaaggagggcgaaaagaacaaaaaatttgccgttgatttcaaaacactcgctgacgtgctggtccaggaggtgatcaagcagaacatggagaacaagtttcccggcctcgagaagaacatcttcggggaggagagcaatgagtttaccaatgattggggcgaaaagataactcttagactgtgctcgacggaggaggaaacagcagagctgctctctaaggtcctaaatgggaacaaggtcgcatcagaagccctggcccgagtagttcatcaggatgtcgcattcactgatccaaccctagatagcacggagatcaacgtgccccaggatattcttggaatatgggttgacccaattgatagcacctaccaatacataaaagggtccgcggatatcaaaagcaaccagggcatctttccgtgcggccttcagtgcgtcactatactgattggtgtgtatgatatccaaaccggagttccactgatgggggttatcaaccaaccatttgttagtcgagatcctaatacttag

SEQ ID NO: 46700 - DNA, 642 bp, Artificial Sequence
  derived and/or modified sequence
atgtctgatatactcagggaactgctgtgcgtttcagaaaaggccgcaaacatcgctcgtgcatgccgacaacaagaagcgttatttcagctcctgatcgaggagaaaaaagaaggtgagaagaacaaaaagttcgcagtcgatttcaagacactcgcagacgtcctggtccaggaagtgatcaaacaaaacatggagaataagtttcctgggttggagaaaaacattttcggagaggaatcaaacgaattcacaaatgactggggagaaaagattaccttacggctgtgcagcacagaagaggaaacagccgaactgttaagcaaggttcttaatggaaataaagtggccagcgaggctctggcccgagtcgtacatcaagacgtggcttttacggaccccactctcgactcgactgaaattaatgtgccccaggacattttaggtatctgggtggatcccattgactctacttatcagtatattaaagggtccgctgatatcaaatctaatcagggaatattcccctgcgggctccaatgtgtgactatccttatcggggtatacgatatacagaccggagtgccgctgatgggggttattaatcagcccttcgtttccagagacccaaataccctgtag

SEQ ID NO: 46701 - DNA, 573 bp, Artificial Sequence
  derived and/or modified sequence
atgagtgacatcctacgagaactgctgtgcgtatctgagaaggccgcaaacatcgcccgcgcctgtcgccaacaggaggccctgtttcagcttctgattgaagagaaaaaggaaggggagaagaacaagaagttcgctgtcgacttcaaaaccctggctgacgtgctggtgcaggaggtgataaagcagaacatggagaataaattcccaggtctcgaaaaaaatatattcggcgaggagtccaatgaattcacaaacgactggggtgaaaaaatcaccctgagactatgctctactgaggaggagacagcagagcttctcagcaaagtgctgaatggcaataaagtggccagcgaagccctggccagagtggtgcatcaggatgttgccttcaccgatccaacactggacagcactgaaattaatgttcctcaggatattttggggatctgggtagatccaatagactcgacttaccagtatattaaaggatctgccgacatcaagagcaatcaaggcatcttcccatgcggactgcaatgcgtcactattctgattggggtttacgactag

SEQ ID NO: 46702 - DNA, 93 bp, Artificial Sequence
  derived and/or modified sequence
atgagcgatatcctgagagagcttctctgcgtgagtgagaaggctgcaaacatcgccagagcttgcagacagcaggaagctctgtttcagtag

SEQ ID NO: 46703 - DNA, 207 bp, Artificial Sequence
  derived and/or modified sequence
atgtcagatatcctcagagagcttctgtgcgtgagcgagaaggccgccaatatcgcacgagcttgccggcagcaagaggcattgtttcaactcctgattgaggaaaaaaaagagggagagaagaacaaaaagttcgccgttgattttaagaccttggcagacgttttagtgcaagaagtgattaaacaaaatatggaaaataagtag

SEQ ID NO: 46704 - DNA, 432 bp, Artificial Sequence
  derived and/or modified sequence
atgagcgatattctgcgggagctgctctgtgtctctgaaaaagccgccaacatcgccagagcctgccggcagcaagaagccctcttccagcttttaatcgaggagaaaaaggagggcgaaaaaaacaagaagtttgccgtggattttaaaacattggccgacgtgttggtgcaggaggtgattaaacagaatatggaaaacaaatttcctgggcttgaaaagaacatcttcggggaagaaagtaatgaattcactaacgattggggagagaagattacactgcgtttatgctccacagaggaagagaccgccgagctgctatccaaggtgctgaacggaaacaaagtcgctagtgaagctttggcccgcgtggtgcatcaagatgtggcctttactgaccccaccctcgactctaccgagataaatgtttag

SEQ ID NO: 46705 - DNA, 1200 bp, Artificial Sequence
  derived and/or modified sequence
atgtcagacattctacgcgagctgctgtgtgtctccgaaaaggctgccaacatcgcccgggcctgcagacagcaggaggcactattccaacttctgattgaggaaaagaaggagggggaaaaaaataaaaaatttgccgttgacttcaagaccctggcagatgttttagtacaggaagtcatcaagcaaaacatggagaacaagtttccaggcctcgaaaagaacatttttggcgaagaatccaacgagtttacaaatgactggggcgaaaagatcacccttaggctctgctcaaccgaagaagagacggccgaactgctgagtaaagtgttgaatggcaacaaggttgcttcagaggcgctggctagagttgtgcaccaggacgttgcctttacggaccctactcttgattccactgagatcaacgtacctcaagacatcctgggaatttgggtagaccctattgacagcacttaccagtacatcaaggggagcgccgatattaaatccaaccaaggaatcttcccatgcgggctgcaatgtgtgactatcctcatcggggtatatgacattcagacaggtgtcccgttgatgggcgtgatcaatcagccctttgtctcaagggatcctaatactctgcgttggaagggacagtgttattggggattatcttatatgggaacaaatatgcattccctgcagctcacaatttcccggcggaacggcagtgagacccataccggtaataccggaagtgaagctgccttttctccctcgttttccgccgtgattagtacaagcgaaaaagagaccattaaagctgctctctctcgcgtttgtggtgacaggatttttggtgcggccggagcgggctacaaatctctctgcgtagttcaagggcttgtcgatatttatatatttagcgaagacactacctttaagtgggattcttgtgctgcccatgccatcctcagggctatgggaggtggtatcgtcgacctgaaggagtgcctggagcggaacccagagacggggctggatcttcctcaactcgtgtaccacgttgagaatgagggggcagctggggtggatcgttgggcaaataagggcggactgatcgcttaccgcagcagaaaacgcctggaaacgtttttgtctctgcttgtacagaacctggcaccggctgaaacgcatacttag

SEQ ID NO: 46706 - DNA, 1919 bp, Artificial Sequence
  derived and/or modified sequence
ctctgaatcatcgcgctccacttgtgacgtcgcggacgcccggctcgggcaggcgtggggggcccgcgcgtcccgggagccccgaggcggcagcgcgcgtttccacgccgcggtcccgcgggaaagccgggggcggcggcctggctgaggccaagctcggatccggtgccgagccaagcggggccgtgcgtcgccggggcttcgccttcgctcgcgtgacctccgccgtcctccccaaccctcgtcctctggccgcgcctgcggccgcacgcccagcgcccctcgcctaacctcgcgcccgggccgcgcctcctcctcctcctgctccccgccgcttccgtttctcgagggaaaggctgctgcctcctgctctgtcctcatccccggcttagctgacggcccagagggtgggtgccaattccaccagcagctgcaactgaaaagcaaggttcagaaatgtcagatatcctccgggagctgctctgtgtctctgagaaggctgctaacattgcccgggcgtgcagacagcaggaagccctcttccagctgctgatcgaagaaaagaaagagggagaaaagaacaagaagtttgcagttgacttcaagacgctggctgatgtactggtacaggaagttataaaacagaatatggagaacaagtttccaggcttggaaaaaaatatttttggagaagaatccaatgagtttactaatgactggggggaaaagattaccttgaggttgtgttcaacagaggaggaaacagcagagcttcttagcaaagtcctcaatggtaacaaggtggcatctgaagcattagccagggttgttcatcaggatgttgcctttactgacccaactctggattccacagagatcaatgttccacaggacattttgggaatttgggtggaccccatagattcaacttatcagtatataaaaggttctgctgacattaaatccaaccagggaatcttcccctgtggacttcagtgtgtcaccattttaattggtgtctatgacatacagacaggggttcccctgatgggagtcatcaatcaaccttttgtgtcacgagatccaaacaccctcaggtggaaaggacagtgctattggggcctttcttacatggggaccaacatgcattcactacagctcaccatctctagaagaaacggcagtgaaacacacactggaaacaccggctctgaggcagcattctcccccagtttttcagccgtaattagtacaagtgaaaaggagactatcaaagctgcattgtcacgtgtgtgtggagatcgcatatttggggcagctggggctggttataagagcctatgtgttgtccaaggcctcgttgacatttacatcttttcagaagataccacattcaaatgggactcttgtgctgctcatgccatactgagggccatgggtgggggaatagtagacttgaaagaatgcttagaaagaaatccagaaacagggcttgatttgccacagttggtgtaccacgtggaaaatgagggtgctgctggggtggatcggtgggccaacaagggaggactcattgcatacagatccaggaagcggctggagacattcctgagcctcctggtccaaaacctggcacctgcagagacgcatacctagaggaactctaaccccggtgtacctgtataaactgaactgtgaaactgtttcggttatctctgtcttttgaggatggctttgtcctgttgctggttaacattcaccttcctcttttgaggagtatttttccattatgtattcataataatgttaatttcaataaatgacattcatgcagcaattatattggtgtatgaaattcttacagtgaatattgtgctgttagtgctgcttgaaacatttcaataaaatattgaccagga

SEQ ID NO: 46707 - DNA, 2162 bp, Artificial Sequence
  derived and/or modified sequence
gaatggaggaggaagatttaaaagtgaattcgtgggcggcgacaaggaaacagcagccgtggccaagctgaccccagagcccttcccttcctggccctccctctgaatcatcgcgctccacttgtgacgtcgcggacgcccggctcgggcaggcgtggggggcccgcgcgtcccgggagccccgaggcggcagcgcgcgtttccacgccgcggtcccgcgggaaagccgggggcggcggcctggctgaggccaagctcggatccggtgccgagccaagcggggccgtgcgtcgccggggcttcgccttcgctcgcgtgacctccgccgtcctccccaaccctcgtcctctggccgcgcctgcggccgcacgcccagcgcccctcgcctaacctcgcgcccgggccgcgcctcctcctcctcctgctccccgccgcttccgtttctcgagggaaaggctgctgcctcctgctctgtcctcatccccggcttagtccttcagagcttacatcatgtggccgagtttatatacctgattggcaaaacagagcctaagaaccagctctcctgtatcccaagcaaggctctttctaccgcacaccctgcaggcccatccaggcccatccagacaataaacactgacggcccagagggtgggtgccaattccaccagcagctgcaactgaaaagcaaggttcagaaatgtcagatatcctccgggagctgctctgtgtctctgagaaggctgctaacattgcccgggcgtgcagacagcaggaagccctcttccagctgctgatcgaagaaaagaaagagggagaaaagaacaagaagtttgcagttgacttcaagacgctggctgatgtactggtacaggaagttataaaacagaatatggagaacaagtttccaggcttggaaaaaaatatttttggagaagaatccaatgagtttactaatgactggggggaaaagattaccttgaggttgtgttcaacagaggaggaaacagcagagcttcttagcaaagtcctcaatggtaacaaggtggcatctgaagcattagccagggttgttcatcaggatgttgcctttactgacccaactctggattccacagagatcaatgttccacaggacattttgggaatttgggtggaccccatagattcaacttatcagtatataaaaggttctgctgacattaaatccaaccagggaatcttcccctgtggacttcagtgtgtcaccattttaattggtgtctatgacatacagacaggggttcccctgatgggagtcatcaatcaaccttttgtgtcacgagatccaaacaccctcaggtggaaaggacagtgctattggggcctttcttacatggggaccaacatgcattcactacagctcaccatctctagaagaaacggcagtgaaacacacactggaaacaccggctctgaggcagcattctcccccagtttttcagccgtaattagtacaagtgaaaaggagactatcaaagctgcattgtcacgtgtgtgtggagatcgcatatttggggcagctggggctggttataagagcctatgtgttgtccaaggcctcgttgacatttacatcttttcagaagataccacattcaaatgggactcttgtgctgctcatgccatactgagggccatgggtgggggaatagtagacttgaaagaatgcttagaaagaaatccagaaacagggcttgatttgccacagttggtgtaccacgtggaaaatgagggtgctgctggggtggatcggtgggccaacaagggaggactcattgcatacagatccaggaagcggctggagacattcctgagcctcctggtccaaaacctggcacctgcagagacgcatacctagaggaactctaaccccggtgtacctgtataaactgaactgtgaaactgtttcggttatctctgtcttttgaggatggctttgtcctgttgctggttaacattcaccttcctcttttgaggagtatttttccattatgtattcataataatgttaatttcaataaatgacattcatgcagcaattatattggtgtatgaaattcttacagtgaatattgtgctgttagtgctgcttgaaacatttcaataaaatattgaccagg

SEQ ID NO: 46708 - DNA, 631 bp, Artificial Sequence
  derived and/or modified sequence
agattactgcagcatttgtgctgaaactcaccagggttaaattgatgagctttctgcgtgaaagaagggagtggtggtgatttccggagcttgtagccaggctgacggcccagagggtgggtgccaattccaccagcagctgcaactgaaaagcaaggttcagaaatgtcagatatcctccgggagctgctctgtgtctctgagaaggctgctaacattgcccgggcgtgcagacagcaggaagccctcttccagctgctgatcgaagaaaagaaagagggagaaaagaacaagaagtttgcagttgacttcaagacgctggctgatgtactggtacaggaagttataaaacagaatatggagaacaagtttccaggcttggaaaaaaatatttttggagaagaatccaatgagtttactaatgactggggggaaaagattaccttgaggttgtgttcaacagaggaggaaacagcagagcttcttagcaaagtcctcaatggtaacaaggtggcatctgaagcattagccagggttgttcatcaggatgttgcctttactgacccaactctggattccacagagatcaatgttccacaggacattttgggaatttgggtggaccccatag

SEQ ID NO: 46709 - DNA, 613 bp, Artificial Sequence
  derived and/or modified sequence
gcgcctcctcctcctcctgctccccgccgcttccgtttctcgagggaaaggctgctgcctcctgctctgtcctcatccccggcttagtccttcagagcttacatcatgtggccgagtttatatacctgattggcaaaacagagcctaagaaccagctctcctgtatcccaagcaaggctctttctaccgcacaccctgcaggcccatccaggcccatccagacaataaacaggtgaaagaaagcactacttcaatattgctgctaagcatatgatcattctaagctgacggcccagagggtgggtgccaattccaccagcagctgcaactgaaaagcaaggttcagaaatgtcagatatcctccgggagctgctctgtgtctctgagaaggctgctaacattgcccgggcgtgcagacagcaggaagccctcttccagctgctgatcgaagaaaagaaagagggagaaaagaacaagaagtttgcagttgacttcaagacgctggctgatgtactggtacaggaagttataaaacagaatatggagaacaagtttccaggcttggaaaaaaatatttttggagaagaatccaatgagtttactaatgactggg

SEQ ID NO: 46710 - DNA, 840 bp, Artificial Sequence
  derived and/or modified sequence
gtgagtcgatggcgccgggagggttcctcgcctctgcgcgccggcctgcgaggtccctgccccggcagcgaggccgcccccggccgggcccggccaggcatgcccggcatcgccgctgcagccagcgcggaggggagctcctgacggcccagagggtgggtgccaattccaccagcagctgcaactgaaaagcaaggttcagaaatgtcagatatcctccgggagctgctctgtgtctctgagaaggctgctaacattgcccgggcgtgcagacagcaggaagccctcttccagctgctgatcgaagaaaagaaagagggagaaaagaacaagaagtttgcagttgacttcaagacgctggctgatgtactggtacaggaagttataaaacagaatatggagaacaagtttccaggcttggaaaaaaatatttttggagaagaatccaatgagtttactaatgactggggggaaaagattaccttgaggttgtgttcaacagaggaggaaacagcagagcttcttagcaaagtcctcaatggtaacaaggtggcatctgaagcattagccagggttgttcatcaggatgttgcctttactgacccaactctggattccacagagatcaatgttccacaggacattttgggaatttgggtggaccccatagattcaacttatcagtatataaaaggttctgctgacattaaatccaaccagggaatcttcccctgtggacttcagtgtgtcaccattttaattggtgtctatgacatacagacaggggttcccctgatgggagtcatcaatcaaccttttgtgtcacgagatccaaacacc

SEQ ID NO: 46711 - DNA, 812 bp, Artificial Sequence
  derived and/or modified sequence
cgtttctcgagggaaaggctgctgcctcctgctctgtcctcatccccggcttagggtgaaagaaagcactacttcaatattgctgctaagcatatgatcattctaagctgacggcccagagggtgggtgccaattccaccagcagctgcaactgaaaagcaaggttcagaaatgtcagatatcctccgggagctgctctgtgtctctgagaaggctgctaacattgcccgggcgtgcagacagcaggaagccctcttccagctgctgatcgaagaaaagaaagagggagaaaagaacaagaagtttgcagttgacttcaagacgctggctgatgtactggtacaggaagttataaaacagaatatggagaacaagtttccaggcttggaaaaaaatatttttggagaagaatccaatgagtttactaatgactggggggaaaagattaccttgaggttgtgttcaacagaggaggaaacagcagagcttcttagcaaagtcctcaatggtaacaaggtggcatctgaagcattagccagggttgttcatcaggatgttgcctttactgacccaactctggattccacagagatcaatgttccacaggacattttgggaatttgggtggaccccatagattcaacttatcagtatataaaaggttctgctgacattaaatccaaccagggaatcttcccctgtggacttcagtgtgtcaccattttaattggtgtctatgacatacagacaggggttcccctgatgggagtcatcaatcaaccttttgtgtcacgagatccaaacaccctcag

SEQ ID NO: 46712 - DNA, 797 bp, Artificial Sequence
  derived and/or modified sequence
gggaaaggctgctgcctcctgctctgtcctcatccccggcttaggtaacacgttttcctccttacgacacccaccacagggtccccgcgccgctgcccctcctccttggatctggggcccgggctggtgagcggcgcgcgccgtcgcctctccgcgggtagctgacggcccagagggtgggtgccaattccaccagcagctgcaactgaaaagcaaggttcagaaatgtcagatatcctccgggagctgctctgtgtctctgagaaggctgctaacattgcccgggcgtgcagacagcaggaagccctcttccagctgctgatcgaagaaaagaaagagggagaaaagaacaagaagtttgcagttgacttcaagacgctggctgatgtactggtacaggaagttataaaacagaatatggagaacaagtttccaggcttggaaaaaaatatttttggagaagaatccaatgagtttactaatgactggggggaaaagattaccttgaggttgtgttcaacagaggaggaaacagcagagcttcttagcaaagtcctcaatggtaacaaggtggcatctgaagcattagccagggttgttcatcaggatgttgcctttactgacccaactctggattccacagagatcaatgttccacaggacattttgggaatttgggtggaccccatagattcaacttatcagtatataaaaggttctgctgacattaaatccaaccagggaatcttcccctgtggacttcagtgtgtcaccattttaattggtgtctatgacat

SEQ ID NO: 46713 - DNA, 425 bp, Artificial Sequence
  derived and/or modified sequence
gggcccggccaggcatgcccggcatcgccgctgcagccagcgcggaggggagctcaaattgcttaaaagataattatgttatataaagtgatcaatgaaaacaaacgtcatcttcattttttaaagtccttcagagcttacatcatgtggccgagtttatatacctgattggcaaaacagagcctaagaaccagctctcctgtatcccaagcaaggctctttctaccgcacaccctgcaggcccatccaggcccatccagacaataaacactgacggcccagagggtgggtgccaattccaccagcagctgcaactgaaaagcaaggttcagaaatgtcagatatcctccgggagctgctctgtgtctctgagaaggctgctaacattgcccgggcgtgcagacagcaggaagccctcttccagc

SEQ ID NO: 46714 - DNA, 541 bp, Artificial Sequence
  derived and/or modified sequence
gctgaaactcaccagggttaaattgatgagctttctgcgtgaaagaagggagtggtggtgatttccggagcttgtagccagggtgattagctcgcctgagtgttattagggtgttataaggagtgtttcttggttattcaacagtgtagttagtatcgtttcttttaagaaaaaaaattgattttaacacttgaataaaagaaacactgctgatattgtttatcttgaaagctttcaaatcggactccttgagatcttcacgctactgttaagctgacggcccagagggtgggtgccaattccaccagcagctgcaactgaaaagcaaggttcagaaatgtcagatatcctccgggagctgctctgtgtctctgagaaggctgctaacattgcccgggcgtgcagacagcaggaagccctcttccagctgctgatcgaagaaaagaaagagggagaaaagaacaagaagtttgcagttgacttcaagacgctggctgatgtactggtacaggaagttataaaacagaatatggagaacaag

SEQ ID NO: 46715 - DNA, 626 bp, Artificial Sequence
  derived and/or modified sequence
tgtcctcatccccggcttaggtaacacgttttcctccttacgacacccaccacagggtccccgcgccgctgcccctcctccttggatctggggcccgggctggtgagcggcgcgcgccgtcgcctctccgcggctgacggcccagagggtgggtgccaattccaccagcagctgcaactgaaaagcaaggttcagaaatgtcagatatcctccgggagctgctctgtgtctctgagaaggctgctaacattgcccgggcgtgcagacagcaggaagccctcttccagctgctgatcgaagaaaagaaagagggagaaaagaacaagaagtttgcagttgacttcaagacgctggctgatgtactggtacaggaagttataaaacagaatatggagaacaagtttccaggcttggaaaaaaatatttttggagaagaatccaatgagtttactaatgactggggggaaaagattaccttgaggttgtgttcaacagaggaggaaacagcagagcttcttagcaaagtcctcaatggtaacaaggtggcatctgaagcattagccagggttgttcatcaggatgttgcctttactgacccaactctggattccacagagatcaatgtt

SEQ ID NO: 46716 - DNA, 2040 bp, Artificial Sequence
  derived and/or modified sequence
aaagccgggggcggcggcctggctgaggccaagctcggatccggtgccgagccaagcggggccgtgcgtcgccggggcttcgccttcgctcgcgtgacctccgccgtcctccccaaccctcgtcctctggccgcgcctgcggccgcacgcccagcgcccctcgcctaacctcgcgcccgggccgcgcctcctcctcctcctgctccccgccgcttccgtttctcgagggaaaggctgctgcctcctgctctgtcctcatccccggcttaggtcacactctgtcatccaggctggagtacagtggtgtgatcatggcttatgcagtctccacctctcaggctcaaggaatcctcccaccccagcctcccgagtgtctgggactacaggcacgtgccaccatcccagctaatttttaaaattgtagagatggggtcccactatgttgcccagtccttcagagcttacatcatgtggccgagtttatatacctgattggcaaaacagagcctaagaaccagctctcctgtatcccaagcaaggctctttctaccgcacaccctgcaggcccatccaggcccatccagacaataaacactgacggcccagagggtgggtgccaattccaccagcagctgcaactgaaaagcaaggttcagaaatgtcagatatcctccgggagctgctctgtgtctctgagaaggctgctaacattgcccgggcgtgcagacagcaggaagccctcttccagctgctgatcgaagaaaagaaagagggagaaaagaacaagaagtttgcagttgacttcaagacgctggctgatgtactggtacaggaagttataaaacagaatatggagaacaagtttccaggcttggaaaaaaatatttttggagaagaatccaatgagtttactaatgactggggggaaaagattaccttgaggttgtgttcaacagaggaggaaacagcagagcttcttagcaaagtcctcaatggtaacaaggtggcatctgaagcattagccagggttgttcatcaggatgttgcctttactgacccaactctggattccacagagatcaatgttccacaggacattttgggaatttgggtggaccccatagattcaacttatcagtatataaaaggttctgctgacattaaatccaaccagggaatcttcccctgtggacttcagtgtgtcaccattttaattggtgtctatgacatacagacaggggttcccctgatgggagtcatcaatcaaccttttgtgtcacgagatccaaacaccctcaggtggaaaggacagtgctattggggcctttcttacatggggaccaacatgcattcactacagctcaccatctctagaagaaacggcagtgaaacacacactggaaacaccggctctgaggcagcattctcccccagtttttcagccgtaattagtacaagtgaaaaggagactatcaaagctgcattgtcacgtgtgtgtggagatcgcatatttggggcagctggggctggttataagagcctatgtgttgtccaaggcctcgttgacatttacatcttttcagaagataccacattcaaatgggactcttgtgctgctcatgccatactgagggccatgggtgggggaatagtagacttgaaagaatgcttagaaagaaatccagaaacagggcttgatttgccacagttggtgtaccacgtggaaaatgagggtgctgctggggtggatcggtgggccaacaagggaggactcattgcatacagatccaggaagcggctggagacattcctgagcctcctggtccaaaacctggcacctgcagagacgcatacctagaggaactctaaccccggtgtacctgtataaactgaactgtgaaactgtttcggttatctctgtcttttgaggatggctttgtcctgttgctggttaacattcaccttcctcttttgaggagtatttttccattatgtattcataataatgttaatttcaataaatgacattcatgcagcaat

SEQ ID NO: 46717 - DNA, 1200 bp, Artificial Sequence
  derived and/or modified sequence
atgtctgacatcctgcgggagctgctgtgtgtgtctgagaaggccgccaacatcgcccgggcctgccggcagcaggaggccctcttccagctgctgattgaggagaagaaggagggggagaagaacaagaagtttgctgtggacttcaagaccctggctgatgtgctggtgcaggaggtgatcaagcagaacatggagaacaagtttcctggcctggagaagaacatctttggagaggagagcaatgagttcaccaatgactggggcgagaagatcaccctgcggctgtgcagcacagaggaggagacagctgagctgctgagcaaggtgctgaatggaaacaaggtggccagcgaggccctggcccgggtggtgcaccaggatgtggccttcacagaccccaccctggacagcacagagatcaacgtgccccaggacatcctgggcatctgggtggaccccatcgacagcacctaccagtacatcaagggcagcgctgacatcaagagcaaccagggcatcttcccctgtggcctgcagtgtgtgaccatcctgattggagtgtatgacatccagacaggagtgcccctgatgggcgtcatcaaccagccctttgtgtcccgggaccccaacaccctgcgctggaagggccagtgctactggggcctgagctacatgggcaccaacatgcacagcctgcagctgaccatcagcagaagaaatggaagtgagacccacactggaaacacaggcagcgaggccgccttcagccccagcttctctgctgtgatcagcaccagcgagaaggagaccatcaaggccgccctgagccgggtgtgtggggaccgcatctttggagctgctggggccggctacaagagcctgtgtgtggtgcagggcctggtggacatctacatcttcagcgaggacaccaccttcaagtgggacagctgtgccgcccacgccatcctgcgggccatgggcggcggcatcgtggacctgaaggagtgcctggagaggaaccctgagaccggcctggacctgccccagctggtgtaccacgtggagaatgaaggagctgctggggtggaccgctgggccaacaagggcggcctgattgcctaccgcagcaggaagaggctggagaccttcctgagcctgctggtgcagaacctggccccagctgagacccacacctag

SEQ ID NO: 46718 - DNA, 468 bp, Artificial Sequence
  derived and/or modified sequence
atgtctgacatcctgcgggagctgctgtgtgtgtctgagaaggccgccaacatcgcccgggcctgccggcagcaggaggccctcttccagctgctgattgaggagaagaaggagggggagaagaacaagaagtttgctgtggacttcaagaccctggctgatgtgctggtgcaggaggtgatcaagcagaacatggagaacaagtttcctggcctggagaagaacatctttggagaggagagcaatgagttcaccaatgactggggcgagaagatcaccctgcggctgtgcagcacagaggaggagacagctgagctgctgagcaaggtgctgaatggaaacaaggtggccagcgaggccctggcccgggtggtgcaccaggatgtggccttcacagaccccaccctggacagcacagagatcaacgtgccccaggacatcctgggcatctgggtggaccccatctag

SEQ ID NO: 46719 - DNA, 267 bp, Artificial Sequence
  derived and/or modified sequence
atgtctgacatcctgcgggagctgctgtgtgtgtctgagaaggccgccaacatcgcccgggcctgccggcagcaggaggccctcttccagctgctgattgaggagaagaaggagggggagaagaacaagaagtttgctgtggacttcaagaccctggctgatgtgctggtgcaggaggtgatcaagcagaacatggagaacaagtttcctggcctggagaagaacatctttggagaggagagcaatgagttcaccaatgactggtag

SEQ ID NO: 46720 - DNA, 639 bp, Artificial Sequence
  derived and/or modified sequence
atgtctgacatcctgcgggagctgctgtgtgtgtctgagaaggccgccaacatcgcccgggcctgccggcagcaggaggccctcttccagctgctgattgaggagaagaaggagggggagaagaacaagaagtttgctgtggacttcaagaccctggctgatgtgctggtgcaggaggtgatcaagcagaacatggagaacaagtttcctggcctggagaagaacatctttggagaggagagcaatgagttcaccaatgactggggcgagaagatcaccctgcggctgtgcagcacagaggaggagacagctgagctgctgagcaaggtgctgaatggaaacaaggtggccagcgaggccctggcccgggtggtgcaccaggatgtggccttcacagaccccaccctggacagcacagagatcaacgtgccccaggacatcctgggcatctgggtggaccccatcgacagcacctaccagtacatcaagggcagcgctgacatcaagagcaaccagggcatcttcccctgtggcctgcagtgtgtgaccatcctgattggagtgtatgacatccagacaggagtgcccctgatgggcgtcatcaaccagccctttgtgtcccgggaccccaacacctag

SEQ ID NO: 46721 - DNA, 642 bp, Artificial Sequence
  derived and/or modified sequence
atgtctgacatcctgcgggagctgctgtgtgtgtctgagaaggccgccaacatcgcccgggcctgccggcagcaggaggccctcttccagctgctgattgaggagaagaaggagggggagaagaacaagaagtttgctgtggacttcaagaccctggctgatgtgctggtgcaggaggtgatcaagcagaacatggagaacaagtttcctggcctggagaagaacatctttggagaggagagcaatgagttcaccaatgactggggcgagaagatcaccctgcggctgtgcagcacagaggaggagacagctgagctgctgagcaaggtgctgaatggaaacaaggtggccagcgaggccctggcccgggtggtgcaccaggatgtggccttcacagaccccaccctggacagcacagagatcaacgtgccccaggacatcctgggcatctgggtggaccccatcgacagcacctaccagtacatcaagggcagcgctgacatcaagagcaaccagggcatcttcccctgtggcctgcagtgtgtgaccatcctgattggagtgtatgacatccagacaggagtgcccctgatgggcgtcatcaaccagccctttgtgtcccgggaccccaacaccctgtag

SEQ ID NO: 46722 - DNA, 573 bp, Artificial Sequence
  derived and/or modified sequence
atgtctgacatcctgcgggagctgctgtgtgtgtctgagaaggccgccaacatcgcccgggcctgccggcagcaggaggccctcttccagctgctgattgaggagaagaaggagggggagaagaacaagaagtttgctgtggacttcaagaccctggctgatgtgctggtgcaggaggtgatcaagcagaacatggagaacaagtttcctggcctggagaagaacatctttggagaggagagcaatgagttcaccaatgactggggcgagaagatcaccctgcggctgtgcagcacagaggaggagacagctgagctgctgagcaaggtgctgaatggaaacaaggtggccagcgaggccctggcccgggtggtgcaccaggatgtggccttcacagaccccaccctggacagcacagagatcaacgtgccccaggacatcctgggcatctgggtggaccccatcgacagcacctaccagtacatcaagggcagcgctgacatcaagagcaaccagggcatcttcccctgtggcctgcagtgtgtgaccatcctgattggagtgtatgactag

SEQ ID NO: 46723 - DNA, 93 bp, Artificial Sequence
  derived and/or modified sequence
atgtctgacatcctgcgggagctgctgtgtgtgtctgagaaggccgccaacatcgcccgggcctgccggcagcaggaggccctcttccagtag

SEQ ID NO: 46724 - DNA, 207 bp, Artificial Sequence
  derived and/or modified sequence
atgtctgacatcctgcgggagctgctgtgtgtgtctgagaaggccgccaacatcgcccgggcctgccggcagcaggaggccctcttccagctgctgattgaggagaagaaggagggggagaagaacaagaagtttgctgtggacttcaagaccctggctgatgtgctggtgcaggaggtgatcaagcagaacatggagaacaagtag

SEQ ID NO: 46725 - DNA, 432 bp, Artificial Sequence
  derived and/or modified sequence
atgtctgacatcctgcgggagctgctgtgtgtgtctgagaaggccgccaacatcgcccgggcctgccggcagcaggaggccctcttccagctgctgattgaggagaagaaggagggggagaagaacaagaagtttgctgtggacttcaagaccctggctgatgtgctggtgcaggaggtgatcaagcagaacatggagaacaagtttcctggcctggagaagaacatctttggagaggagagcaatgagttcaccaatgactggggcgagaagatcaccctgcggctgtgcagcacagaggaggagacagctgagctgctgagcaaggtgctgaatggaaacaaggtggccagcgaggccctggcccgggtggtgcaccaggatgtggccttcacagaccccaccctggacagcacagagatcaacgtgtag

SEQ ID NO: 46726 - DNA, 1200 bp, Artificial Sequence
  derived and/or modified sequence
atgagcgacatcctgcgggagctgctgtgcgtgagcgagaaggccgcgaatatagcccgggcttgccgccaacaggaagccttgttccagctgctcatcgaggagaagaaggagggggaaaaaaataaaaaatttgccgtggacttcaagacactcgccgacgttctggttcaggaggttattaaacagaatatggagaataagttccctggactggagaaaaacatctttggtgaggagtctaatgagttcaccaacgactggggggagaagattactcttcgtctctgtagtacagaagaggaaaccgccgaactcctgagcaaagttctaaacggaaataaggtggcaagtgaggcactggccagggtggtgcatcaggatgtggcctttacagacccaactctggattcaacagaaattaatgtacctcaagatatcctcggaatatgggtggaccctatcgacagtacttatcaatacatcaagggaagcgccgacataaagtccaatcaaggcatcttcccttgtggcttacagtgtgttacgattctgatcggggtgtatgacattcagacgggtgtcccgctcatgggagtcattaaccagccctttgtttcacgcgatcccaatacactcaggtggaaggggcaatgttactgggggttaagctacatggggacgaatatgcatagcctccagcttaccatcagtagacgaaatggtagtgagacacacactggcaataccggctccgaggctgcttttagccccagttttagtgctgttattagcacttctgaaaaggagaccataaaggccgctctctccagggtttgtggggaccgcatatttggtgctgccggagcaggctacaaaagcctgtgtgttgtgcagggacttgtggacatctacatattctctgaagatacgacctttaagtgggactcatgcgccgcccacgccattctccgagctatgggaggaggcatcgtcgatctgaaagaatgtctagaacggaaccctgagacgggtcttgatctgccacaactcgtttatcatgtggaaaacgagggtgcagccggcgtggataggtgggcgaataagggcggtctgatcgcatacaggtcccgtaaacggctcgagactttcttgtccttgcttgtacagaacctggcgccagccgaaacccacacttag

SEQ ID NO: 46727 - DNA, 1200 bp, Artificial Sequence
  derived and/or modified sequence
atgagcgacatcctgcgggagctgctgtgcgtgagcgagaaggccgccaacatagcccgggcttgccgtcagcaagaggccctttttcaactgctgatagaggagaaaaaagaaggagagaagaacaagaagtttgctgttgactttaagacactggccgatgttctggtgcaggaagtgattaagcagaatatggagaataagttcccgggtctagagaagaatatttttggagaagagagtaatgaattcaccaacgactggggagaaaagattaccttgaggctgtgcagtactgaggaagaaaccgccgaattactctctaaggtcctgaacgggaacaaagttgcatctgaggcattagcacgtgtggttcaccaagatgtcgcgtttaccgaccccaccctggatagcacggagattaatgtgccccaggacattctgggaatttgggttgatcctattgattcaacttaccagtacattaagggctccgccgacattaaatccaaccaaggcatattcccatgcggcttacagtgtgtgacaatcctgataggagtgtacgacatccagacaggtgtacctttaatgggggtgataaatcagccctttgtctctagggacccaaacacccttagatggaaaggccagtgttattgggggcttagctatatgggtaccaacatgcatagcctgcagctcaccataagccgcagaaatggctccgagacccacacgggcaacaccggcagtgaggccgccttttcaccaagcttttcggccgtcattagcactagtgaaaaagagaccatcaaggcagccctttccagagtctgcggcgacagaatctttggtgccgcaggcgctggttataagtccctctgcgtggtccaaggcctcgtagacatctacatcttctctgaagatacaacctttaaatgggactcttgtgcggcccacgctatcttacgcgccatgggaggcggaatcgtggatctgaaggaatgtctggagcgcaatcccgagactggactcgatctgccacaattagtctatcacgtcgaaaatgaaggcgcagccggcgtcgacagatgggccaacaaagggggtcttattgcataccgcagccgcaagaggttagagacattcttgagtttactggttcaaaacttggcacccgccgagactcacacatag

SEQ ID NO: 46728 - DNA, 468 bp, Artificial Sequence
  derived and/or modified sequence
atgagcgacatcctgcgggagctgctgtgcgtgagcgagaaggccgcgaatattgcccgtgcctgtagacaacaggaggcgctgtttcagttgctgatcgaagagaaaaaggagggcgagaagaataaaaagttcgctgtggattttaaaacactggccgacgtgctggtgcaggaggttatcaagcagaacatggagaacaaatttccgggattggagaagaacatctttggcgaggagagtaatgagttcaccaacgattggggcgaaaagataacactgaggctttgctctaccgaggaggaaaccgcagaattgttatccaaagtcctaaacgggaataaagtcgctagtgaagccctggctagggtcgttcaccaggacgtggcattcactgaccccacccttgattccacggagattaacgtgccccaggatatcctgggcatctgggtggaccccatttag

SEQ ID NO: 46729 - DNA, 267 bp, Artificial Sequence
  derived and/or modified sequence
atgagcgacatcctgcgggagctgctgtgcgtgagcgagaaggccgccaacatcgcccgggcctgtcgtcagcaggaggctctgtttcagttactgattgaagagaagaaggaaggtgagaagaacaaaaaatttgctgtggattttaagactctggccgatgtccttgtccaagaggtcattaagcaaaacatggaaaataaattcccaggcctggagaagaacatcttcggagaggaaagcaacgagttcaccaacgactggtag

SEQ ID NO: 46730 - DNA, 639 bp, Artificial Sequence
  derived and/or modified sequence
atgagcgacatcctgcgggagctgctgtgcgtgagcgagaaggccgccaatatagctcgggcgtgcaggcagcaggaagcactgtttcagctgctgatcgaggaaaaaaaggagggcgagaaaaacaagaaatttgccgtggactttaaaactcttgccgacgtcttagtgcaggaagtgatcaaacaaaacatggagaataaatttcccggactcgagaagaatatcttcggcgaggaatccaacgagtttacaaatgattggggggagaagatcacattgcgcctgtgcagtaccgaagaggagactgcagagctcctatctaaagtcctcaacggtaacaaggtggcatccgaggccctggccagagtggtgcaccaggacgtggcatttaccgacccgacactggacagcacagagattaacgttccacaggatattctaggtatttgggtggatcctattgatagcacctaccagtatatcaagggttccgcagatattaagagcaatcaggggattttcccatgcggtctgcaatgcgtgacaatcctgatcggcgtgtatgatatccagactggcgtaccccttatgggcgttatcaatcagcccttcgtttcacgagatcctaacacctag

SEQ ID NO: 46731 - DNA, 642 bp, Artificial Sequence
  derived and/or modified sequence
atgagcgacatcctgcgggagctgctgtgcgtgagcgagaaggccgctaacattgctagagcctgtaggcagcaggaagcccttttccagctgctgatcgaagagaaaaaggaaggcgagaagaataagaagttcgctgtcgactttaaaacattagccgacgtgctcgtgcaagaagtgattaaacagaacatggaaaacaaatttcccgggctggagaaaaacatctttggcgaagagtctaatgaattcactaacgattggggagagaagataactctccggctatgctcgactgaggaggagaccgctgaacttttgtctaaagtgttgaatggaaacaaggtggccagtgaagcactggcaagagttgtgcaccaggacgtggcatttactgaccctacactggactccaccgaaattaatgtaccccaagacatattgggcatctgggttgaccctatagatagtacttatcagtacattaagggtagtgctgatatcaagtccaatcagggaatcttcccctgcggtctccagtgcgtcactattctcattggtgtgtacgacatccaaacaggggttcccctcatgggcgtcatcaatcagccttttgtgtcaagagatccaaatacactctag

SEQ ID NO: 46732 - DNA, 573 bp, Artificial Sequence
  derived and/or modified sequence
atgagcgacatcctgcgggagctgctgtgcgtgagcgagaaggccgctaacatagctagagcctgcagacagcaagaagcactttttcagctgttgatcgaggagaaaaaagagggtgaaaaaaataagaagtttgcggtagactttaagaccctcgccgatgtgctggtccaggaggtgatcaagcagaacatggaaaataagttccccggcctcgagaaaaacatattcggggaggagtcaaatgaattcacgaacgattggggtgagaagatcaccctccgactgtgcagcaccgaggaggagaccgccgagttactgtcaaaggtcttgaacggcaataaggtcgccagtgaagctctcgccagagtcgtccatcaggacgtggccttcaccgatcccaccctcgacagcaccgagatcaatgtgccccaggatattctgggcatttgggttgatcctatcgactccacatatcagtatattaaagggtccgccgacattaagtccaaccagggcatattcccctgtggcctgcagtgtgtgactattctgatcggggtttatgactag

SEQ ID NO: 46733 - DNA, 93 bp, Artificial Sequence
  derived and/or modified sequence
atgagcgacatcctgcgggagctgctgtgcgtgagcgagaaggccgcgaacattgctcgggcgtgtaggcaacaggaagctttgtttcagtag

SEQ ID NO: 46734 - DNA, 207 bp, Artificial Sequence
  derived and/or modified sequence
atgagcgacatcctgcgggagctgctgtgcgtgagcgagaaggccgccaatatcgccagagcttgtagacaacaggaggcactgtttcagctgctaatcgaggagaaaaaggagggcgaaaagaataagaaattcgccgtggactttaaaacattagccgacgtgctcgtacaggaagtgataaagcaaaacatggaaaataagtag

SEQ ID NO: 46735 - DNA, 432 bp, Artificial Sequence
  derived and/or modified sequence
atgagcgacatcctgcgggagctgctgtgcgtgagcgagaaggccgccaacattgctcgggcctgccgccagcaggaagctttatttcagctcctgattgaggagaagaaagaaggagaaaagaacaagaaatttgctgtcgacttcaaaaccctggcagatgtcctggttcaagaagtaattaagcagaacatggaaaacaagttcccagggttagaaaaaaacatcttcggcgaagagtccaatgaatttacaaacgattggggcgagaaaattacgctccgcctctgttcgacagaagaggaaacagctgagctgctgtctaaggtcctgaatgggaataaggttgcctctgaggcgttggcccgggtggttcaccaggatgtcgcctttaccgacccaacactggattcaaccgaaattaacgtttag

SEQ ID NO: 46736 - DNA, 1200 bp, Artificial Sequence
  derived and/or modified sequence
atgagcgacatcctgcgggagctgctgtgcgtgagcgagaaggccgccaacatcgcacgagcatgtcgacagcaggaagctctttttcagctgttgatcgaagaaaagaaggagggcgagaagaataagaaattcgccgtcgattttaagacactggcagatgttctggtccaggaagttattaaacagaacatggaaaataagttccccggactagaaaagaatattttcggagaagaatcaaacgagtttactaacgattggggtgaaaaaatcacactgaggctttgttccaccgaggaagaaaccgctgagctgctatctaaggtcttgaatgggaataaggtggcgtccgaagccctggctagagttgtccatcaggacgtagcatttaccgacccaactcttgactccactgaaatcaacgtccctcaggacatcttgggcatttgggtggaccccatcgattccacctaccagtatatcaaaggatccgctgacatcaagtcaaaccagggcatcttcccctgtgggctccagtgtgtcacgatccttatcggcgtgtatgatattcagaccggagttcctctgatgggggtgataaatcagccttttgtctcccgggatccaaacacgctccgctggaaggggcagtgctactggggcctttcctatatgggaactaacatgcacagcttgcagctgactataagtagaaggaacgggagtgagacccacacaggtaataccggcagtgaggctgctttctccccctcttttagtgccgtgatttcgacttccgaaaaggagaccatcaaggcagctctgagtagagtctgcggagaccggatatttggcgccgctggggccggctacaagtccttgtgtgtcgtgcagggactcgttgatatctacatattctcagaggatacaacattcaaatgggactcttgtgctgctcacgctattctcagggcgatgggaggagggatcgtagatctcaaggagtgcctcgagcggaatcccgagaccgggttggatctaccccagttggtttaccacgtagagaacgagggcgctgccggggtggatcgttgggctaacaagggtggcctaatcgcctacaggagccgcaagcggcttgagacatttctgagcctgctcgttcaaaatcttgctccggccgaaacacacacatag

SEQ ID NO: 46737 - DNA, 1200 bp, Artificial Sequence
  derived and/or modified sequence
atgtcagacatattgcgggaactcttgtgcgtgagcgagaaagccgcaaatatcgcaagagcttgtcggcagcaagaggccctttttcagttgctcatcgaagaaaaaaaagagggcgagaaaaataagaaatttgccgtggatttcaaaactctggcggatgtgttggtgcaggaagtgatcaaacagaacatggagaataagtttcccggtctggagaaaaacatcttcggggaggagtcaaacgaatttaccaacgattggggcgaaaaaatcacactaaggctctgcagcacggaagaggagactgctgagctgctctctaaggtgctgaatggaaataaggtggcgtctgaggctttagcaagggttgtgcatcaggacgtcgcctttactgaccccacactcgattccactgagattaacgttccacaggacattctgggcatatgggtggatcccatcgattcaacttaccagtacattaaagggtctgccgatatcaaaagtaaccagggcatcttcccttgtggactgcagtgcgtgactattctgatcggggtgtatgatatacagaccggggtgcctctcatgggcgtgattaaccaacccttcgtcagtagggatccaaataccctgcgttggaagggacagtgttactgggggctaagttatatgggaaccaacatgcactctttgcagctcacaatctcccgcagaaatgggtcagagacccacactggcaacacaggtagtgaggccgcattttccccttccttctctgccgtgatctctacttccgagaaagaaactatcaaggccgctctctcccgcgtctgcggagaccggatcttcggggcagcgggagccggatacaaatctctgtgcgtagtgcagggcctcgtcgatatttatatcttttccgaggataccaccttcaagtgggacagttgcgctgctcatgccattcttcgggctatgggagggggtattgtggatctgaaagagtgcttagaaaggaacccggaaacaggtctggacctgccccagctggtttaccacgtggagaatgaaggagccgcaggcgtggaccggtgggctaataaaggaggactgattgcctaccgaagtcgcaaacggctggaaacattcctctcgttactagtccagaatctggctcctgcagagacccatacctag

SEQ ID NO: 46738 - DNA, 1200 bp, Artificial Sequence
  derived and/or modified sequence
atgagtgacatcctccgcgagctgctgtgtgtttccgagaaggccgctaacattgctcgagcttgccgtcaacaggaggctcttttccaattgttaatcgaggaaaagaaggaaggagagaaaaacaaaaagttcgcagtagacttcaagactctggcagacgtcctggtgcaagaagttattaagcagaacatggaaaacaagtttcccggactggagaaaaatatcttcggtgaggaatcaaatgagttcaccaacgactggggcgagaaaatcactctccggctgtgcagcacagaggaggagacggcggaactgttgtccaaggtcctcaatggcaacaaggtagcgagcgaggcattagcaagagtagttcaccaagacgtggctttcacagatcccaccctggatagcaccgaaatcaatgtgcctcaggatatacttggaatctgggtcgaccctattgactctacttatcagtatatcaagggaagtgccgacatcaagtcaaatcagggtatttttccttgcgggctgcagtgcgtgacaatcctgatcggagtgtatgacatccaaacgggtgtgcccctgatgggagtcatcaaccagcccttcgtcagccgggatcccaatacattgcgttggaagggacagtgttattggggcttatcctacatgggcacgaacatgcacagcctgcagttaactattagccgaagaaatggatctgagacacacacaggaaacactggttcagaagctgcttttagtccgagtttctctgcggtgattagcacctcagaaaaggaaactatcaaggccgcactgtccagagtgtgcggagatagaatctttggggctgccggagccggttacaaatccctctgcgtggttcaggggttggtggacatctatatcttcagcgaggataccactttcaagtgggattcctgtgctgcccacgcgatactgcgcgcaatgggcggtggcatagttgatcttaaagaatgtctggagagaaaccccgaaacaggcctggatctgcctcaactggtctatcatgtggagaacgaaggtgccgcaggggtcgaccggtgggccaacaagggcggtctgatcgcctatcgcagtcgtaaacgcctcgagacatttctgtcgctccttgtccagaatttggcccctgctgaaacacacacctag

SEQ ID NO: 46739 - DNA, 468 bp, Artificial Sequence
  derived and/or modified sequence
atgagtgatatcctccgggagctactctgtgtgagcgagaaagcggctaacattgccagagcatgcagacagcaggaagcgctgttccagctcctgatcgaggagaaaaaggaaggcgaaaagaacaagaaattcgccgtggacttcaagacactcgccgacgtcctggtgcaggaagtcatcaagcagaatatggagaataaattccctggcctggagaagaacatattcggcgaggagtccaacgaatttactaacgactggggagagaagattactctgcgcttatgctccaccgaggaagagaccgccgagcttctatctaaggttctgaatggcaacaaagtcgcaagcgaggctctcgctcgggtggtgcaccaggatgtagcgtttaccgaccccactctggactctacagaaatcaatgtgccccaagatatcctgggcatttgggtcgaccccatctag

SEQ ID NO: 46740 - DNA, 267 bp, Artificial Sequence
  derived and/or modified sequence
atgtccgacatcctgagagagctactgtgcgtgtccgaaaaggcggcaaacattgccagggcttgtcgccaacaggaggctctgtttcaactgctgattgaggagaagaaagagggcgagaagaataaaaagtttgctgtggactttaagacgcttgccgacgtcctggtgcaggaggtgattaaacaaaacatggagaataagtttccgggactcgagaagaacatcttcggcgaggaatctaatgagttcactaatgattggtag

SEQ ID NO: 46741 - DNA, 639 bp, Artificial Sequence
  derived and/or modified sequence
atgagcgacattttgagggaattgttatgcgtttctgagaaggccgctaacattgctagagcctgccgccaacaggaagcccttttccagctactcattgaagagaaaaaagagggagagaagaacaagaagtttgctgtggacttcaagacgctcgccgacgtgctcgtccaggaggtgatcaaacagaatatggaaaacaagtttccagggctcgaaaagaacatctttggggaggaatccaatgaatttaccaatgattggggcgagaaaattacattgcggctctgcagcactgaagaagaaactgccgaactgctgagcaaagtgcttaacggcaataaggtcgcctctgaggccctagcgagggttgtgcatcaggacgtggcttttactgacccgacccttgattctactgaaatcaacgtcccccaggatatcctcggcatttgggtagatcctatcgactctacgtatcagtacatcaaaggatcagcggacattaagtctaatcaaggtattttcccgtgcgggctgcaatgcgtgacaatcctgattggagtatacgatattcagactggcgtgccattaatgggggtaataaaccagcccttcgtatcccgggatccaaatacatag

SEQ ID NO: 46742 - DNA, 642 bp, Artificial Sequence
  derived and/or modified sequence
atgagtgatatattaagggagctgctttgtgtctccgaaaaggcagccaacatcgcaagggcgtgccgccagcaggaggcgttgtttcagctgcttatcgaggagaaaaaggaaggggagaaaaataagaagttcgccgtggattttaagacgctggcggatgtattggttcaagaggtcataaaacaaaatatggagaataaatttcccggtcttgagaagaacatatttggcgaagaatccaacgagtttaccaatgattggggggagaagattacattgagattatgctctacagaagaagagactgcagaattgctttctaaggtattgaacggcaacaaggtagcctctgaggccttggctcgggtggttcaccaggatgtggcttttaccgatcccacattggacagtaccgaaatcaatgttccccaggatattcttgggatctgggtggatcccatcgactctacctaccagtacattaaggggtccgccgacattaagagtaatcagggaatcttcccctgtggcctccagtgcgttacaattctaatcggcgtgtacgacattcaaaccggcgttcccctcatgggtgttatcaatcagcctttcgtgagcagggatccaaataccctgtag

SEQ ID NO: 46743 - DNA, 573 bp, Artificial Sequence
  derived and/or modified sequence
atgagtgacatcctgagagaactgctatgcgtgagtgagaaggcggctaacattgcacgcgcttgccggcaacaggaggctctttttcagctcttgatcgaggagaaaaaggaaggggaaaagaacaaaaagtttgcagtggacttcaaaactttagcagatgtgcttgtccaggaggttataaagcagaacatggaaaataagtttcccggactggaaaagaacatcttcggcgaggagagcaatgagtttacaaacgattggggggagaaaataacactcaggctgtgttctactgaggaggagaccgcggagctattgtctaaggttctgaacgggaacaaagtagccagcgaagctctcgcgcgagtggtccaccaggatgtggcgtttaccgaccctacactggactctaccgagattaacgtgcctcaagacatcctgggtatctgggtggaccctatagattctacttaccagtacatcaaagggtctgctgatatcaaatccaatcaaggaatctttccgtgtggcctacagtgcgtcactatactcattggtgtctacgactag

SEQ ID NO: 46744 - DNA, 93 bp, Artificial Sequence
  derived and/or modified sequence
atgtctgatattctgcgagagctactgtgtgtgtccgagaaggccgctaatattgcaagggcttgtcgacagcaggaggccctgtttcagtag

SEQ ID NO: 46745 - DNA, 207 bp, Artificial Sequence
  derived and/or modified sequence
atgtctgatatcctgagagagctgttatgtgttagcgagaaggctgccaatatcgcaagagcctgtcgtcagcaggaagcactcttccagctcttgatcgaggagaaaaaggaaggtgagaagaacaagaagtttgccgtcgacttcaaaactctggccgatgttttggttcaggaagtgatcaagcagaacatggagaacaagtag

SEQ ID NO: 46746 - DNA, 432 bp, Artificial Sequence
  derived and/or modified sequence
atgtccgacatcctgagggagctgctttgcgttagtgagaaagccgctaatatagcccgagcctgcagacagcaggaagcactttttcagctgctgatagaggagaagaaagagggggagaaaaacaaaaagttcgccgtggactttaagacgctcgctgatgtactcgtgcaagaagtgatcaaacagaatatggagaacaaatttccaggcctggagaagaatatattcggcgaggaatctaacgagtttacgaacgactggggggagaagatcacacttcgtttgtgtagcacagaggaagagactgctgagctgctcagtaaagtactgaacggcaataaagtggcttctgaggctctggcacgtgtcgtgcatcaggacgttgcgtttacagatcccactctggacagtactgagataaacgtatag

SEQ ID NO: 46747 - DNA, 1200 bp, Artificial Sequence
  derived and/or modified sequence
atgtccgatattctgcgtgaactcctctgcgtaagcgagaaggctgccaatatagctcgcgcttgccggcagcaggaagcgctcttccagctgcttatcgaggaaaaaaaagaaggggagaaaaataagaagttcgccgttgatttcaagaccctagccgatgtcctggtgcaggaagtgattaagcagaatatggaaaataagttccccggacttgagaagaatatcttcggagaagagtctaatgagtttaccaacgactggggtgaaaagataacattacgactctgcagtaccgaggaggagacggccgaactactgagcaaagtcctgaacggcaacaaggtagcttctgaagctctggccagggttgtccaccaggatgtagcttttacagaccccactttagattccaccgagatcaacgttcctcaggacattcttggaatttgggtagatccaatagacagcacataccaatacatcaaggggtctgcggacataaaaagcaaccagggaatatttccgtgcggtctacagtgtgtcacgatcctcattggagtgtatgatatccagacaggcgtgcctctaatgggcgtgataaatcagccctttgtgagtcgggacccgaacacattaaggtggaaggggcaatgttactgggggctttcgtacatgggaacaaatatgcacagtctgcagctgaccatctccagaaggaatggcagtgaaacgcacaccgggaataccggtagcgaggccgcttttagcccttcttttagtgccgtcataagtacctccgagaaggaaaccatcaaggcagcgctttcccgggtgtgtggcgaccggattttcggtgctgccggtgccggttacaaatcattgtgtgtcgtgcagggattagtggatatctacatcttctcagaggataccaccttcaagtgggactcttgcgcagcacacgcaatcttgcgtgccatgggcggagggattgttgaccttaaggagtgtctggaacggaatcccgagaccggtctggatctccctcaacttgtctaccacgttgaaaacgaaggcgctgccggagtggaccggtgggcaaacaagggcggactgatagcctaccggtcccgaaagcgcttggaaacatttctgagcctgctggtgcagaacctcgcgcctgcggaaacccacacatag

SEQ ID NO: 46748 - DNA, 1200 bp, Artificial Sequence
  derived and/or modified sequence
atgagcgacatcctgagagagctgctgtgcgtgagcgagaaggccgccaacatcgccagagcctgcagacagcaggaggccctgttccagctgctgatcgaggagaagaaggagggcgagaagaacaagaagttcgccgtggacttcaagaccctggccgacgtgctggtgcaggaggtgatcaagcagaacatggagaacaagttccccggcctggagaagaacatcttcggcgaggagagcaacgagttcaccaacgactggggcgagaagatcaccctgagactgtgcagcaccgaggaggagaccgccgagctgctgagcaaggtgctgaacggcaacaaggtggccagcgaggccctggccagagtggtgcaccaggacgtggccttcaccgaccccaccctggacagcaccgagatcaacgtgccccaggacatcctgggcatctgggtggaccccatcgacagcacctaccagtacatcaagggcagcgccgacatcaagagcaaccagggcatcttcccctgcggcctgcagtgcgtgaccatcctgatcggcgtgtacgacatccagaccggcgtgcccctgatgggcgtgatcaaccagcccttcgtgagcagagaccccaacaccctgagatggaagggccagtgctactggggcctgagctacatgggcaccaacatgcacagcctgcagctgaccatcagcagaagaaacggcagcgagacccacaccggcaacaccggcagcgaggccgccttcagccccagcttcagcgccgtgatcagcaccagcgagaaggagaccatcaaggccgccctgagcagagtgtgcggcgacagaatcttcggcgccgccggcgccggctacaagagcctgtgcgtggtgcagggcctggtggacatctacatcttcagcgaggacaccaccttcaagtgggacagctgcgccgcccacgccatcctgagagccatgggcggcggcatcgtggacctgaaggagtgcctggagagaaaccccgagaccggcctggacctgccccagctggtgtaccacgtggagaacgagggcgccgccggcgtggacagatgggccaacaagggcggcctgatcgcctacagaagcagaaagagactggagaccttcctgagcctgctggtgcagaacctggcccccgccgagacccacacctag

SEQ ID NO: 46749 - DNA, 468 bp, Artificial Sequence
  derived and/or modified sequence
atgagcgacatcctgagagagctgctgtgcgtgagcgagaaggccgccaacatcgccagagcctgcagacagcaggaggccctgttccagctgctgatcgaggagaagaaggagggcgagaagaacaagaagttcgccgtggacttcaagaccctggccgacgtgctggtgcaggaggtgatcaagcagaacatggagaacaagttccccggcctggagaagaacatcttcggcgaggagagcaacgagttcaccaacgactggggcgagaagatcaccctgagactgtgcagcaccgaggaggagaccgccgagctgctgagcaaggtgctgaacggcaacaaggtggccagcgaggccctggccagagtggtgcaccaggacgtggccttcaccgaccccaccctggacagcaccgagatcaacgtgccccaggacatcctgggcatctgggtggaccccatctag

SEQ ID NO: 46750 - DNA, 267 bp, Artificial Sequence
  derived and/or modified sequence
atgagcgacatcctgagagagctgctgtgcgtgagcgagaaggccgccaacatcgccagagcctgcagacagcaggaggccctgttccagctgctgatcgaggagaagaaggagggcgagaagaacaagaagttcgccgtggacttcaagaccctggccgacgtgctggtgcaggaggtgatcaagcagaacatggagaacaagttccccggcctggagaagaacatcttcggcgaggagagcaacgagttcaccaacgactggtag

SEQ ID NO: 46751 - DNA, 639 bp, Artificial Sequence
  derived and/or modified sequence
atgagcgacatcctgagagagctgctgtgcgtgagcgagaaggccgccaacatcgccagagcctgcagacagcaggaggccctgttccagctgctgatcgaggagaagaaggagggcgagaagaacaagaagttcgccgtggacttcaagaccctggccgacgtgctggtgcaggaggtgatcaagcagaacatggagaacaagttccccggcctggagaagaacatcttcggcgaggagagcaacgagttcaccaacgactggggcgagaagatcaccctgagactgtgcagcaccgaggaggagaccgccgagctgctgagcaaggtgctgaacggcaacaaggtggccagcgaggccctggccagagtggtgcaccaggacgtggccttcaccgaccccaccctggacagcaccgagatcaacgtgccccaggacatcctgggcatctgggtggaccccatcgacagcacctaccagtacatcaagggcagcgccgacatcaagagcaaccagggcatcttcccctgcggcctgcagtgcgtgaccatcctgatcggcgtgtacgacatccagaccggcgtgcccctgatgggcgtgatcaaccagcccttcgtgagcagagaccccaacacctag

SEQ ID NO: 46752 - DNA, 642 bp, Artificial Sequence
  derived and/or modified sequence
atgagcgacatcctgagagagctgctgtgcgtgagcgagaaggccgccaacatcgccagagcctgcagacagcaggaggccctgttccagctgctgatcgaggagaagaaggagggcgagaagaacaagaagttcgccgtggacttcaagaccctggccgacgtgctggtgcaggaggtgatcaagcagaacatggagaacaagttccccggcctggagaagaacatcttcggcgaggagagcaacgagttcaccaacgactggggcgagaagatcaccctgagactgtgcagcaccgaggaggagaccgccgagctgctgagcaaggtgctgaacggcaacaaggtggccagcgaggccctggccagagtggtgcaccaggacgtggccttcaccgaccccaccctggacagcaccgagatcaacgtgccccaggacatcctgggcatctgggtggaccccatcgacagcacctaccagtacatcaagggcagcgccgacatcaagagcaaccagggcatcttcccctgcggcctgcagtgcgtgaccatcctgatcggcgtgtacgacatccagaccggcgtgcccctgatgggcgtgatcaaccagcccttcgtgagcagagaccccaacaccctgtag

SEQ ID NO: 46753 - DNA, 573 bp, Artificial Sequence
  derived and/or modified sequence
atgagcgacatcctgagagagctgctgtgcgtgagcgagaaggccgccaacatcgccagagcctgcagacagcaggaggccctgttccagctgctgatcgaggagaagaaggagggcgagaagaacaagaagttcgccgtggacttcaagaccctggccgacgtgctggtgcaggaggtgatcaagcagaacatggagaacaagttccccggcctggagaagaacatcttcggcgaggagagcaacgagttcaccaacgactggggcgagaagatcaccctgagactgtgcagcaccgaggaggagaccgccgagctgctgagcaaggtgctgaacggcaacaaggtggccagcgaggccctggccagagtggtgcaccaggacgtggccttcaccgaccccaccctggacagcaccgagatcaacgtgccccaggacatcctgggcatctgggtggaccccatcgacagcacctaccagtacatcaagggcagcgccgacatcaagagcaaccagggcatcttcccctgcggcctgcagtgcgtgaccatcctgatcggcgtgtacgactag

SEQ ID NO: 46754 - DNA, 93 bp, Artificial Sequence
  derived and/or modified sequence
atgagcgacatcctgagagagctgctgtgcgtgagcgagaaggccgccaacatcgccagagcctgcagacagcaggaggccctgttccagtag

SEQ ID NO: 46755 - DNA, 207 bp, Artificial Sequence
  derived and/or modified sequence
atgagcgacatcctgagagagctgctgtgcgtgagcgagaaggccgccaacatcgccagagcctgcagacagcaggaggccctgttccagctgctgatcgaggagaagaaggagggcgagaagaacaagaagttcgccgtggacttcaagaccctggccgacgtgctggtgcaggaggtgatcaagcagaacatggagaacaagtag

SEQ ID NO: 46756 - DNA, 432 bp, Artificial Sequence
  derived and/or modified sequence
atgagcgacatcctgagagagctgctgtgcgtgagcgagaaggccgccaacatcgccagagcctgcagacagcaggaggccctgttccagctgctgatcgaggagaagaaggagggcgagaagaacaagaagttcgccgtggacttcaagaccctggccgacgtgctggtgcaggaggtgatcaagcagaacatggagaacaagttccccggcctggagaagaacatcttcggcgaggagagcaacgagttcaccaacgactggggcgagaagatcaccctgagactgtgcagcaccgaggaggagaccgccgagctgctgagcaaggtgctgaacggcaacaaggtggccagcgaggccctggccagagtggtgcaccaggacgtggccttcaccgaccccaccctggacagcaccgagatcaacgtgtag

SEQ ID NO: 46757 - protein, 1070 aa, Artificial Sequence
  derived and/or modified sequence
MARRHERVTRRMWTWAPGLLMMTVVFWGHQGNGQGQGSRLRQEDFPPRIVEHPSDVIVSKGEPTTLNCKAEGRPTPTIEWYKDGERVETDKDDPRSHRMLLPSGSLFFLRIVHGRRSKPDEGSYVCVARNYLGEAVSRNASLEVALLRDDFRQNPTDVVVAAGEPAILECQPPRGHPEPTIYWKKDKVRIDDKEERISIRGGKLMISNTRKSDAGMYTCVGTNMVGERDSDPAELTVFERPTFLRRPINQVVLEEEAVEFRCQVQGDPQPTVRWKKDDADLPRGRYDIKDDYTLRIKKTMSTDEGTYMCIAENRVGKMEASATLTVRGGVIAPPQFVVRPRDQIVAQGRTVTFPCETKGNPQPAVFWQKEGSQNLLFPNQPQQPNSRCSVSPTGDLTITNIQRSDAGYYICQALTVAGSILAKAQLEVTDVLTDRPPPIILQGPANQTLAVDGTALLKCKATGDPLPVISWLKEGFTFPGRDPRATIQEQGTLQIKNLRISDTGTYTCVATSSSGETSWSAVLDVTESGATISKNYDLSDLPGPPSKPQVTDVTKNSVTLSWQPGTPGTLPASAYIIEAFSQSVSNSWQTVANHVKTTLYTVRGLRPNTIYLFMVRAINPQGLSDPSPMSDPVRTQDISPPAQGVDHRQVQKELGDVLVRLHNPVVLTPTTVQVTWTVDRQPQFIQGYRVMYRQTSGLQATSSWQNLDAKVPTERSAVLVNLKKGVTYEIKVRPYFNEFQGMDSESKTVRTTEEAPSAPPQSVTVLTVGSYNSTSISVSWDPPPPDHQNGIIQEYKIWCLGNETRFHINKTVDAAIRSVIIGGLFPGIQYRVEVAASTSAGVGVKSEPQPIIIGRRNEVVITENNNSITEQITDVVKQPAFIAGIGGACWVILMGFSIWLYWRRKKRKGLSNYAVTFQRGDGGLMSNGSRPGLLNAGDPSYPWLADSWPATSLPVNNSNSGPNEIGNFGRGDVLPPVPGQGDKTATMLSDGAIYSSIDFTTKTSYNSSSQITQATPYATTQILHSNSIHELAVDLPDPQWKSSIQQKTDLMGFGYSLPDQNKGNNGESGS

SEQ ID NO: 46758 - protein, 1394 aa, Artificial Sequence
  derived and/or modified sequence
MARRHERVTRRMWTWAPGLLMMTVVFWGHQGNGQGQGSRLRQEDFPPRIVEHPSDVIVSKGEPTTLNCKAEGRPTPTIEWYKDGERVETDKDDPRSHRMLLPSGSLFFLRIVHGRRSKPDEGSYVCVARNYLGEAVSRNASLEVALLRDDFRQNPTDVVVAAGEPAILECQPPRGHPEPTIYWKKDKVRIDDKEERISIRGGKLMISNTRKSDAGMYTCVGTNMVGERDSDPAELTVFERPTFLRRPINQVVLEEEAVEFRCQVQGDPQPTVRWKKDDADLPRGRYDIKDDYTLRIKKTMSTDEGTYMCIAENRVGKMEASATLTVRAPPQFVVRPRDQIVAQGRTVTFPCETKGNPQPAVFWQKEGSQNLLFPNQPQQPNSRCSVSPTGDLTITNIQRSDAGYYICQALTVAGSILAKAQLEVTDVLTDRPPPIILQGPANQTLAVDGTALLKCKATGDPLPVISWLKEGFTFPGRDPRATIQEQGTLQIKNLRISDTGTYTCVATSSSGETSWSAVLDVTESGATISKNYDLSDLPGPPSKPQVTDVTKNSVTLSWQPGTPGTLPASAYIIEAFSQSVSNSWQTVANHVKTTLYTVRGLRPNTIYLFMVRAINPQGLSDPSPMSDPVRTQDISPPAQGVDHRQVQKELGDVLVRLHNPVVLTPTTVQVTWTVDRQPQFIQGYRVMYRQTSGLQATSSWQNLDAKVPTERSAVLVNLKKGVTYEIKVRPYFNEFQGMDSESKTVRTTEEAPSAPPQSVTVLTVGSYNSTSISVSWDPPPPDHQNGIIQEYKIWCLGNETRFHINKTVDAAIRSVIIGGLFPGIQYRVEVAASTSAGVGVKSEPQPIIIGRRNEVVITENNNSITEQITDVVKQPAFIAGIGGACWVILMGFSIWLYWRRKKRKGLSNYAVTFQRGDGGLMSNGSRPGLLNAGDPSYPWLADSWPATSLPVNNSNSGPNEIGNFGRGDVLPPVPGQGDKTATMLSDGAIYSSIDFTTKTSYNSSSQITQATPYATTQILHSNSIHELAVDLPDPQWKSSIQQKTDLMGFGYSLPDQNKGNNGGKGGKKKKNKNSSKPQKNNGSTWANVPLPPPPVQPLPGTELEHYAVEQQENGYDSDSWCPPLPVQTYLHQGLEDELEEDDDRVPTPPVRGVASSPAISFGQQSTATLTPSPREEMQPMLQAHLDELTRAYQFDIAKQTWHIQSNNQPPQPPVPPLGYVSGALISDLETDVADDDADDEEEALEIPRPLRALDQTPGSSMDNLDSSVTGKAFTSSQRPRPTSPFSTDSNTSAALSQSQRPRPTKKHKGGRMDQQPALPHRREGMTDEEALVPYSKPSFPSPGGHSSSGTASSKGSTGPRKTEVLRAGHQRNASDLLDIGYMGSNSQGQFTGEL

SEQ ID NO: 46759 - DNA, 3213 bp, Artificial Sequence
  derived and/or modified sequence
atggcccgaagacatgagagggtgacccgacggatgtggacatgggcaccagggcttctgatgatgactgtcgtgttttggggccatcaaggtaatggccaggggcaagggtccaggctacgtcaggaggactttccacctagaattgtggaacacccctctgatgtgattgtgtcgaagggcgaaccgacaacactaaattgtaaagcagaggggcgcccgaccccaacaattgagtggtacaaggacggcgagagggtggagactgataaagatgaccccaggtctcaccggatgctgctgccgagcggatcccttttcttcctgcggatagtacatggcagacgtagcaaacccgatgaaggcagctatgtgtgtgtggcgcgaaactatctgggagaggcggtctctaggaatgcttcattggaggtcgctttactgagagacgacttccggcagaaccctaccgatgttgtggtggccgccggagaacctgccatcctagaatgtcagcccccgagaggccatcctgaacccacgatatattggaagaaggacaaggtgaggatagacgacaaagaggagcgtatatccattagaggaggcaaactgatgatcagcaacacccggaagagtgacgccggcatgtacacctgcgtgggtacaaacatggtcggggaacgagatagtgatccagccgagctgaccgtgtttgaaaggcctacctttcttcgccggccaataaatcaggtggtactcgaggaagaagcagtggaattcagatgccaggtgcagggagatccgcaacccaccgtccgctggaagaaggacgacgctgatcttcctagaggcagatatgacattaaggacgattacactttgcgcattaaaaagacgatgtcaacggatgaaggaacgtatatgtgcatcgctgagaacagggtgggcaagatggaagcatccgccactctgactgtccgcggtggcgtcattgctccacctcagttcgttgtgaggccccgcgatcagattgttgcccaaggccgtactgtgaccttcccttgcgaaaccaaaggaaacccacaaccagctgttttctggcagaaagagggatcacagaacctgctgtttcctaaccaacctcagcagcccaacagtcgatgttcagtctcccccacaggagacctcaccataacaaatattcagaggagtgacgccggctactatatttgccaggctctgacggttgctgggagcatactggccaaggctcagctcgaagtcaccgacgtcttgacagatagacctccacctattatactacagggccctgctaaccagaccttagccgtggatggcaccgcccttctaaagtgcaaagctaccggggatccactcccagtgatctcctggttgaaggagggtttcactttccctggcagggatccaagagctacaatccaggaacagggcacactgcaaattaagaatctccggatctccgacaccggcacttacacgtgtgttgccaccagtagcagcggcgaaacctcatggtcggccgtccttgatgtgacagagagtggggccactatatccaagaattatgatctatccgatttacccggaccaccgagcaaacctcaggtgacagatgtgaccaagaacagcgtgacactctcctggcagccagggacaccgggcactttgcctgcgagtgcatacatcatagaagccttttctcaatccgtatcaaactcttggcagacggtggcaaaccatgtgaaaacaactctatacacagtcagagggctacggccgaatacgatttacttgttcatggtgcgcgctatcaatccacagggcctgagcgacccatcccctatgtcagacccggtccgcactcaggacatttcacctcccgcccagggtgttgatcatcggcaggtgcagaaagagttgggggatgtgttggtccgcctccacaacccggtggtcctcactcctactacagttcaggttacatggactgtggaccgccagcctcagttcattcagggctatagggtgatgtataggcagaccagtgggcttcaagcaacatcctcctggcagaatctcgacgccaaagtaccaacagaaagatccgcagtgctggtgaatttgaagaagggagtgacctacgagatcaaagtgcgtccatattttaacgagttccaggggatggactccgaaagcaagaccgtgaggaccacagaggaggctccttccgcgcctcctcagtctgtcaccgtgctaacagtagggagttacaattcaacatcaatctccgtgtcttgggaccccccccctccagaccaccagaatggtatcatccaggaatacaaaatttggtgtttgggtaacgaaactcgattccatatcaacaaaaccgttgatgcagccatcagaagtgttattatcggaggactgttccccgggatacagtatagggtagaggtggccgcgtctacgagcgctggcgtgggtgtgaaatctgagccccaaccaattataattggacgacgaaatgaagtggttattaccgagaataacaactctatcacagagcagattactgacgtagtgaagcagccagcattcattgcagggattggtggggcctgctgggtaatccttatgggattttccatttggctgtactggcggcggaaaaaacgcaaaggactgagtaattacgctgtgactttccaaaggggggacgggggactcatgagtaatggctcaagaccggggctcttaaacgcgggtgaccctagttacccctggctggcggatagttggcccgcaacgagtcttcccgtgaataacagcaatagcggccctaacgagattggaaattttggaagaggcgacgtcctaccacctgtgccagggcagggtgacaagacagcaacaatgctttcagatggcgcgatctattcaagtatcgattttactactaagacctcctataattcctccagccagattacccaagctaccccttacgctacgacgcagatcttacatagtaactcaatccacgaattggctgtggacctgccggacccccaatggaagagctcaatccaacagaagacggatttgatggggtttggttacagcttacccgatcagaacaaggggaataatggagagtccgggagctag

SEQ ID NO: 46760 - DNA, 4185 bp, Artificial Sequence
  derived and/or modified sequence
atggccaggcgtcacgaacgggttacgcggcgtatgtggacatgggctcccggactcctgatgatgaccgtggtgttttggggacaccaaggaaacgggcaaggacaaggcagcagactcagacaggaagacttcccacctcgcatcgtcgaacacccatcggatgtaatcgtctctaagggcgaacctactactctaaactgcaaagctgagggcaggccgacccccaccattgaatggtacaaggacggagaacgagtggaaacagataaagacgacccgcgatcccaccggatgttgttaccaagcgggtcactgttttttcttagaattgttcatggacggaggtcaaaacccgatgagggtagctacgtctgtgtggctcgcaattaccttggcgaagctgtaagtaggaacgcctcattggaggttgctctgctccgcgacgatttcaggcagaatcctactgacgtggtagtggccgccggcgagccagctatcctagagtgccagcctccccgcggccaccctgaacccacaatctactggaaaaaagataaggtacggatcgacgacaaagaagagcgaatttccatccgcggtggtaagctgatgatctccaatacccgcaagagtgacgctggaatgtatacatgcgtcggcacgaacatggtgggtgaaagggatagcgatcccgcagagctaaccgtgtttgagaggcccacatttctgaggaggccaattaaccaggtcgtcctcgaagaagaggcggtggagttcagatgccaagttcagggcgacccacaaccgactgtgcgttggaagaaggacgacgctgacctaccccgggggcgatatgacataaaagatgattataccctgcgaatcaagaagacaatgtctacagatgaagggacttacatgtgtatcgctgagaatcgggtaggcaaaatggaggcctccgctacactcacggtgcgcgctccccctcagtttgtagttcggcctagggaccagattgtcgcccaaggccggactgtcacttttccgtgtgagacgaagggaaacccgcaacccgcagtgttctggcagaaggaggggagtcagaaccttctctttcccaaccaaccccagcagcccaattcccgatgttccgtatcacccacaggagacctaaccatcaccaacatccaacgcagtgatgcgggttactacatttgtcaagcactgactgtggccggctccattctggctaaggcacagttagaggtgacggacgttctaacagaccgtcctcctccaattatcctccagggacccgccaatcagactctcgccgtggacggcaccgccctgctgaaatgtaaggctactggcgatccattgccagtaataagctggctgaaggagggcttcactttccctggacgagatccacgtgcgactatccaggaacaaggtaccctgcaaatcaagaatctacggatatctgataccggtacctacacctgcgtggccacctcgagctcaggtgagaccagctggagtgcggtgttggacgtaactgagagtggagcaaccataagcaagaactacgacttgagcgatttacccggcccacctagcaaacctcaggtcacggacgtgacaaaaaatagtgtgacactctcctggcagcctgggaccccagggacactaccggcatctgcctatattatcgaggcattttctcaaagcgtgtcaaattcttggcagaccgtcgccaaccacgtgaagacaactctgtacacagtgcgaggcttacgcccaaatactatctacctgtttatggttagggccatcaacccccagggcctgtccgacccctccccaatgtctgatccagtccgaacgcaagacatctctccccccgcacaaggagtggatcatcggcaggtgcaaaaggagctgggcgacgtcctggtgcgcctccacaatccggtggtgcttacccctactacggtgcaggttacttggacagtggatcgacaacctcagttcatccagggctatcgtgtaatgtacagacagacctcaggtctgcaagccacaagcagttggcagaacctcgacgccaaggtgcccaccgaaagatctgctgtgctggtcaatcttaagaaaggtgtaacatacgaaataaaagtacgcccgtactttaacgaattccaaggcatggattcggagtctaaaactgtacgaacaaccgaggaggctccctcagctcctcctcaaagtgttacagtgctcacagtcggaagctataacagtactagtatcagcgtgtcttgggacccacctcctcccgatcaccagaatgggattatacaggagtacaaaatctggtgcctgggcaatgagacacgattccatatcaataagacagtggatgccgccattcgatctgttatcattggaggcctgttcccaggcattcagtacagagtagaagtcgcggcctccacctctgctggagtcggagttaagtctgagccccaacctatcatcattggcagacgcaacgaggtggttattactgagaacaacaactctattacggagcagatcacagatgtggttaagcagccagccttcattgccgggattggcggtgcttgttgggtgatattaatggggtttagcatctggctgtattggcggagaaaaaagaggaagggtctgtctaattacgctgttaccttccagagaggcgacggaggactgatgtccaatggatctcgcccaggactgctgaacgcgggggatccaagctatccttggttggccgattcatggccggctacctcactccccgttaacaactctaattcaggtcctaatgaaattgggaatttcggacgaggcgacgtgctgcccccggtcccgggacagggagacaaaacggctaccatgctgtcagacggagctatctactccagcatcgacttcacaaccaaaacgtcatataactcatcctcacagatcacacaggctactccctacgccacaacccagatcctgcactctaactccatccacgagcttgctgtcgacctgccggaccctcagtggaaaagcagcattcaacaaaagaccgatctgatgggcttcggctactccctgccagatcagaacaaaggcaataacggaggaaagggcggtaagaagaaaaagaacaagaactcatctaagcctcaaaaaaacaatggctccacatgggccaatgtgcctctgcccccccctccagttcaacccctgcccgggaccgagctcgagcactatgctgttgaacagcaggaaaacggttatgactcggatagctggtgtcctccgctccccgtgcagacctatttacaccaaggtctggaagatgaactggaggaggatgacgacagggtgcccacccctcctgtgagaggcgttgcatcatctcccgcgataagtttcggacagcagtcgaccgccacgcttacacctagtcccagggaagaaatgcagccgatgttgcaagcacacctcgacgagctaaccagggcgtatcagttcgatatagccaagcagacttggcacatccaaagcaacaatcagccaccacaaccaccggtacctcctctcggctatgtttcaggtgcccttattagcgacttggagaccgacgtggcggacgatgatgctgatgatgaggaagaagccttagaaatcccgagacctctcagggctcttgaccagactccaggctccagcatggacaacctagactcatctgttacaggaaaagccttcacttcctcgcaacggccccggcccacctcaccctttagcaccgacagcaacacaagcgccgcactgtcgcagtcccagagaccacgcccaaccaaaaaacacaaagggggaagaatggatcagcagcccgctttgccgcatcgacgggaaggcatgactgatgaagaggccttagtgccctattcaaagcctagttttccctctcctggaggccattcttctagcggcacggctagctctaaaggctctaccggaccacgcaagacagaggtgctgagagcaggacaccagaggaacgcctcggatctcctggacataggttacatgggcagcaactctcagggccagttcactggagaactgtag

SEQ ID NO: 46761 - DNA, 4185 bp, Artificial Sequence
  derived and/or modified sequence
atggccagaaggcatgagagggtcactcggcggatgtggacctgggcccctggccttctcatgatgactgtcgtgttttggggccatcaggggaatgggcaggggcaggggagtagactgagacaggaggattttccaccacgaattgtagagcatccctcagacgtaatcgtaagcaagggagagccaactactctgaattgtaaggccgagggccggcctacccccacgatcgagtggtataaagatggggaaagggtggagaccgacaaagacgacccgcggtcccaccgaatgcttctgccttctggctccttattcttcctgaggatcgtccacgggcgccgctcgaaacctgacgagggatcttacgtgtgtgtagccaggaattatttgggtgaggcggtttcgcggaacgcaagtctggaggtagcacttctgcgagatgattttaggcagaaccctacagacgtggttgtggctgctggtgaacccgccatattagaatgtcagccacccagaggacacccggagcctacaatctattggaagaaggataaagtcagaatcgacgataaggaggaaagaattagcataagaggtggcaaactgatgatcagtaatacaaggaagagtgacgccggcatgtatacatgcgtgggaacaaatatggtcggggagagagattctgatccagccgagctgactgtcttcgaacggccaacattcctcaggagacccattaatcaggttgtgctggaggaagaggctgttgagtttcggtgtcaggtccaaggagaccctcaaccgacagtgagatggaagaaagacgacgcagacctgccccgcggccgatatgatatcaaagacgactacaccctgcgcattaagaaaaccatgtcaacagatgagggcacgtatatgtgtattgctgagaaccgggttggcaagatggaggcttcagctaccctgactgtccgcgccccaccccaatttgtggtcagaccgcgcgaccaaatcgtcgcccagggacgcacagttaccttcccctgtgaaacaaaagggaacccacagccagcagtgttttggcaaaaagagggctctcagaacctgctctttccgaaccagccgcagcagcccaatagccgctgctccgtgtcccccacgggtgacctgacaattacaaatatccagcggtcggacgccggttattatatttgccaggctctcactgtggctggcagtattttagcaaaagcacagctggaagtcactgatgtgctgaccgatagaccccctcctattatcctgcagggccccgccaatcaaacattggccgtggacgggactgccttgttaaagtgcaaagctacgggagacccacttcctgtgatttcttggctcaaggaggggttcaccttcccgggcagggatcctcgggcaacaattcaggaacaggggactcttcagataaaaaatctccggatctctgacacgggaacatacacctgcgttgccaccagctcctctggggagaccagctggtcagctgtacttgacgtgacagaatctggagccaccatcagcaaaaattatgacctatcggacctccccggtccgccttcaaagccccaggtgaccgatgtgaccaaaaactccgtgactctgagctggcagccaggcacccccggtacactccctgctagcgcttatataatcgaggcattcagccagtcagtcagcaattcttggcaaactgttgccaaccatgttaaaactacactctatacggtgagagggctccggcccaacaccatttacttgttcatggtcagggccattaacccccaggggctcagcgatccttctcctatgagtgaccctgtacgaacccaggatatctcaccgccagcccagggcgtggaccaccggcaagtgcagaaggagctcggagacgtcctcgtacggctgcataatcctgtagtattgactccaacgaccgtgcaggtgacctggactgtggatcgtcaaccacagttcatccagggatatagggttatgtaccgccagacaagtggacttcaggccacaagctcttggcagaacttggatgctaaggttccaaccgagcgctcagctgtcctggtgaatttgaaaaagggcgtgacctacgaaatcaaagtgcggccctattttaacgagttccagggcatggacagtgagtccaagaccgtgcgcaccacagaggaggcaccaagcgcccctcctcagtctgtgacagtgttaacggtaggttcctataacagcacctccatctctgtgtcatgggatccacctcctccagatcatcagaatgggattattcaggaatataaaatttggtgcctcgggaacgaaacccgctttcacatcaacaaaacagtggatgctgccataagatctgtgataatcggtgggctgttccctggcatccagtatagggtagaggtggcggcctccactagtgctggggttggcgtaaaaagtgaacctcagccaattattattggccggcggaacgaagtggtgattactgaaaacaataatagcatcactgagcaaatcacggatgtcgtgaagcagcccgcgttcattgctggtatcggcggagcatgctgggtgattctgatgggcttctctatatggctgtattggcgtagaaaaaagaggaaagggttgagcaattacgcagtgaccttccagcgtggggatgggggactgatgtctaatggctcacggccaggactgctgaatgctggagatccttcatacccctggttggcagactcgtggcctgccactagcctgcccgtaaacaactcaaacagtggaccaaacgaaatcggcaattttggcaggggagacgtccttccaccagtgccaggccagggggacaagacagcaaccatgctcagcgatggcgccatatacagctccatcgatttcacgacaaaaacgagctacaattcaagttcccagataactcaggccactccttacgccactacacagattctccatagcaatagcattcacgagcttgccgtagacctgccggaccctcagtggaaaagctccattcaacagaagacggacctcatgggcttcggatattctctccccgatcagaataaaggaaataatggtggcaagggaggcaagaagaaaaaaaacaagaattcttctaagcctcagaagaataacggcagcacctgggctaacgttcccctccctcctccccctgtgcaaccactgcctggaacagaactggagcactatgctgtggagcagcaggagaatggctatgattcagacagttggtgtccccccctgccggttcagacgtatcttcatcagggcctcgaggatgaacttgaggaagacgacgaccgggtcccaacacccccagtacgaggcgtggccagcagcccagcaattagctttggccaacagagcactgccacacttactccaagcccccgggaggaaatgcaacctatgctgcaggcccaccttgacgagctaacccgagcgtatcaatttgacatcgcgaagcagacctggcacattcagtcgaataatcagccacctcagcctcccgtacctcctctaggatatgtcagcggagctttgatcagtgatctcgagacagacgtggcggacgatgatgccgacgatgaggaagaagcgctggagatccctcgacccctgcgggcacttgatcagacaccgggatcaagcatggacaatcttgactcctcagtgaccggcaaggcatttaccagtagccaacgccccagacccacctcaccattttctactgattcaaatacgtctgcggccctcagtcagtcccagcgccctaggcctacaaagaaacacaaggggggtagaatggatcagcagccagccctcccgcacaggagagaagggatgaccgacgaagaggcacttgtcccctacagcaaaccttcctttccaagcccaggtggccattccagcagcggtaccgccagttctaaagggagcactggcccaaggaagacagaagtgctgcgggcagggcatcagcggaacgcctcagacttgctggacatcggatacatgggatcaaattcccaaggccagtttacaggtgaattatag

SEQ ID NO: 46762 - DNA, 3213 bp, Artificial Sequence
  derived and/or modified sequence
atggccaggagacatgagcgggtgaccaggaggatgtggacctgggcccctggcctgctgatgatgacagtggtgttctggggccaccagggcaatggccagggccagggcagccggctgcggcaggaggacttccccccaagaattgtggagcaccccagtgatgtgattgtgtccaagggggagcccaccaccctgaactgcaaggccgagggccggcccacccccaccatcgagtggtacaaggatggagagcgggtggagacagacaaggatgaccccaggagccacaggatgctgctgcccagcggcagcctcttcttcctgagaattgtgcatggaagaagaagcaagccagatgagggcagctatgtgtgtgtggccaggaactacctgggggaggccgtgtccagaaatgccagcctggaggtggccctgctgagagatgacttccggcagaaccccacagatgtggtggtggccgccggggagcccgccatcctggagtgccagcccccccggggccaccctgagcccaccatctactggaagaaggacaaggtgagaattgatgacaaggaggagcgcatcagcatccggggcggcaagctgatgatcagcaacaccaggaagagtgatgctggcatgtacacctgtgtgggcaccaacatggtgggggagcgggacagcgaccctgctgagctgactgtgtttgagcggcccaccttcctgcggcggcccatcaaccaggtggtgctggaggaggaggccgtggagttccgctgccaggtgcagggcgacccccagcccaccgtgcgctggaagaaggatgatgctgacctgccccggggccgctatgacatcaaggatgactacaccctgcgcatcaagaagaccatgagcacagatgagggcacctacatgtgcatcgccgagaacagagtgggcaagatggaggccagcgccaccctgactgtgcggggcggcgtgattgccccaccccagtttgtggtgcggccccgggaccagatcgtggcccagggccgcacagtgaccttcccctgtgagaccaagggcaacccccagcctgctgtgttctggcagaaggagggcagccagaacctgctcttccccaaccagccccagcagcccaacagccgctgcagcgtgagccccactggagacctgaccatcaccaacatccagaggagtgatgctggctactacatctgccaggccctgactgtggccggcagcatcctggccaaggcccagctggaggtgacagatgtgctgacagaccggcccccacccatcatcctgcagggccctgccaaccagaccctggccgtggatggaacagccctgctgaagtgcaaggccaccggggaccccctgcctgtgatctcctggctgaaggagggcttcaccttccctggccgggacccccgggccaccatccaggagcagggcaccctgcagatcaagaacctgcgcatcagtgacaccggcacctacacctgtgtggccaccagcagcagcggggagacctcctggagcgctgtgctggatgtgacagagagcggggccaccatcagcaagaactatgacctgagtgacctgcccggcccccccagcaagccccaggtgacagatgtgaccaagaacagcgtgaccctgtcctggcagcccggcaccccaggcaccctgcctgccagcgcctacatcatcgaggccttcagccagagcgtgagcaacagctggcagacagtggccaaccacgtgaagaccaccctgtacacagtgcggggcctgcggcccaacaccatctacctgttcatggtgcgggccatcaacccccagggcctgagtgaccccagccccatgtctgaccctgtgaggacccaggacatcagccccccagcccagggcgtggaccaccggcaggtgcagaaggagctgggagatgtgctggtgcggctgcacaaccctgtggtgctgacccccaccaccgtgcaggtgacctggacagtggaccggcagccccagttcatccagggctacagagtgatgtaccggcagaccagcggcctgcaggccaccagctcctggcagaacctggatgccaaggtgcccacagagaggtctgctgtgctggtgaacctgaagaagggcgtgacctatgagatcaaggtgcggccctacttcaatgagttccagggcatggacagcgagagcaagacagtgaggaccacagaggaggcccccagcgccccaccccagagcgtgacagtgctgactgtgggcagctacaacagcaccagcatctctgtgtcctgggaccccccacctccagaccaccagaatggcatcatccaggagtacaagatctggtgcctgggcaatgagacccgcttccacatcaacaagacagtggatgctgccatccgcagcgtcatcattggaggcctcttccctggcatccagtacagagtggaggtggccgccagcaccagcgctggggtgggcgtgaagtctgagccccagcccatcatcattggaagaagaaatgaggtggtgatcacagagaacaacaacagcatcacagagcagatcacagatgtggtgaagcagcctgccttcatcgccggcattggaggagcctgctgggtgatcctgatgggcttcagcatctggctgtactggaggaggaagaagaggaagggcctgagcaactatgctgtgaccttccagagaggagatggcggcctgatgagcaatggcagcaggcctggcctgctgaatgctggggaccccagctacccctggctggccgacagctggccagccaccagcctgcctgtgaacaacagcaacagcggccccaatgaaattggcaactttggaagaggagatgtgctgccccctgtgcccggccagggcgacaagacagccaccatgctgagtgatggagccatctacagcagcattgacttcaccaccaagaccagctacaacagcagcagccagatcacccaggccaccccctatgccaccacccagatcctgcacagcaacagcatccacgagctggccgtggacctgcctgacccccagtggaagagcagcatccagcagaagacagacctgatgggcttcggctacagcctgcctgaccagaacaagggcaacaatggagagagcggcagctag

SEQ ID NO: 46763 - DNA, 4185 bp, Artificial Sequence
  derived and/or modified sequence
atggccaggagacatgagcgggtgaccaggaggatgtggacctgggcccctggcctgctgatgatgacagtggtgttctggggccaccagggcaatggccagggccagggcagccggctgcggcaggaggacttccccccaagaattgtggagcaccccagtgatgtgattgtgtccaagggggagcccaccaccctgaactgcaaggccgagggccggcccacccccaccatcgagtggtacaaggatggagagcgggtggagacagacaaggatgaccccaggagccacaggatgctgctgcccagcggcagcctcttcttcctgagaattgtgcatggaagaagaagcaagccagatgagggcagctatgtgtgtgtggccaggaactacctgggggaggccgtgtccagaaatgccagcctggaggtggccctgctgagagatgacttccggcagaaccccacagatgtggtggtggccgccggggagcccgccatcctggagtgccagcccccccggggccaccctgagcccaccatctactggaagaaggacaaggtgagaattgatgacaaggaggagcgcatcagcatccggggcggcaagctgatgatcagcaacaccaggaagagtgatgctggcatgtacacctgtgtgggcaccaacatggtgggggagcgggacagcgaccctgctgagctgactgtgtttgagcggcccaccttcctgcggcggcccatcaaccaggtggtgctggaggaggaggccgtggagttccgctgccaggtgcagggcgacccccagcccaccgtgcgctggaagaaggatgatgctgacctgccccggggccgctatgacatcaaggatgactacaccctgcgcatcaagaagaccatgagcacagatgagggcacctacatgtgcatcgccgagaacagagtgggcaagatggaggccagcgccaccctgactgtgcgggccccaccccagtttgtggtgcggccccgggaccagatcgtggcccagggccgcacagtgaccttcccctgtgagaccaagggcaacccccagcctgctgtgttctggcagaaggagggcagccagaacctgctcttccccaaccagccccagcagcccaacagccgctgcagcgtgagccccactggagacctgaccatcaccaacatccagaggagtgatgctggctactacatctgccaggccctgactgtggccggcagcatcctggccaaggcccagctggaggtgacagatgtgctgacagaccggcccccacccatcatcctgcagggccctgccaaccagaccctggccgtggatggaacagccctgctgaagtgcaaggccaccggggaccccctgcctgtgatctcctggctgaaggagggcttcaccttccctggccgggacccccgggccaccatccaggagcagggcaccctgcagatcaagaacctgcgcatcagtgacaccggcacctacacctgtgtggccaccagcagcagcggggagacctcctggagcgctgtgctggatgtgacagagagcggggccaccatcagcaagaactatgacctgagtgacctgcccggcccccccagcaagccccaggtgacagatgtgaccaagaacagcgtgaccctgtcctggcagcccggcaccccaggcaccctgcctgccagcgcctacatcatcgaggccttcagccagagcgtgagcaacagctggcagacagtggccaaccacgtgaagaccaccctgtacacagtgcggggcctgcggcccaacaccatctacctgttcatggtgcgggccatcaacccccagggcctgagtgaccccagccccatgtctgaccctgtgaggacccaggacatcagccccccagcccagggcgtggaccaccggcaggtgcagaaggagctgggagatgtgctggtgcggctgcacaaccctgtggtgctgacccccaccaccgtgcaggtgacctggacagtggaccggcagccccagttcatccagggctacagagtgatgtaccggcagaccagcggcctgcaggccaccagctcctggcagaacctggatgccaaggtgcccacagagaggtctgctgtgctggtgaacctgaagaagggcgtgacctatgagatcaaggtgcggccctacttcaatgagttccagggcatggacagcgagagcaagacagtgaggaccacagaggaggcccccagcgccccaccccagagcgtgacagtgctgactgtgggcagctacaacagcaccagcatctctgtgtcctgggaccccccacctccagaccaccagaatggcatcatccaggagtacaagatctggtgcctgggcaatgagacccgcttccacatcaacaagacagtggatgctgccatccgcagcgtcatcattggaggcctcttccctggcatccagtacagagtggaggtggccgccagcaccagcgctggggtgggcgtgaagtctgagccccagcccatcatcattggaagaagaaatgaggtggtgatcacagagaacaacaacagcatcacagagcagatcacagatgtggtgaagcagcctgccttcatcgccggcattggaggagcctgctgggtgatcctgatgggcttcagcatctggctgtactggaggaggaagaagaggaagggcctgagcaactatgctgtgaccttccagagaggagatggcggcctgatgagcaatggcagcaggcctggcctgctgaatgctggggaccccagctacccctggctggccgacagctggccagccaccagcctgcctgtgaacaacagcaacagcggccccaatgaaattggcaactttggaagaggagatgtgctgccccctgtgcccggccagggcgacaagacagccaccatgctgagtgatggagccatctacagcagcattgacttcaccaccaagaccagctacaacagcagcagccagatcacccaggccaccccctatgccaccacccagatcctgcacagcaacagcatccacgagctggccgtggacctgcctgacccccagtggaagagcagcatccagcagaagacagacctgatgggcttcggctacagcctgcctgaccagaacaagggcaacaatggaggcaagggcggcaagaagaagaagaacaagaacagcagcaagccccagaagaacaacggcagcacctgggccaacgtgcccctgcccccacctcctgtgcagcccctgcctggaacagagctggagcactatgctgtggagcagcaggagaatggctatgacagcgacagctggtgcccccccctgcctgtgcagacctacctgcaccagggcctggaggatgagctggaggaggatgatgacagagtgcccaccccacctgtgcggggcgtggccagcagccctgccatcagctttggccagcagagcacagccaccctgacccccagcccccgggaggagatgcagcccatgctgcaggcccacctggatgagctgacccgggcctaccagtttgacatcgccaagcagacctggcacatccagagcaacaaccagcccccccagccccctgtgccccccctgggctacgtgtctggggccctgatcagtgacctggagacagatgtggctgatgatgatgctgatgatgaggaggaggccctggagatcccccggcccctgcgggccctggaccagaccccaggcagctccatggacaacctggacagctctgtgacaggcaaggccttcaccagcagccagaggccccggcccaccagccccttcagcacagacagcaacaccagcgctgccctgagccagagccagaggccccggcccaccaagaagcacaagggcggccgcatggaccagcagcctgccctgccccacagaagagagggcatgacagatgaggaggccctggtgccctacagcaagcccagcttccccagccctgggggccacagcagcagcggcacagccagcagcaagggcagcacaggccccaggaagacagaggtgctgcgggccggccaccagagaaatgccagtgacctgctggacatcggctacatgggcagcaacagccagggccagttcaccggggagctgtag

SEQ ID NO: 46764 - DNA, 3213 bp, Artificial Sequence
  derived and/or modified sequence
atggcccggcggcacgagcgggtgacccggcggatgtggacctgggctcctgggctcctgatgatgacagtggtcttttggggacaccaggggaacggacagggtcaggggagtcgactccgacaggaagattttccaccaagaatcgtcgaacacccctccgatgtcatcgtttccaaaggggagcctacaaccctgaactgtaaggcagaggggcggcctacccctacgattgagtggtataaggacggagaacgggttgagactgataaggacgacccgcggtcacacagaatgctactgccctccgggtctctgttcttcctacgaatagtccacgggcgtcgttctaagccagatgaaggcagttacgtgtgtgtcgcccggaattacctgggtgaagccgtctcccgtaacgcaagcctggaggtagctcttctgagggacgatttccgccaaaatccaaccgatgtggtggtagcagctggcgagccggcaatccttgagtgtcaaccccccaggggccacccagagcccaccatttattggaagaaggataaggtcagaatagacgacaaggaagaacgcatctccattcgcgggggaaagttaatgatatccaacacacgcaaaagtgacgcgggaatgtacacgtgcgtggggaccaacatggtgggcgagcgcgatagtgatccagccgagttgacggtgttcgaacgtccaacatttctgcggaggcccattaaccaagtcgtgttagaagaagaggccgtcgaatttcgctgtcaagtccaaggggacccgcagccaacagtcagatggaaaaaagatgatgccgatcttccccggggccgttatgatattaaagatgactacacacttaggattaaaaaaaccatgagtacggacgagggcacctatatgtgtatcgccgagaatagagtgggtaagatggaagccagcgcaactttgactgttcgtgggggcgtgattgcccccccccagttcgtcgtgaggccccgggaccagatcgtggcacaaggccggacagttactttcccttgcgaaaccaaaggcaatccccagccagccgtattctggcagaaagaaggctcacagaatctgttgttccctaaccaacctcaacaacccaactcccggtgctctgtttcacccaccggcgatctcactatcacaaatattcaacgtagcgatgctggctattacatttgccaggccttgacggtggcaggatccatactggccaaagctcagctggaggtaacagacgttttgactgacaggcctcctccaataatcctccaagggcctgccaaccagacattggccgtagacggaaccgcccttctgaaatgcaaagcgacgggtgatcccctgccggtcatctcttggctcaaggagggatttacattccccggacgggatcccagagctaccattcaggaacagggcaccttgcagattaagaacctgaggataagtgacaccggtacgtacacatgtgtcgcgacatcctctagcggcgagacgtcctggagtgctgtgctggacgtcactgaaagtggtgctacgatctccaagaactatgatttgagtgatttgccaggacccccctctaaacctcaggtgactgacgtgactaaaaactctgtgactctcagttggcagccaggcacccccgggacgctgcctgcatcagcctacatcatagaggccttctcacagagcgtcagtaattcttggcaaacagtcgccaaccatgttaagacaactctgtacaccgtcagaggcctgaggcccaataccatctacctgttcatggttcgcgccatcaacccgcagggtctttccgacccatccccgatgtcagacccagttaggactcaggatatctctccccctgcacagggggtggaccatcgacaggtgcagaaggagctgggcgacgtgttggttcggctgcataaccccgtcgttctaacccctacgacagtgcaggtaacctggacggtagacagacagccacagtttattcagggctacagggtaatgtatagacagacatctgggctacaagcgacatcaagctggcagaaccttgacgcaaaggtgcctacagaaaggagcgctgtgcttgtgaatcttaagaagggggtaacctacgaaatcaaggttaggccatactttaacgaatttcagggcatggatagcgagtcaaaaacggtcaggactactgaagaggccccatccgcgcctcctcagagcgtcaccgtactcacagtggggagttacaactccacgtccatcagtgtaagttgggatcctcctcctccagaccaccagaacggtatcattcaggagtacaagatttggtgtctcggcaacgagacccgattccatatcaacaagacagtcgatgctgccatcaggtccgtgattattggagggctgttccctggaatacagtaccgagtcgaagtagctgcctccacctcagcaggggtcggtgtcaaatccgaaccacaacccatcattataggacggcggaacgaggtggtcatcacagaaaataacaactcaattacagaacagatcaccgatgtggtgaagcagccagcctttattgccggtatcgggggcgcctgttgggtgatcctgatgggtttcagcatctggttgtactggcgacgtaagaaaagaaaaggattatccaactatgcagttacttttcagcgaggggatggcggtctgatgagcaacggatcaaggcctggtctgctaaatgctggggaccccagttacccctggctcgccgattcctggcctgccacttccctgcccgtgaataatagcaattccggccccaacgaaatcggcaattttgggcggggggacgtccttccaccggtgcctggccagggggacaaaaccgcaactatgctctcagacggagctatctacagcagcattgatttcacaaccaagactagctacaactcctcatcacagatcacccaagccactccttatgcaaccacacaaatcctgcactctaactcaattcatgaactagctgtggatttacccgatcctcagtggaaaagcagtattcagcagaaaactgacttgatgggctttggttactctttgcctgatcagaacaaagggaataacggagagtcgggtagctag

SEQ ID NO: 46765 - DNA, 4185 bp, Artificial Sequence
  derived and/or modified sequence
atggcccggcggcacgagcgggtgacccggcggatgtggacctgggccccaggtctcctcatgatgaccgtcgtattttggggtcaccagggcaatggacagggtcagggcagtcggttgcgacaggaggactttccgccccggatcgttgaacatccttctgacgtgattgtttcgaaaggggagccgaccactcttaattgcaaagcagaagggcgacctacaccaacaatcgagtggtacaaagacggggagagggtggaaaccgataaggacgatccccgatcccacagaatgttgctcccttcagggtcgctcttcttcttgagaatcgtgcacggtcggaggagtaaaccagacgagggctcatacgtatgcgttgcacgtaactatctaggggaagcggtaagccggaatgcaagccttgaggtggccctcctgcgggatgacttccgacagaatccaacagacgtcgtcgttgcagccggagagccagcgatcctggagtgtcagccaccacgaggccacccagaacctacaatatactggaagaaagataaggtccggattgatgataaggaggagagaatatccatacgaggcggaaaactgatgatttccaatactagaaagtctgatgccggcatgtacacttgcgtggggactaacatggtgggcgaacgcgatagcgatccagcagagctgaccgtgttcgaaaggcctacgttcctaaggcgaccgattaaccaagtagtgctagaggaagaggctgtggagttcagatgccaagttcagggggacccccagcccactgtccggtggaagaaagacgacgcagacttgcccagaggccgatacgacatcaaggacgattacaccctgagaatcaagaagactatgagtacggatgagggtacctatatgtgtattgcagaaaatagagtaggcaaaatggaagcatccgccacactcaccgtgcgtgcccctccccagttcgtcgtgagaccacgagaccaaatcgtagcccaaggcaggacagtaacctttccctgtgagaccaaaggcaatcctcaaccggccgtcttctggcaaaaagaggggtctcagaatctgttgttcccaaatcagccacagcagcctaactctaggtgttctgtgtcacctaccggagatctgaccattacgaacatccagagatccgatgctggctactacatctgccaggcgctgacagttgccggtagcattcttgccaaagcccagctagaggtgactgacgtgctcacagatcgtcctccgcccatcattctgcagggaccagccaaccaaacattagctgtggatggtaccgcacttctgaagtgcaaggctacaggggatcccctgcctgtgatttcatggttgaaggagggtttcacattccctggaagagatccgcgcgccactatccaggagcaaggcactctgcagattaagaatctgagaatttcggatacaggcacctatacctgtgtggccactagctcctccggcgaaacttcttggtccgctgtgctggatgttactgaatccggggctactatttccaagaactacgatttaagtgacctgcctgggcctcccagtaagccacaggtgacggacgtgactaagaactcagttacgctctcctggcagcctggaactcccggcaccctccccgcatccgcttatataattgaggccttcagtcagtccgtgagtaattcctggcagacagtggcgaatcacgtgaaaactaccctgtatactgttcggggcttgagaccaaacactatttacctgttcatggtgcgggcaataaatccacagggactgtcagacccctcccctatgtctgaccctgtcaggactcaggacattagccctccagcacaaggggtggatcatcgtcaggtgcagaaggagttgggggatgttctggtgaggcttcataatcctgttgttctgaccccgacaacagtgcaggtcacatggactgtcgatcgtcaaccccagttcattcaagggtaccgcgtgatgtaccgccagacatctgggcttcaggctacgtcgtcatggcagaacctcgacgctaaggtgccgacagagcgctctgcagttctggtcaatttaaagaaaggcgtcacatacgaaattaaagtgagaccttacttcaacgagttccaaggaatggacagcgagtcaaaaacggtcaggacaaccgaggaggccccatcagcccccccacagagtgtcactgtcctcactgtggggtcctacaattctacttctatttctgtcagctgggacccccctccgccagaccaccaaaacggcataatccaggagtacaagatctggtgcttaggcaacgagaccagattccacattaacaagaccgttgatgctgctattcgaagcgttatcattggcgggttatttcccggcatccaataccgggtcgaggttgccgcctcaacgtcggcgggtgttggtgtgaagtctgagccccaacctataataatcggcagacgcaatgaggttgtgattactgaaaacaataactcgataaccgagcaaatcaccgatgtagtgaagcagcccgcgttcatcgcaggaatcggtggtgcgtgctgggttattttgatgggcttctcgatttggctgtactggcggcggaagaagcgcaaaggactgtcgaattatgctgtgacatttcagagaggtgatggtggtcttatgagcaacggtagtcggcctggactgctgaatgccggcgatccttcttacccttggctcgccgattcatggccggccacttctcttccagtcaataattccaattctggccccaatgaaattggtaactttggccgcggggacgtgcttccaccagtcccgggacaaggggataaaacagcgaccatgttatcagacggcgccatatatagcagcatcgacttcaccacaaagacatcttataactcttcatcacagattacccaagcaaccccttatgcaacaacacagatactccactccaatagtatccacgaactggcggtagaccttcccgatcctcaatggaagtcttccatccagcagaaaaccgatctgatgggttttggctacagtctgcccgaccaaaacaaaggcaataatggcggtaagggcggaaagaaaaaaaaaaacaagaattctagtaaacctcagaaaaacaatgggtccacctgggctaatgttcccctgcctccgccccctgtgcagccactgccgggaactgaactggagcattacgctgtggagcagcaagaaaacgggtatgatagcgatagttggtgcccccctctcccagtgcagacctacttgcaccaaggccttgaggacgagctcgaagaagacgatgatcgcgtccccacccctccggttagaggagtcgctagtagtcctgctatctccttcggccagcaaagcacagccactcttacaccatcacccagagaggagatgcagcccatgctccaggcacacctcgatgaactcacccgtgcctatcaattcgacatagccaaacagacatggcatatccagtccaataatcagcccccacagcctcccgtgcctcctctgggatatgtgtctggtgcactcataagcgatctcgaaaccgatgttgccgacgatgatgccgatgacgaggaggaagcactagagataccacggcctctgcgcgctctggaccaaacccctggctcttcaatggataatctggactcctcagtcactggaaaagcttttaccagcagccagcgccccagacccacttcacctttcagtaccgatagtaatactagcgcagccctgtcccagagtcagcgaccacgccctaccaagaaacataaaggcgggaggatggaccaacagcccgcactcccgcaccgtcgggagggcatgacagatgaagaagccctggtaccatacagcaagccctcatttccgagccccggcggtcattcatcttctggaacagcatcgagcaagggatcgaccgggccaaggaaaacagaggtgctccgcgcagggcaccagagaaatgccagcgacctcctagacattggctacatgggcagcaacagtcagggtcagttcacgggagagctctag

SEQ ID NO: 46766 - DNA, 4185 bp, Artificial Sequence
  derived and/or modified sequence
atggcccggcggcacgagcgggtgacccggcggatgtggacctgggcaccaggcctactgatgatgaccgtagtcttctggggtcaccagggcaacgggcagggacaaggctccagactgaggcaggaagatttccctccgagaattgttgaacatccctccgacgtcatcgtgtccaagggcgagcctacaacactgaactgcaaggccgagggccgccctacccccacgattgagtggtacaaggatggtgaacgagttgagacagataaggacgaccccaggtctcatagaatgctgcttccctccggttcactgttcttcctacgaatcgtacacggtaggcgaagcaaacccgacgagggctcttacgtgtgtgtggctaggaactatctcggcgaagcggtgagtcgcaatgctagtcttgaagtcgccttactgagggacgatttccgccagaaccccaccgatgtggttgtcgccgctggtgagcccgctatcctagagtgccagcccccacggggacacccagaacccacaatatattggaagaaggacaaggtgcgcatcgatgataaggaagaaagaatctctatcagggggggtaagttgatgatatcaaatactaggaaatccgatgcaggtatgtatacctgcgtcggtaccaatatggtgggggaaagggactcagatcctgctgagttgacagtatttgagagacccaccttccttagacggcctattaatcaggtggtgctggaggaagaggcggtcgagttccgatgtcaggtacagggagatccacagcctacagtgcgctggaagaaggatgatgctgatttaccacgagggcggtatgatatcaaggacgattacactcttcggatcaaaaaaacaatgtcaacagatgaaggcacttacatgtgcatcgccgagaatagagtgggcaagatggaagcttccgcaactctcacagtcagggctcctccccagtttgtggtcagaccccgcgaccaaattgtcgcccaggggagaaccgtgacctttccttgcgaaaccaaagggaacccacaaccagccgtcttttggcagaaagagggctcacagaacctgttgtttccaaaccagcctcaacagccaaattctaggtgcagcgtcagtcctactggggacctcacaatcacgaatatacaacggtcagacgccgggtactatatttgccaagctctgaccgttgctggttcgatcctggctaaggcgcagctggaggtgactgatgtgcttacagacagaccgccccccattatcctgcagggacctgccaatcagaccctggccgtcgatggcaccgctctgcttaaatgtaaggcaacaggcgaccctctccctgtcatctcatggctgaaggagggcttcacatttccagggagggacccaagagccaccattcaggaacaaggtactcttcagattaaaaacttgcggatctccgacaccggcacctatacatgcgtggcaacaagcagtagcggtgagacctcttggagtgccgtccttgatgtcacagagagtggggctactatcagcaagaactacgatctctccgacctgcccgggccgccttcaaaaccccaggtcaccgatgttactaagaacagcgtaaccttgagttggcagcccggcacacccgggacgttgcccgctagtgcatacataatcgaagcgtttagccaatctgtctccaattcctggcaaaccgtcgctaatcatgtcaaaacaactctgtacacggtgagaggcttacggcctaatacaatctacctgttcatggtgagagcaatcaacccccaggggctaagtgatccgagccccatgtccgatccggttagaacacaggacatctctcccccagcccaaggcgtggatcacagacaggtccaaaaggaactgggagatgttctggtccgcctgcataatcccgtagttctgacgcccactacagttcaggtaacttggaccgttgatagacagccgcaattcatacaaggctaccgggtgatgtatagacagaccagtggcctgcaggccactagctcatggcagaatttggatgccaaggttcctactgaaagatctgccgtcctggtgaatctgaaaaagggagttacctatgagattaaggttcggccatacttcaatgagttccagggcatggatagcgagtctaaaacagtcagaaccaccgaggaggctccgtcggctcctccccagagcgtcacagtcctaacagttggaagctataactcaacaagcatttcagtaagctgggacccgccccctccagatcatcaaaatgggatcattcaggagtacaagatctggtgtttgggaaatgaaacccggttccacatcaacaagacagtcgacgctgcaatccgaagcgtgatcattggtggattgtttcccggtatacagtacagggtagaagtggcagcctccacatctgctggggtgggtgtgaagtccgaaccccaaccgatcatcattggaaggcgcaacgaggtggttataacagaaaacaacaattccatcactgagcagataaccgacgtggtgaagcagccggcgttcattgcgggaatcggcggagcttgctgggtgattttgatgggttttagtatctggctgtactggcgaagaaagaagaggaagggattaagtaattacgccgtgacctttcagcgcggagacgggggcctcatgtctaatgggagtcggccaggcctgttaaacgccggggacccatcatatccttggctcgccgactcctggcctgctacttccctgcctgtgaataacagtaacagcggtcccaacgaaattggaaattttggcagaggcgacgtgctgccgcccgtcccagggcagggcgataaaaccgcgaccatgcttagtgacggagcaatatatagtagtatcgatttcacgaccaagacaagctacaactcctcaagtcaaatcacgcaggcaacaccatatgccacaacacaaattttacactctaattccatccacgaactcgctgttgacctccctgatccacagtggaagagctctatccaacagaagactgaccttatgggctttggatactccttacctgaccagaataagggaaacaacggcgggaaaggaggaaagaagaagaagaataagaactcatccaagccacaaaagaacaacgggtctacatgggcaaatgttccgctgcccccccccccagttcagcctctgccaggaactgaattggaacactacgccgttgagcagcaggagaacgggtacgatagcgattcctggtgcccccctttgccagtccagacatatctgcaccaggggctggaggacgagctcgaggaggacgatgacagagttcccacacctcccgtgcgaggtgtcgcctctagccctgccatttccttcggccaacagtccacagccacactgacacccagtcctagggaggagatgcaacccatgctgcaggcccacctcgacgaactgacgcgggcctatcagttcgacatcgctaagcagacctggcatatccaaagtaacaaccagccaccacagcccccggtcccccccttgggatacgtgtctggtgcgcttatctctgatctagagactgacgtggcagacgacgatgcagatgacgaagaggaagctctggaaattcctcgccctcttagagctctggaccagacaccgggatctagcatggacaacctggacagttctgtgacagggaaggcttttaccagctcccagcgcccaagaccaaccagccctttcagtaccgattctaatacctcagccgctctctcccagagccagaggccgcgaccaacaaagaagcacaaaggggggaggatggatcaacagcctgccctgccacacaggcgggaggggatgactgatgaagaggctctcgtgccttatagtaagccctcttttccctcccctggaggacattcctcaagtgggacggctagttcaaagggatccactggcccacgtaagacggaggtgcttcgcgctggacatcagagaaacgcatctgacctgctggacattggctacatgggttcaaattcccagggccagtttacaggggagctctag

SEQ ID NO: 46767 - DNA, 3213 bp, Artificial Sequence
  derived and/or modified sequence
atggcgagaaggcatgagagagtgacaaggcggatgtggacctgggctccaggtttgctgatgatgactgtggtcttttggggccaccagggaaatggccagggacagggaagcagactccgccaggaggatttcccccctcgaattgttgaacatccatctgatgttatagtttccaagggtgagccaactactctcaattgcaaggccgagggcaggccaaccccaaccatcgaatggtataaggacggcgagcgagtagagacggacaaggatgatcctcgcagtcatcggatgcttcttccctcgggatctctgttctttttgcgaatcgtgcatgggcgaagatctaaacccgatgagggctcgtatgtatgtgtcgcaaggaactacctgggcgaggctgtcagcaggaatgccagtctggaagttgctctgttgcgagacgacttccgccagaacccaactgacgtagtggtggcagctggcgagcccgcaatacttgaatgtcagcctcccagaggccatccagagcctacgatctactggaaaaaggacaaggttcgaatcgatgacaaggaagagaggataagtatcaggggaggtaaactgatgatttcaaatacacggaaatccgacgcagggatgtacacatgcgtcggtaccaacatggtcggcgaaagagactccgatcctgcggagttgacagtcttcgagcgcccaacatttctgaggcggcctatcaaccaggtggtgctcgaggaagaggcagtggaattccgttgccaagtgcagggcgacccacagcctactgtccggtggaagaaggatgacgcggacctgcctaggggtaggtatgacattaaggatgattacacgttaaggattaagaaaacgatgtctacagatgaaggtacatatatgtgcattgccgaaaaccgcgtcgggaaaatggaagcctctgctacactcaccgttagaggcggagtgatcgcaccaccccagtttgttgtgaggccaagggatcagatcgtagcacaaggtcggactgtcacatttccctgtgaaactaaggggaatccccagcccgcagtgttctggcagaaggaggggtcccagaacctcttatttcctaaccagccccagcaacctaattctcggtgctccgtcagccccacaggtgatctgacgatcacgaacatccagaggagcgatgccggatattacatctgtcaagccctgaccgtggccggatcaatcttggccaaggcccagttagaagtgactgatgtgttaaccgacaggccaccacccattattctccagggccctgcgaatcagacactcgcagtggatggcacagcgcttctgaaatgtaaggcaaccggtgatcccctgccagtgatttcttggctaaaggagggtttcacatttcccggtcgtgacccacgagctaccattcaggaacaggggaccttacaaattaaaaacctgagaatcagtgacacagggacctatacctgtgtggcaacctcttcttctggagaaaccagttggtctgcagtgctggacgtgaccgaatccggcgctaccatcagcaaaaattatgatttgagtgacctgcccggtcctccctcaaagcctcaggtgaccgacgtcacaaaaaattcagtgaccctcagttggcaaccagggacccctggcaccctgcccgcttccgcctatatcatagaagccttctctcagagcgtgtcaaacagctggcagacggtggcaaatcatgtgaaaaccactctgtatacagtccgagggttaaggcccaatactatttatctttttatggtgcgagctataaacccccagggcctctccgacccctccccaatgtccgaccccgtcagaacacaggacatctcacccccagcacagggggttgaccaccgtcaagtgcagaaagagctgggtgacgttctggttaggctgcacaatcccgtggtgctgacacccaccaccgttcaggtcacctggaccgtggatcggcagcctcagttcatccaggggtatagagtgatgtaccgccagaccagtgggctccaggctacatcttcctggcagaacctcgatgcaaaggtgccaaccgagagatcagctgtgttggtaaacctgaagaagggagttacctacgaaatcaaggtgcgcccatactttaacgagttccagggcatggattcagagagcaagaccgtccggactacagaggaggcgccttcagcccctcctcagagtgtcacagtgttgacagtgggttcatataactccacttccattagcgtctcatgggatccacctccacctgaccatcaaaacggaatcatccaagaatacaaaatttggtgtcttgggaatgaaacaaggtttcatatcaacaagactgtagacgccgctataaggtccgtgatcattggcggactattcccaggtatccagtatagggtcgaagtcgcggcaagcaccagcgccggtgtcggagtgaagtcagagccacagcccattatcatagggagacgaaatgaggtggtcattacagagaataataacagcattaccgagcagattactgacgtcgtaaaacaacccgcattcatagccggtatcgggggtgcatgctgggttatattgatggggttctccatatggctgtactggagacggaagaagcgaaaagggctgtccaattacgcagtcacatttcagagaggcgacggaggtctcatgtcaaatgggtccaggcccggtctcttgaatgcgggtgacccatcctatccctggctcgccgactcgtggcccgctacttctctccctgtcaataattctaacagcggaccaaatgagatcggtaacttcgggagaggcgacgtactgcctcccgtccccggacaaggagacaagactgccacaatgctctctgatggcgctatctacagctcaatcgattttaccaccaaaacatcgtataacagttcctcccaaatcactcaggctaccccgtacgcaactacacagatcctacactctaattcaattcacgagcttgccgtcgatctgcccgacccacagtggaagtcatccatccagcagaagaccgatctgatgggattcggctacagccttcctgatcaaaataaaggcaacaacggggagtctggaagctag

SEQ ID NO: 46768 - DNA, 4185 bp, Artificial Sequence
  derived and/or modified sequence
atggccagaagacacgagcgggtgaccaggcgtatgtggacgtgggcaccgggtttattgatgatgacagtggtgttctgggggcatcagggcaatggacaggggcagggatcacggctgcggcaggaggatttccctccgaggatagttgagcaccccagtgatgttatagtcagtaaaggggagcccacaaccctcaattgtaaggccgaaggacggcctactcctacaatcgaatggtacaaagacggagaaagggtcgagactgacaaagatgacccgaggtcacatagaatgctgctgccttctgggagtctgtttttcctacgcattgtgcacggcagacggtccaagcctgatgaaggaagctacgtgtgtgtcgcccgaaactacctgggggaagccgttagtaggaacgcaagcctggaggtggccctcctccgcgatgattttcgacagaacccgactgatgtggttgtggcagcaggggaacccgctattctggaatgtcagccaccaaggggccaccccgaacctaccatctattggaaaaaagataaagtcaggattgatgataaggaggaacggatcagcattagaggcggaaagttgatgattagcaatactaggaagtctgacgccggtatgtacacttgtgtgggtacaaacatggttggggaacgggattcagaccccgcagaactgacagtctttgaacggcctaccttcctcagacgcccaattaaccaggtcgtgttggaggaagaggctgtcgagttcagatgccaggtccaaggtgatcctcagccgacggtgaggtggaaaaaagacgacgccgatctgccaagagggagatacgatattaaagatgactatactctacggattaaaaagacaatgtccaccgacgagggaacttatatgtgcatcgccgagaaccgggtgggcaagatggaggcatcggcaaccctaacggtgcgggcacctccccagttcgtcgtccgcccaagagaccagatagtcgcccagggcagaacagttaccttcccctgcgagactaagggtaatccgcagccagccgtgttttggcaaaaggaggggagccagaacctcctgtttcctaaccagccccagcagccaaatagccgctgttctgtaagccccacaggcgacctcaccatcaccaatattcagcggagcgacgccggttactacatatgtcaggctctgactgtcgcagggtccatactggccaaggcacaactggaagtgactgacgttttgacagatcggcctccgccaataatattacagggtcccgctaatcagaccctggccgtggacggtaccgctctgctcaagtgcaaagctactggggaccccctgccagtaatcagctggttaaaggaaggatttactttccccggacgggaccccagagccaccatccaagagcagggtactctgcagataaaaaacttacggatcagcgacacaggcacatatacgtgtgttgcaaccagtagctcgggagaaacaagttggagcgcagtgttggatgtgacggagtctggcgcaactatcagcaaaaattacgacttgagtgatcttccgggtccaccttccaaaccccaggtaacagacgttaccaagaactccgtcactctgtcttggcagccaggcacccccggaaccctgcccgcaagcgcctacataattgaagcattctcccagtccgtctcgaattcgtggcagaccgtggcaaaccatgtgaagactacactgtatactgtgcggggattgaggccgaacacaatttatctctttatggtgagggccattaatccacaaggcctgtcggatccctctccgatgagtgatcctgtacgaacacaggatattagtccccctgctcagggcgtggaccacagacaagtccaaaaagaattgggtgacgtgctggtgcggctgcacaatcctgttgttctcacccccacaactgtgcaggtgacttggactgtggacaggcagccccagttcatccagggttacagagtgatgtatcgacagacatcaggtctgcaagcaacgagttcgtggcaaaacctggatgcgaaagtgccgacggagagaagcgctgtgctcgtgaatctgaagaaaggcgtaacatatgaaattaaagtgcgaccctactttaacgagttccaggggatggattccgagtctaagacggtccggaccaccgaggaggccccttccgctcctcctcagtccgtgaccgtgctgacagtcgggtcctataatagcacttccatctccgtatcttgggatccaccaccccctgaccaccagaacggcattatacaggaatacaaaatttggtgcctggggaacgagaccagattccacattaacaaaactgttgacgccgcaatccgaagcgtgatcataggcggactctttcccggaatccaatacagggtcgaagtcgccgctagtacctccgccggagtcggggtgaaaagtgaaccccagccaatcataattggcagacgcaatgaagttgtgatcacagaaaataacaactccattaccgaacagataaccgatgtcgttaaacagcctgcctttatcgctgggatcggaggagcttgttgggttatcctgatggggttttccatttggctttattggcggagaaagaagcgaaagggactgagcaattacgccgtgactttccagcgaggagacggcggattaatgagtaatgggtcacgccctggtcttcttaatgctggtgatccgtcttacccgtggttagctgactcctggcctgccacttctctgccagtgaacaattccaacagcggaccaaatgaaataggcaacttcgggcgtggtgacgtgcttcctcctgtaccaggccagggcgataaaaccgcgaccatgttgagcgacggagctatctattcttctattgattttactactaaaaccagctacaatagttcaagtcagataacacaagccaccccttatgccaccacacagatactccattccaacagcattcatgaattagcagtggatttaccggacccacagtggaaatcctctatccagcaaaagactgacctaatgggatttgggtactccctcccagatcaaaataagggtaacaacggcggtaaagggggtaaaaaaaagaaaaacaagaactctagcaagccgcaaaaaaacaatggctcaacttgggcaaacgtgccactccccccacctcctgtacagcctttacctggtacagagttggagcattacgcggttgaacagcaggagaatgggtacgactcagacagttggtgtccaccattgccagtccagacctatcttcaccaggggctggaggatgagctggaagaagacgatgacagggtccccacacctccagtgagaggtgtggcctcctcccctgccatttcgttcgggcagcagtcaacagctactctcactccttcgccacgggaggagatgcaacccatgcttcaagcccacttggacgagctgacaagagcctatcagtttgatattgcgaaacagacctggcacatacagtcaaataaccagccaccacaaccacccgtgccaccgctgggatacgtgtcaggggcattgatttcagatctcgaaacagacgtagccgatgatgatgccgacgatgaggaggaggcactggagatcccgaggccgctgcgggctctggaccagactccagggtcttccatggacaatctggattcatccgtgactggaaaagcctttactagtagtcaacggccaagaccaacctcaccctttagcacagacagtaacaccagcgcagcgctctcccagtctcagagacccagacctacaaaaaagcacaagggaggaagaatggatcaacagcctgccttgcctcatcgcagggaggggatgaccgacgaggaggctcttgtgccatattccaagcccagtttccctagccccggtggacattcatcctcagggaccgcttccagcaaagggagcacggggcctagaaaaaccgaggtgctgagggccggacaccaacgtaacgcctccgatcttctggatatcggatatatgggcagcaattcccaaggccagtttacaggcgaactatag

SEQ ID NO: 46769 - DNA, 4185 bp, Artificial Sequence
  derived and/or modified sequence
atggctaggagacacgagcgagtgacgcgacgcatgtggacatgggcacctgggctactgatgatgaccgtcgtgttctggggacatcaagggaatgggcaaggacaagggtcaagactgcgtcaggaggatttcccacccaggatagtggagcacccctccgatgttattgtcagcaagggcgagcccacaaccctcaattgcaaagctgagggcagacccactccgactatagaatggtacaaagatggcgaacgcgttgaaaccgataaagacgacccgaggagtcatcgaatgctcctaccatcgggttctctgttctttttgcgaatcgtccacggcaggcgtagcaaacccgacgaaggcagttatgtatgtgtggcccgaaattacctcggagaggcagtatccaggaacgcttcactggaggtggcgctgctgcgggatgattttcgccagaatcccacagacgtggtggtcgccgctggcgagcccgctatcctggaatgccagcccccacgcggacacccagagccaaccatctattggaagaaggataaagtgcgaattgacgacaaagaggagcggatttccattcgaggtggtaagctgatgatctccaacacacgtaaaagcgatgccggaatgtatacttgcgtgggcacaaacatggtgggggaacgggatagcgaccctgccgaactcacagtcttcgagcggccaaccttcctgaggaggccaatcaaccaggtagtgctggaagaagaggccgtggagttccggtgccaggttcagggtgacccacaacccactgtcagatggaagaaggacgacgcagatctccctcgcggtcgttacgatattaaagacgactataccctgcgaatcaagaagactatgtcaacagatgaggggacctacatgtgcattgctgaaaatagagtcggaaagatggaagccagcgctaccctcaccgtgcgggctccccctcagtttgtcgtgcggccacgggaccaaattgtggcgcagggaaggacagtcactttcccttgtgagaccaagggtaacccccaacctgcggttttctggcagaaagagggatcccagaacctgctcttccccaaccagccacagcagcccaattctaggtgtagcgtctccccaacgggagaccttaccatcactaacatccagagatcagacgctggttactacatttgccaagccctcacggttgcgggtagtattctcgcaaaagctcaactggaagtgacagatgtgctgacagatagacctccgccaatcatcctgcaggggccagctaaccagacactagcagtggatggaacagccctgctgaaatgcaaagccaccggcgacccgctgcctgtcatctcgtggctgaaggagggttttactttccccggtcgcgatcccagagctacgattcaggagcagggtaccctgcaaattaagaatttgagaattagtgacacaggcacctacacctgtgtggccacctcttctagcggggagaccagctggtcagccgtactggacgtgaccgagagcggggctacaatttccaaaaattacgacctgtcagacctgccgggaccaccctccaaaccacaggtgaccgatgtcaccaagaactcagtcacactatcctggcagcctggaactcctggcactctccctgccagcgcatacatcatcgaagctttcagtcagtccgtgagcaacagttggcagaccgtcgccaaccacgtgaaaaccacactttatactgtgcgcggattaaggcctaatacgatctaccttttcatggtgagggccatcaacccacaggggctcagcgaccccagccccatgtctgatcctgttagaacccaggacatctcccctcccgcacagggcgtcgaccatcgacaggtgcagaaggagctaggcgatgtgctggtcagacttcataatcctgtggttcttacgcccaccaccgtgcaggtcacgtggacagtggatcgtcagccgcagtttattcagggatatagggtaatgtaccggcagacctcagggctgcaggctacctcgtcatggcagaacctggacgccaaagtgcccacagagagatccgccgtgctcgtgaacttgaagaaaggcgtcacatatgaaatcaaagtgagaccctacttcaatgagttccaaggcatggactctgagagcaaaaccgtgaggaccacagaagaggccccatccgcccctcctcagtcagttacagtacttacagtcggctcttacaacagtacatctattagcgtgtcctgggacccgcctcccccagatcaccagaacggaatcatccaggaatacaaaatctggtgtctgggcaatgaaacccgctttcacatcaacaaaaccgtggatgcagccatcaggagtgtgattattggaggacttttcccaggcattcagtaccgcgtggaagtggctgccagtacatccgctggagtgggtgtaaagagcgagccccagcccatcattatagggcgacggaacgaagtggtgattaccgagaacaataactccataacagaacagattacggacgtggttaaacagcctgcattcatcgcgggaatcggaggggcttgttgggtgattctgatgggattttccatctggttgtattggagacgcaaaaagcggaagggcttatccaattacgccgtcaccttccaaaggggcgacggaggactcatgagcaacggatcaagaccgggactactgaacgccggtgacccctcatatccctggctggccgacagctggcccgcaacttccctgcccgtaaacaacagtaactccgggcctaacgagatcggcaatttcgggaggggcgatgtgctgccacccgtgccgggacagggcgataagacggctacaatgttgagcgatggtgccatttacagttctattgacttcactaccaagacaagttataactccagtagtcagattacacaagctaccccatatgccactacacagatcctccactctaattctattcacgagcttgccgttgatctcccagatcctcagtggaaaagtagtattcagcagaagactgacctgatggggttcggatactccctcccagatcagaataagggaaataatgggggaaagggagggaaaaagaagaagaataagaattcctccaaaccacaaaagaacaatggtagcacctgggctaacgtccctctgcctccgccaccggttcagcccctgcctggtaccgagctagagcactatgctgttgagcagcaagaaaatggttatgactccgattcttggtgtcctcctctgcctgtgcaaacctatctgcaccaggggttggaggacgaattagaagaagacgatgacagggttccaactccacctgtccgtggcgtggcctccagtcctgctatctctttcggccagcagtctacagcaacactgactccctcgccaagagaagagatgcaaccaatgctacaagctcatctggacgagctgactcgcgcataccagttcgatatagcaaaacagacatggcatatccagagtaataaccagcccccacagcccccagtgccccctctcggttatgtctcaggtgccctgatctctgatcttgagacagacgtggccgacgacgacgccgatgacgaggaagaggcactcgaaattccgaggcctctgcgagccttagatcagacacctggtagcagcatggacaacctggactcttccgttaccggaaaagccttcacctcctcgcagaggcccaggcccactagccccttctcaaccgattccaacacctctgctgccctttctcagagtcagcgacctcgacctactaaaaagcacaagggtggtcggatggatcagcagccggcacttcctcatcggagagaggggatgacagacgaagaagctttagtgccttattccaaaccttcttttccatcccctggagggcacagctcttcaggtacagcctcttccaaagggtccactggcccaaggaaaaccgaggtgcttagggccggacaccagaggaacgcaagcgacctcctggatattggctacatggggtctaattctcagggtcaatttaccggcgaactgtag

SEQ ID NO: 46770 - DNA, 3210 bp, Artificial Sequence
  derived and/or modified sequence
atggccagaagacatgaacgtgtcactagaaggatgtggacatgggctccgggactgttgatgatgactgtggtgttttggggtcatcaggggaatggacaaggccaaggatcgcgtcttcgccaggaggactttcccccgcggattgtggagcatccttccgatgtcatcgtctctaagggcgagcccacgactctgaactgcaaggcggagggccggccaacgcccaccattgagtggtacaaagatggggagcgagtggagactgacaaggacgatccccggtcccacaggatgcttctgcccagcggatccttattcttcttgcgcatcgtgcacgggcgcaggagtaaacctgatgaaggaagctacgtttgtgttgcgaggaactatcttggtgaagcagtgagtcgaaatgcgtctctggaagtggcattgttacgagatgacttccgacaaaaccccacagatgttgtagtggcagctggagagcctgcaatcctggagtgccagcctccccggggacacccagaacccaccatctactggaaaaaagacaaagttcgaattgatgacaaggaagaaagaataagtatccgtggtggaaaactgatgatctccaataccaggaaaagtgatgcagggatgtatacttgtgttggtaccaatatggtgggagaaagggacagtgacccagcagagctgactgtctttgaacgacccacatttctcaggaggccaattaaccaggtggtactggaggaagaagctgtagaatttcgttgtcaagtccaaggagatcctcaaccaactgtgaggtggaaaaaggatgatgcagacttgccaagaggaaggtatgacatcaaagacgattacacactaagaattaaaaagaccatgagtacagatgaaggcacctatatgtgtattgctgagaatcgggttggaaaaatggaagcctctgctacactcaccgtccgaggtggagttatagctcccccacagtttgtggttcggccaagagatcagattgttgctcaaggtcgaacagtgacatttccctgtgaaactaaaggaaacccacagccagctgttttttggcagaaagaaggcagccagaacctacttttcccaaaccaaccccagcagcccaacagtagatgctcagtgtcaccaactggagacctcacaatcaccaacattcaacgttccgacgcgggttactacatctgccaggctttaactgtggcaggaagcattttagcaaaagctcaactggaggttactgatgttttgacagatagacctccacctataattctacaaggcccagccaaccaaacgctggcagtggatggtacagcgttactgaaatgtaaagccactggtgatcctcttcctgtaattagctggttaaaggagggatttacttttccgggtagagatccaagagcaacaattcaagagcaaggcacactgcagattaagaatttacggatttctgatactggcacttatacttgtgtggctacaagttcaagtggagagacttcctggagtgcagtgctggatgtgacagagtctggagcaacaatcagtaaaaactatgatttaagtgacctgccagggccaccatccaaaccgcaggtcactgatgttactaagaacagtgtcaccttgtcctggcagccaggtacccctggaacccttccagcaagtgcatatatcattgaggctttcagccaatcagtgagcaacagctggcagaccgtggcaaaccatgtaaagaccaccctctatactgtaagaggactgcggcccaatacaatctacttattcatggtcagagcgatcaacccccaaggtctcagtgacccaagtcccatgtcagatcctgtgcgcacacaagatatcagcccaccagcacaaggagtggaccacaggcaagtgcagaaagagctaggagatgtccttgtccgtcttcataatccagttgtgctgactcccaccacggttcaggtcacatggacggttgatcgccaaccccagtttatccaaggctaccgagtgatgtatcgtcagacttcaggtctgcaggcgacatcttcgtggcagaatttagatgccaaagtcccgactgaacgaagtgctgtcttagtcaacctgaaaaagggggtgacttatgaaattaaagtacggccatattttaatgagttccaaggaatggatagtgaatctaaaacggttcgtactactgaagaagccccaagtgccccaccacagtctgtcactgtactgacagttggaagctacaatagcacaagtattagtgtttcctgggatcctcctcctccagatcaccagaatggaattatccaagaatacaagatctggtgtctaggaaatgaaacgcgattccatatcaacaaaactgtggatgcagccattcggtccgtaataattggtggattattcccaggtattcaataccgggtagaggttgcagctagtaccagtgcaggggttggagtaaagagtgagccacagccaataataatcgggagacgcaatgaagttgtcattactgaaaacaataacagcataactgagcaaatcactgatgtggtgaagcaaccagcctttatagctggtattggtggtgcctgctgggtaattctgatgggttttagcatatggttgtattggcgaagaaagaagaggaagggactcagtaattatgctgttacgtttcaaagaggagatggaggactaatgagcaatggaagccgtccaggtcttctcaatgctggtgatcccagctatccatggcttgctgattcttggccagccacgagcttgccagtaaataatagcaacagtggcccaaatgagattggaaattttggccgtggagatgtgctgccaccagttccaggccaaggggataaaacagcaacgatgctctcagatggagccatttatagtagcattgacttcactaccaaaaccagttacaacagttccagccaaataacacaggctaccccatatgccacgacacagatcttgcattccaacagcatacatgaattggctgtcgatctgcctgatccacaatggaaaagctcaattcagcaaaaaacagatctgatgggatttggttattctctacctgatcagaacaaaggtaacaatggtgagtcaggttct

SEQ ID NO: 46771 - DNA, 4182 bp, Artificial Sequence
  derived and/or modified sequence
atggccagaagacatgaacgtgtcactagaaggatgtggacatgggctccgggactgttgatgatgactgtggtgttttggggtcatcaggggaatggacaaggccaaggatcgcgtcttcgccaggaggactttcccccgcggattgtggagcatccttccgatgtcatcgtctctaagggcgagcccacgactctgaactgcaaggcggagggccggccaacgcccaccattgagtggtacaaagatggggagcgagtggagactgacaaggacgatccccggtcccacaggatgcttctgcccagcggatccttattcttcttgcgcatcgtgcacgggcgcaggagtaaacctgatgaaggaagctacgtttgtgttgcgaggaactatcttggtgaagcagtgagtcgaaatgcgtctctggaagtggcattgttacgagatgacttccgacaaaaccccacagatgttgtagtggcagctggagagcctgcaatcctggagtgccagcctccccggggacacccagaacccaccatctactggaaaaaagacaaagttcgaattgatgacaaggaagaaagaataagtatccgtggtggaaaactgatgatctccaataccaggaaaagtgatgcagggatgtatacttgtgttggtaccaatatggtgggagaaagggacagtgacccagcagagctgactgtctttgaacgacccacatttctcaggaggccaattaaccaggtggtactggaggaagaagctgtagaatttcgttgtcaagtccaaggagatcctcaaccaactgtgaggtggaaaaaggatgatgcagacttgccaagaggaaggtatgacatcaaagacgattacacactaagaattaaaaagaccatgagtacagatgaaggcacctatatgtgtattgctgagaatcgggttggaaaaatggaagcctctgctacactcaccgtccgagctcccccacagtttgtggttcggccaagagatcagattgttgctcaaggtcgaacagtgacatttccctgtgaaactaaaggaaacccacagccagctgttttttggcagaaagaaggcagccagaacctacttttcccaaaccaaccccagcagcccaacagtagatgctcagtgtcaccaactggagacctcacaatcaccaacattcaacgttccgacgcgggttactacatctgccaggctttaactgtggcaggaagcattttagcaaaagctcaactggaggttactgatgttttgacagatagacctccacctataattctacaaggcccagccaaccaaacgctggcagtggatggtacagcgttactgaaatgtaaagccactggtgatcctcttcctgtaattagctggttaaaggagggatttacttttccgggtagagatccaagagcaacaattcaagagcaaggcacactgcagattaagaatttacggatttctgatactggcacttatacttgtgtggctacaagttcaagtggagagacttcctggagtgcagtgctggatgtgacagagtctggagcaacaatcagtaaaaactatgatttaagtgacctgccagggccaccatccaaaccgcaggtcactgatgttactaagaacagtgtcaccttgtcctggcagccaggtacccctggaacccttccagcaagtgcatatatcattgaggctttcagccaatcagtgagcaacagctggcagaccgtggcaaaccatgtaaagaccaccctctatactgtaagaggactgcggcccaatacaatctacttattcatggtcagagcgatcaacccccaaggtctcagtgacccaagtcccatgtcagatcctgtgcgcacacaagatatcagcccaccagcacaaggagtggaccacaggcaagtgcagaaagagctaggagatgtccttgtccgtcttcataatccagttgtgctgactcccaccacggttcaggtcacatggacggttgatcgccaaccccagtttatccaaggctaccgagtgatgtatcgtcagacttcaggtctgcaggcgacatcttcgtggcagaatttagatgccaaagtcccgactgaacgaagtgctgtcttagtcaacctgaaaaagggggtgacttatgaaattaaagtacggccatattttaatgagttccaaggaatggatagtgaatctaaaacggttcgtactactgaagaagccccaagtgccccaccacagtctgtcactgtactgacagttggaagctacaatagcacaagtattagtgtttcctgggatcctcctcctccagatcaccagaatggaattatccaagaatacaagatctggtgtctaggaaatgaaacgcgattccatatcaacaaaactgtggatgcagccattcggtccgtaataattggtggattattcccaggtattcaataccgggtagaggttgcagctagtaccagtgcaggggttggagtaaagagtgagccacagccaataataatcgggagacgcaatgaagttgtcattactgaaaacaataacagcataactgagcaaatcactgatgtggtgaagcaaccagcctttatagctggtattggtggtgcctgctgggtaattctgatgggttttagcatatggttgtattggcgaagaaagaagaggaagggactcagtaattatgctgttacgtttcaaagaggagatggaggactaatgagcaatggaagccgtccaggtcttctcaatgctggtgatcccagctatccatggcttgctgattcttggccagccacgagcttgccagtaaataatagcaacagtggcccaaatgagattggaaattttggccgtggagatgtgctgccaccagttccaggccaaggggataaaacagcaacgatgctctcagatggagccatttatagtagcattgacttcactaccaaaaccagttacaacagttccagccaaataacacaggctaccccatatgccacgacacagatcttgcattccaacagcatacatgaattggctgtcgatctgcctgatccacaatggaaaagctcaattcagcaaaaaacagatctgatgggatttggttattctctacctgatcagaacaaaggtaacaatggtgggaaaggtggaaaaaagaagaaaaataaaaactcttctaaaccacagaaaaacaatggatccacttgggccaatgtccctctacctccccccccagtccagccccttcctggcacggagctggaacactatgcagtggaacaacaagaaaatggctatgacagtgatagctggtgcccaccattgccagtacaaacttacttacaccaaggtctggaagatgaactggaagaagatgatgatagggtcccaacacctcctgttcgaggcgtggcttcttctcctgctatctcctttggacagcagtccactgcaactcttactccatccccacgggaagagatgcaacccatgctgcaggctcacctggatgagttgacaagagcctatcagtttgatatagcaaaacaaacatggcacattcaaagcaataatcaacctccacagcctccagttccaccgttaggttatgtgtctggagccttgatttctgatttggaaacggatgttgcagatgatgatgccgacgacgaagaggaagctttagaaatccccaggcccctgagagcactggaccagactcctggatccagcatggacaatctagacagctctgtgacaggaaaagcctttacctcctctcaaagacctcgacctaccagcccattttctactgacagtaacaccagtgcagccctgagtcaaagtcagaggcctcggcccactaaaaaacacaagggagggcggatggaccaacaaccagcattgcctcatcgaagggaaggaatgacagatgaggaggccttggtgccctatagcaagcccagtttcccatctccaggtggccacagctcatcaggaacagcttcttctaagggatccactggacctaggaaaaccgaggtgttgagagcaggccaccagcgcaatgccagcgaccttcttgacataggatatatgggctccaacagtcaaggacagtttacaggtgaatta

SEQ ID NO: 46772 - DNA, 8372 bp, Artificial Sequence
  derived and/or modified sequence
cgctggaggagggaggcggaaggacagcgctgcgccaccacccggaggagggagcgcggtagctgcaggcaggggagggagaggaaagaaaaggaaggacggctcccagacagagagtgggagaaaccggggagcagcgggagcagcaggtccggggggagctgttccgctgcgctgccctcgttattcacacggacgctgcggagcttcccagggctgcttccctgtccccctgggtggaggctgccgtctaaacctgactccagagtttaagatgcaatggccagaagacatgaacgtgtcactagaaggatgtggacatgggctccgggactgttgatgatgactgtggtgttttggggtcatcaggggaatggacaaggccaaggatcgcgtcttcgccaggaggactttcccccgcggattgtggagcatccttccgatgtcatcgtctctaagggcgagcccacgactctgaactgcaaggcggagggccggccaacgcccaccattgagtggtacaaagatggggagcgagtggagactgacaaggacgatccccggtcccacaggatgcttctgcccagcggatccttattcttcttgcgcatcgtgcacgggcgcaggagtaaacctgatgaaggaagctacgtttgtgttgcgaggaactatcttggtgaagcagtgagtcgaaatgcgtctctggaagtggcattgttacgagatgacttccgacaaaaccccacagatgttgtagtggcagctggagagcctgcaatcctggagtgccagcctccccggggacacccagaacccaccatctactggaaaaaagacaaagttcgaattgatgacaaggaagaaagaataagtatccgtggtggaaaactgatgatctccaataccaggaaaagtgatgcagggatgtatacttgtgttggtaccaatatggtgggagaaagggacagtgacccagcagagctgactgtctttgaacgacccacatttctcaggaggccaattaaccaggtggtactggaggaagaagctgtagaatttcgttgtcaagtccaaggagatcctcaaccaactgtgaggtggaaaaaggatgatgcagacttgccaagaggaaggtatgacatcaaagacgattacacactaagaattaaaaagaccatgagtacagatgaaggcacctatatgtgtattgctgagaatcgggttggaaaaatggaagcctctgctacactcaccgtccgagctcccccacagtttgtggttcggccaagagatcagattgttgctcaaggtcgaacagtgacatttccctgtgaaactaaaggaaacccacagccagctgttttttggcagaaagaaggcagccagaacctacttttcccaaaccaaccccagcagcccaacagtagatgctcagtgtcaccaactggagacctcacaatcaccaacattcaacgttccgacgcgggttactacatctgccaggctttaactgtggcaggaagcattttagcaaaagctcaactggaggttactgatgttttgacagatagacctccacctataattctacaaggcccagccaaccaaacgctggcagtggatggtacagcgttactgaaatgtaaagccactggtgatcctcttcctgtaattagctggttaaaggagggatttacttttccgggtagagatccaagagcaacaattcaagagcaaggcacactgcagattaagaatttacggatttctgatactggcacttatacttgtgtggctacaagttcaagtggagagacttcctggagtgcagtgctggatgtgacagagtctggagcaacaatcagtaaaaactatgatttaagtgacctgccagggccaccatccaaaccgcaggtcactgatgttactaagaacagtgtcaccttgtcctggcagccaggtacccctggaacccttccagcaagtgcatatatcattgaggctttcagccaatcagtgagcaacagctggcagaccgtggcaaaccatgtaaagaccaccctctatactgtaagaggactgcggcccaatacaatctacttattcatggtcagagcgatcaacccccaaggtctcagtgacccaagtcccatgtcagatcctgtgcgcacacaagatatcagcccaccagcacaaggagtggaccacaggcaagtgcagaaagagctaggagatgtccttgtccgtcttcataatccagttgtgctgactcccaccacggttcaggtcacatggacggttgatcgccaaccccagtttatccaaggctaccgagtgatgtatcgtcagacttcaggtctgcaggcgacatcttcgtggcagaatttagatgccaaagtcccgactgaacgaagtgctgtcttagtcaacctgaaaaagggggtgacttatgaaattaaagtacggccatattttaatgagttccaaggaatggatagtgaatctaaaacggttcgtactactgaagaagccccaagtgccccaccacagtctgtcactgtactgacagttggaagctacaatagcacaagtattagtgtttcctgggatcctcctcctccagatcaccagaatggaattatccaagaatacaagatctggtgtctaggaaatgaaacgcgattccatatcaacaaaactgtggatgcagccattcggtccgtaataattggtggattattcccaggtattcaataccgggtagaggttgcagctagtaccagtgcaggggttggagtaaagagtgagccacagccaataataatcgggagacgcaatgaagttgtcattactgaaaacaataacagcataactgagcaaatcactgatgtggtgaagcaaccagcctttatagctggtattggtggtgcctgctgggtaattctgatgggttttagcatatggttgtattggcgaagaaagaagaggaagggactcagtaattatgctgttacgtttcaaagaggagatggaggactaatgagcaatggaagccgtccaggtcttctcaatgctggtgatcccagctatccatggcttgctgattcttggccagccacgagcttgccagtaaataatagcaacagtggcccaaatgagattggaaattttggccgtggagatgtgctgccaccagttccaggccaaggggataaaacagcaacgatgctctcagatggagccatttatagtagcattgacttcactaccaaaaccagttacaacagttccagccaaataacacaggctaccccatatgccacgacacagatcttgcattccaacagcatacatgaattggctgtcgatctgcctgatccacaatggaaaagctcaattcagcaaaaaacagatctgatgggatttggttattctctacctgatcagaacaaaggtaacaatggtgggaaaggtggaaaaaagaagaaaaataaaaactcttctaaaccacagaaaaacaatggatccacttgggccaatgtccctctacctccccccccagtccagccccttcctggcacggagctggaacactatgcagtggaacaacaagaaaatggctatgacagtgatagctggtgcccaccattgccagtacaaacttacttacaccaaggtctggaagatgaactggaagaagatgatgatagggtcccaacacctcctgttcgaggcgtggcttcttctcctgctatctcctttggacagcagtccactgcaactcttactccatccccacgggaagagatgcaacccatgctgcaggctcacctggatgagttgacaagagcctatcagtttgatatagcaaaacaaacatggcacattcaaagcaataatcaacctccacagcctccagttccaccgttaggttatgtgtctggagccttgatttctgatttggaaacggatgttgcagatgatgatgccgacgacgaagaggaagctttagaaatccccaggcccctgagagcactggaccagactcctggatccagcatggacaatctagacagctctgtgacaggaaaagcctttacctcctctcaaagacctcgacctaccagcccattttctactgacagtaacaccagtgcagccctgagtcaaagtcagaggcctcggcccactaaaaaacacaagggagggcggatggaccaacaaccagcattgcctcatcgaagggaaggaatgacagatgaggaggccttggtgccctatagcaagcccagtttcccatctccaggtggccacagctcatcaggaacagcttcttctaagggatccactggacctaggaaaaccgaggtgttgagagcaggccaccagcgcaatgccagcgaccttcttgacataggatatatgggctccaacagtcaaggacagtttacaggtgaattatagtaaatgagaggagacatacaaagctgctctgaaggaccatcaggtccggactcatggaagtgatgactctaaacagtgcaatgaacaatttatttatgtactattaaaagaactgtaaatgcaatgtaaagacacacagccacacatatcccacagatattttcattgtgttcttctcttaagtacaccacccaccttaactctttcttgtcaggagtatataaaaaagaaagaaaacaaaactcgccctacaggaagaaaaggattctcctctgtatataatttcttttgtgcattgctatgcaagctcactctttttagctctgctcatattattgtctgttcttattggtctgttgtactatatgtgaattaataggctgtggtgccatatattaacttttaattgtgtaacttttatgtttaaattttgcactgcaattttatttggtgataagcacaaatctctactcctcatgacatgaagaaaaagactgaatgtgaagggagtttctgtactgtaagctagattggataatgatggctgtaacaaatcatgttagatggttttcagttggggtgtagaaataggaagatgcaaaggaacaatggtgttggcaaagtcttctttgaatatcagggactgagtcaataaaaaaaatagtagaaaggtggcttttactattgacaaaagccggggtcaaaaaaagtagtttaagtcttaagactgaatatgcattaaagtatgcaggtagcaaagatgtaataaatttgcttaaaaaaagaaattaaagttttatttagaatcaattttacctgtcattgtaattgacccatctgagaattacaataagcaagaggaaattaaggtgttttgcaagagctgtatttatattacagttttttaaaaacattttctgaattatcgtaattaagctctccaactcgttaagtcagaatataatatgaagttccccaaggaaacgaacaaaatgaactctagaatatctagcaaatagttaaagaagcaatttattattagggcatactcgggctgtttccaaatataaactctattgcaatatcttatttcatctttctaatacatgtacagtgcacactagaggatagagctgcatcacttaaattcatgacttaaaaaataatacagtttatatacaacttgttttttatttgattaagaagtgaagtttacgccacccaatgtatagccaaattgtacgtgcttaaaaaacagtgccgagagtatgttcagttcgcagtaagtagatttattggaataaatattctatggtacattctcagaaattggcttccaactaaaatacgtttgacccattttgaataaggaaattgaaaagaaaaatttaaaaggagaaaaaaatgcatgtttataaactttttaaataaaaccagaccttgtaagtggacattaataattgtcctgcctcatttgttttcacgactttgacaacaagaagttcctgaacattagtcatgtatgctcagaataaatgtgactttgaaatatatgttagctactgtacatgtatagtcagtcaagtagaagaggaccttcctgaaattcccacttgtgacattttcccatgggtttcctacacaatcttaaattttatttctgtctatactttctcaaatttttcctatgataagttcagttgttggtactcttctaaaaatattcaacgtgattaggatcagttctaaaatacgggacccctttgagtgacaattcgcactccatgcattattggctcagtagccaatttttgtcacgtcgttataacaaggagatgacataattaaacatttccatcctttctattccctgagactgcatcagcacaggcaagtatagaatgtaatgttcttcatgggccccaccagctttttggtgccatgtaatttatttcttcgctgaagagaaaaagaattctgagacacagttattaaaccctttatcaactttctaccatcagtgcctgaattctaatgcagtgtgatttctctgggacaaagagactgaggaagatgaaaagtttcttcaaagagtgaatacatacttattcacaactctaggatgtgaggactttaaatatctctttatgaagttccctgcctaacctctttctatttaaaggcaaacaaatttcgaagaggttttgtgttccctctttatgtttctctatgacccagtttagtctaaaaccttagttcattacatatacaacacatagcctttgatccctggtaactggcaggtgttggtgattaataaaccaaggcttcaaagtgaagtatgtgtgtgcagatgacttttggaataacgtgggcatagcatcataccttcctgattgtcttcagcatataaaaattaactgttgtagttaaaattatgtcagtgcagagcttgtggttacttggaatgttctttcagaatagtccatgttgcctattaaacctagttttaaacacattgggcagtcaatttatgcacccaaaatatcaccctcaggtagattgagggcaagataaaatgctgtatgtagctatacaaaggaattcagaaacattactggaaagcaaagcctttgtcagcttgctactgacaaagtagtaaaaagctactaatcagtgttgagtcagatgtcaacagaaaaatacaaatacctatgagagccacagcagtttctcgtttcatagccgattcaatgaatatgattagaaattcactgagctcactcttgcaggtttaaatggaggcctgcataaggactgcaagaggaaatctgggtgggagagaatgtaatctgatcttgcactcataggcaatgctgcaatgcaatcatgtccaatacaagcacagcttcattcataacaggaaacgtcttctttgggaaaatagctctattggtgcccaaactcaggtatgccagtgtatgcaggtggagtcgccctacccctcttccaaacatgtcctgtgagatttttaaaataagatgggatagtacaggggcatgaaaagaattgattccttcacaggatttgaatccagttcaagggagaatgtagaaaattcaaaaccaacatataaggtatcacacaaccaagaaaagtaaaaccattgcaagtttacttgcgttgagtacaaaacagatttaatggtgttctatgtcatagtttaatgctctgggtatttaaatatgttttcaacaggatttgagttgaaagtttgtaatgtgctttgatggaacacctctcaatttctattcaataaacttatgtaattgtccattgacaatataatgataacagtaccattgaactctaaactgtggtttatcttcactactgggaagcaactgtgcatcagtattaaagatatgcagaaacataatattcactaatttgttcatctgcttctgtatattgtttatggaattacatggcaagaactgttctaaagcaacatgtctttccacattattttagaggtgaaattacttttgttttgcttctctataatgtgtacttcaaatgaaacaccatacttttttctaaaaaaagatgttcaatttactaatttttttaaatctcataatttaaaaagcatttgttgtgattttaaagtgttgcaagaaaagggattttgtggccgtgggtagactttttatactttgttttatagatggattttttttaactgtagtttgtttaagtcaccaagcagcatccaaaatcttaatgtgtttcatttgatgttgttagatcagagaagaaattggcataaaatcggttaatagtattgtcaaagaattgtgtattgtgtactcactgggaaaaaataaaatatattcacatttcaa

SEQ ID NO: 46773 - DNA, 3213 bp, Artificial Sequence
  derived and/or modified sequence
atggccagaagacacgagagagtgaccagaagaatgtggacctgggcccccggcctgctgatgatgaccgtggtgttctggggccaccagggcaacggccagggccagggcagcagactgagacaggaggacttcccccccagaatcgtggagcaccccagcgacgtgatcgtgagcaagggcgagcccaccaccctgaactgcaaggccgagggcagacccacccccaccatcgagtggtacaaggacggcgagagagtggagaccgacaaggacgaccccagaagccacagaatgctgctgcccagcggcagcctgttcttcctgagaatcgtgcacggcagaagaagcaagcccgacgagggcagctacgtgtgcgtggccagaaactacctgggcgaggccgtgagcagaaacgccagcctggaggtggccctgctgagagacgacttcagacagaaccccaccgacgtggtggtggccgccggcgagcccgccatcctggagtgccagccccccagaggccaccccgagcccaccatctactggaagaaggacaaggtgagaatcgacgacaaggaggagagaatcagcatcagaggcggcaagctgatgatcagcaacaccagaaagagcgacgccggcatgtacacctgcgtgggcaccaacatggtgggcgagagagacagcgaccccgccgagctgaccgtgttcgagagacccaccttcctgagaagacccatcaaccaggtggtgctggaggaggaggccgtggagttcagatgccaggtgcagggcgacccccagcccaccgtgagatggaagaaggacgacgccgacctgcccagaggcagatacgacatcaaggacgactacaccctgagaatcaagaagaccatgagcaccgacgagggcacctacatgtgcatcgccgagaacagagtgggcaagatggaggccagcgccaccctgaccgtgagaggcggcgtgatcgcccccccccagttcgtggtgagacccagagaccagatcgtggcccagggcagaaccgtgaccttcccctgcgagaccaagggcaacccccagcccgccgtgttctggcagaaggagggcagccagaacctgctgttccccaaccagccccagcagcccaacagcagatgcagcgtgagccccaccggcgacctgaccatcaccaacatccagagaagcgacgccggctactacatctgccaggccctgaccgtggccggcagcatcctggccaaggcccagctggaggtgaccgacgtgctgaccgacagacccccccccatcatcctgcagggccccgccaaccagaccctggccgtggacggcaccgccctgctgaagtgcaaggccaccggcgaccccctgcccgtgatcagctggctgaaggagggcttcaccttccccggcagagaccccagagccaccatccaggagcagggcaccctgcagatcaagaacctgagaatcagcgacaccggcacctacacctgcgtggccaccagcagcagcggcgagaccagctggagcgccgtgctggacgtgaccgagagcggcgccaccatcagcaagaactacgacctgagcgacctgcccggcccccccagcaagccccaggtgaccgacgtgaccaagaacagcgtgaccctgagctggcagcccggcacccccggcaccctgcccgccagcgcctacatcatcgaggccttcagccagagcgtgagcaacagctggcagaccgtggccaaccacgtgaagaccaccctgtacaccgtgagaggcctgagacccaacaccatctacctgttcatggtgagagccatcaacccccagggcctgagcgaccccagccccatgagcgaccccgtgagaacccaggacatcagcccccccgcccagggcgtggaccacagacaggtgcagaaggagctgggcgacgtgctggtgagactgcacaaccccgtggtgctgacccccaccaccgtgcaggtgacctggaccgtggacagacagccccagttcatccagggctacagagtgatgtacagacagaccagcggcctgcaggccaccagcagctggcagaacctggacgccaaggtgcccaccgagagaagcgccgtgctggtgaacctgaagaagggcgtgacctacgagatcaaggtgagaccctacttcaacgagttccagggcatggacagcgagagcaagaccgtgagaaccaccgaggaggcccccagcgcccccccccagagcgtgaccgtgctgaccgtgggcagctacaacagcaccagcatcagcgtgagctgggacccccccccccccgaccaccagaacggcatcatccaggagtacaagatctggtgcctgggcaacgagaccagattccacatcaacaagaccgtggacgccgccatcagaagcgtgatcatcggcggcctgttccccggcatccagtacagagtggaggtggccgccagcaccagcgccggcgtgggcgtgaagagcgagccccagcccatcatcatcggcagaagaaacgaggtggtgatcaccgagaacaacaacagcatcaccgagcagatcaccgacgtggtgaagcagcccgccttcatcgccggcatcggcggcgcctgctgggtgatcctgatgggcttcagcatctggctgtactggagaagaaagaagagaaagggcctgagcaactacgccgtgaccttccagagaggcgacggcggcctgatgagcaacggcagcagacccggcctgctgaacgccggcgaccccagctacccctggctggccgacagctggcccgccaccagcctgcccgtgaacaacagcaacagcggccccaacgagatcggcaacttcggcagaggcgacgtgctgccccccgtgcccggccagggcgacaagaccgccaccatgctgagcgacggcgccatctacagcagcatcgacttcaccaccaagaccagctacaacagcagcagccagatcacccaggccaccccctacgccaccacccagatcctgcacagcaacagcatccacgagctggccgtggacctgcccgacccccagtggaagagcagcatccagcagaagaccgacctgatgggcttcggctacagcctgcccgaccagaacaagggcaacaacggcgagagcggcagctag

SEQ ID NO: 46774 - DNA, 4185 bp, Artificial Sequence
  derived and/or modified sequence
atggccagaagacacgagagagtgaccagaagaatgtggacctgggcccccggcctgctgatgatgaccgtggtgttctggggccaccagggcaacggccagggccagggcagcagactgagacaggaggacttcccccccagaatcgtggagcaccccagcgacgtgatcgtgagcaagggcgagcccaccaccctgaactgcaaggccgagggcagacccacccccaccatcgagtggtacaaggacggcgagagagtggagaccgacaaggacgaccccagaagccacagaatgctgctgcccagcggcagcctgttcttcctgagaatcgtgcacggcagaagaagcaagcccgacgagggcagctacgtgtgcgtggccagaaactacctgggcgaggccgtgagcagaaacgccagcctggaggtggccctgctgagagacgacttcagacagaaccccaccgacgtggtggtggccgccggcgagcccgccatcctggagtgccagccccccagaggccaccccgagcccaccatctactggaagaaggacaaggtgagaatcgacgacaaggaggagagaatcagcatcagaggcggcaagctgatgatcagcaacaccagaaagagcgacgccggcatgtacacctgcgtgggcaccaacatggtgggcgagagagacagcgaccccgccgagctgaccgtgttcgagagacccaccttcctgagaagacccatcaaccaggtggtgctggaggaggaggccgtggagttcagatgccaggtgcagggcgacccccagcccaccgtgagatggaagaaggacgacgccgacctgcccagaggcagatacgacatcaaggacgactacaccctgagaatcaagaagaccatgagcaccgacgagggcacctacatgtgcatcgccgagaacagagtgggcaagatggaggccagcgccaccctgaccgtgagagcccccccccagttcgtggtgagacccagagaccagatcgtggcccagggcagaaccgtgaccttcccctgcgagaccaagggcaacccccagcccgccgtgttctggcagaaggagggcagccagaacctgctgttccccaaccagccccagcagcccaacagcagatgcagcgtgagccccaccggcgacctgaccatcaccaacatccagagaagcgacgccggctactacatctgccaggccctgaccgtggccggcagcatcctggccaaggcccagctggaggtgaccgacgtgctgaccgacagacccccccccatcatcctgcagggccccgccaaccagaccctggccgtggacggcaccgccctgctgaagtgcaaggccaccggcgaccccctgcccgtgatcagctggctgaaggagggcttcaccttccccggcagagaccccagagccaccatccaggagcagggcaccctgcagatcaagaacctgagaatcagcgacaccggcacctacacctgcgtggccaccagcagcagcggcgagaccagctggagcgccgtgctggacgtgaccgagagcggcgccaccatcagcaagaactacgacctgagcgacctgcccggcccccccagcaagccccaggtgaccgacgtgaccaagaacagcgtgaccctgagctggcagcccggcacccccggcaccctgcccgccagcgcctacatcatcgaggccttcagccagagcgtgagcaacagctggcagaccgtggccaaccacgtgaagaccaccctgtacaccgtgagaggcctgagacccaacaccatctacctgttcatggtgagagccatcaacccccagggcctgagcgaccccagccccatgagcgaccccgtgagaacccaggacatcagcccccccgcccagggcgtggaccacagacaggtgcagaaggagctgggcgacgtgctggtgagactgcacaaccccgtggtgctgacccccaccaccgtgcaggtgacctggaccgtggacagacagccccagttcatccagggctacagagtgatgtacagacagaccagcggcctgcaggccaccagcagctggcagaacctggacgccaaggtgcccaccgagagaagcgccgtgctggtgaacctgaagaagggcgtgacctacgagatcaaggtgagaccctacttcaacgagttccagggcatggacagcgagagcaagaccgtgagaaccaccgaggaggcccccagcgcccccccccagagcgtgaccgtgctgaccgtgggcagctacaacagcaccagcatcagcgtgagctgggacccccccccccccgaccaccagaacggcatcatccaggagtacaagatctggtgcctgggcaacgagaccagattccacatcaacaagaccgtggacgccgccatcagaagcgtgatcatcggcggcctgttccccggcatccagtacagagtggaggtggccgccagcaccagcgccggcgtgggcgtgaagagcgagccccagcccatcatcatcggcagaagaaacgaggtggtgatcaccgagaacaacaacagcatcaccgagcagatcaccgacgtggtgaagcagcccgccttcatcgccggcatcggcggcgcctgctgggtgatcctgatgggcttcagcatctggctgtactggagaagaaagaagagaaagggcctgagcaactacgccgtgaccttccagagaggcgacggcggcctgatgagcaacggcagcagacccggcctgctgaacgccggcgaccccagctacccctggctggccgacagctggcccgccaccagcctgcccgtgaacaacagcaacagcggccccaacgagatcggcaacttcggcagaggcgacgtgctgccccccgtgcccggccagggcgacaagaccgccaccatgctgagcgacggcgccatctacagcagcatcgacttcaccaccaagaccagctacaacagcagcagccagatcacccaggccaccccctacgccaccacccagatcctgcacagcaacagcatccacgagctggccgtggacctgcccgacccccagtggaagagcagcatccagcagaagaccgacctgatgggcttcggctacagcctgcccgaccagaacaagggcaacaacggcggcaagggcggcaagaagaagaagaacaagaacagcagcaagccccagaagaacaacggcagcacctgggccaacgtgcccctgccccccccccccgtgcagcccctgcccggcaccgagctggagcactacgccgtggagcagcaggagaacggctacgacagcgacagctggtgcccccccctgcccgtgcagacctacctgcaccagggcctggaggacgagctggaggaggacgacgacagagtgcccaccccccccgtgagaggcgtggccagcagccccgccatcagcttcggccagcagagcaccgccaccctgacccccagccccagagaggagatgcagcccatgctgcaggcccacctggacgagctgaccagagcctaccagttcgacatcgccaagcagacctggcacatccagagcaacaaccagcccccccagccccccgtgccccccctgggctacgtgagcggcgccctgatcagcgacctggagaccgacgtggccgacgacgacgccgacgacgaggaggaggccctggagatccccagacccctgagagccctggaccagacccccggcagcagcatggacaacctggacagcagcgtgaccggcaaggccttcaccagcagccagagacccagacccaccagccccttcagcaccgacagcaacaccagcgccgccctgagccagagccagagacccagacccaccaagaagcacaagggcggcagaatggaccagcagcccgccctgccccacagaagagagggcatgaccgacgaggaggccctggtgccctacagcaagcccagcttccccagccccggcggccacagcagcagcggcaccgccagcagcaagggcagcaccggccccagaaagaccgaggtgctgagagccggccaccagagaaacgccagcgacctgctggacatcggctacatgggcagcaacagccagggccagttcaccggcgagctgtag

SEQ ID NO: 46775 - protein, 571 aa, Artificial Sequence
  derived and/or modified sequence
MGRIGISCLFPASWHFSISPVGCPRILNTNLRQIMVISVLAAAVSLLYFSVVIIRNKYGRLTRDKKFQRYLARVTDIEATDTNNPNVNYGIVVDCGSSGSRVFVYCWPRHNGNPHDLLDIRQMRDKNRKPVVMKIKPGISEFATSPEKVSDYISPLLNFAAEHVPRAKHKETPLYILCTAGMRILPESQQKAILEDLLTDIPVHFDFLFSDSHAEVISGKQEGVYAWIGINFVLGRFEHIEDDDEAVVEVNIPGSESSEAIVRKRTAGILDMGGVSTQIAYEVPKTEEVAKNLLAEFNLGCDVHQTEHVYRVYVATFLGFGGNAARQRYEDRIFANTIQKNRLLGKQTGLTPDMPYLDPCLPLDIKDEIQQNGQTIYLRGTGDFDLCRETIQPFMNKTNETQTSLNGVYQPPIHFQNSEFYGFSEFYYCTEDVLRMGGDYNAAKFTKAAKDYCATKWSILRERFDRGLYASHADLHRLKYQCFKSAWMFEVFHRGFSFPVNYKSLKTALQVYDKEVQWTLGAILYRTRFLPLRKIGMLIIPCSGGCPKLCCAVWQPPPYGATKHLQCAAWN

SEQ ID NO: 46776 - protein, 608 aa, Artificial Sequence
  derived and/or modified sequence
MGRIGISCLFPASWHFSISPVGCPRILNTNLRQIMVISVLAAAVSLLYFSVVIIRNKYGRLTRDKKFQRYLARVTDIEATDTNNPNVNYGIVVDCGSSGSRVFVYCWPRHNGNPHDLLDIRQMRDKNRKPVVMKIKPGISEFATSPEKVSDYISPLLNFAAEHVPRAKHKETPLYILCTAGMRILPESQQKAILEDLLTDIPVHFDFLFSDSHAEVISGKQEGVYAWIGINFVLGRFEHIEDDDEAVVEVNIPGSESSEAIVRKRTAGILDMGGVSTQIAYEVPKTEEVAKNLLAEFNLGCDVHQTEHVYRVYVATFLGFGGNAARQRYEDRIFANTIQKNRLLGKQTGLTPDMPYLDPCLPLDIKDEIQQNGQTIYLRGTGDFDLCRETIQPFMNKTNETQTSLNGVYQPPIHFQNSEFYGFSEFYYCTEDVLRMGGDYNAAKFTKAAKDYCATKWSILRERFDRGLYASHADLHRLKYQCFKSAWMFEVFHRGFSFPVNYKSLKTALQVYDKEVQWTLGAILYRTRFLPLRDIQQEAFRASHTHWRGVSFVYNHYLFSGCFLVVLLAILLYLLRLRRIHRRTPRSSSAAALWMEEGLPAQNAPGTL

SEQ ID NO: 46777 - DNA, 1716 bp, Artificial Sequence
  derived and/or modified sequence
atgggcagaatcggcatcagctgcctgttccccgccagctggcacttcagcatcagccccgtgggctgccccagaatcctgaacaccaacctgagacagatcatggtgatcagcgtgctggccgccgccgtgagcctgctgtacttcagcgtggtgatcatcagaaacaagtacggcagactgaccagagacaagaagttccagagatacctggccagagtgaccgacatcgaggccaccgacaccaacaaccccaacgtgaactacggcatcgtggtggactgcggcagcagcggcagcagagtgttcgtgtactgctggcccagacacaacggcaacccccacgacctgctggacatcagacagatgagagacaagaacagaaagcccgtggtgatgaagatcaagcccggcatcagcgagttcgccaccagccccgagaaggtgagcgactacatcagccccctgctgaacttcgccgccgagcacgtgcccagagccaagcacaaggagacccccctgtacatcctgtgcaccgccggcatgagaatcctgcccgagagccagcagaaggccatcctggaggacctgctgaccgacatccccgtgcacttcgacttcctgttcagcgacagccacgccgaggtgatcagcggcaagcaggagggcgtgtacgcctggatcggcatcaacttcgtgctgggcagattcgagcacatcgaggacgacgacgaggccgtggtggaggtgaacatccccggcagcgagagcagcgaggccatcgtgagaaagagaaccgccggcatcctggacatgggcggcgtgagcacccagatcgcctacgaggtgcccaagaccgaggaggtggccaagaacctgctggccgagttcaacctgggctgcgacgtgcaccagaccgagcacgtgtacagagtgtacgtggccaccttcctgggcttcggcggcaacgccgccagacagagatacgaggacagaatcttcgccaacaccatccagaagaacagactgctgggcaagcagaccggcctgacccccgacatgccctacctggacccctgcctgcccctggacatcaaggacgagatccagcagaacggccagaccatctacctgagaggcaccggcgacttcgacctgtgcagagagaccatccagcccttcatgaacaagaccaacgagacccagaccagcctgaacggcgtgtaccagccccccatccacttccagaacagcgagttctacggcttcagcgagttctactactgcaccgaggacgtgctgagaatgggcggcgactacaacgccgccaagttcaccaaggccgccaaggactactgcgccaccaagtggagcatcctgagagagagattcgacagaggcctgtacgccagccacgccgacctgcacagactgaagtaccagtgcttcaagagcgcctggatgttcgaggtgttccacagaggcttcagcttccccgtgaactacaagagcctgaagaccgccctgcaggtgtacgacaaggaggtgcagtggaccctgggcgccatcctgtacagaaccagattcctgcccctgagaaagatcggcatgctgatcatcccctgcagcggcggctgccccaagctgtgctgcgccgtgtggcagccccccccctacggcgccaccaagcacctgcagtgcgccgcctggaactag

SEQ ID NO: 46778 - DNA, 1827 bp, Artificial Sequence
  derived and/or modified sequence
atgggcagaatcggcatcagctgcctgttccccgccagctggcacttcagcatcagccccgtgggctgccccagaatcctgaacaccaacctgagacagatcatggtgatcagcgtgctggccgccgccgtgagcctgctgtacttcagcgtggtgatcatcagaaacaagtacggcagactgaccagagacaagaagttccagagatacctggccagagtgaccgacatcgaggccaccgacaccaacaaccccaacgtgaactacggcatcgtggtggactgcggcagcagcggcagcagagtgttcgtgtactgctggcccagacacaacggcaacccccacgacctgctggacatcagacagatgagagacaagaacagaaagcccgtggtgatgaagatcaagcccggcatcagcgagttcgccaccagccccgagaaggtgagcgactacatcagccccctgctgaacttcgccgccgagcacgtgcccagagccaagcacaaggagacccccctgtacatcctgtgcaccgccggcatgagaatcctgcccgagagccagcagaaggccatcctggaggacctgctgaccgacatccccgtgcacttcgacttcctgttcagcgacagccacgccgaggtgatcagcggcaagcaggagggcgtgtacgcctggatcggcatcaacttcgtgctgggcagattcgagcacatcgaggacgacgacgaggccgtggtggaggtgaacatccccggcagcgagagcagcgaggccatcgtgagaaagagaaccgccggcatcctggacatgggcggcgtgagcacccagatcgcctacgaggtgcccaagaccgaggaggtggccaagaacctgctggccgagttcaacctgggctgcgacgtgcaccagaccgagcacgtgtacagagtgtacgtggccaccttcctgggcttcggcggcaacgccgccagacagagatacgaggacagaatcttcgccaacaccatccagaagaacagactgctgggcaagcagaccggcctgacccccgacatgccctacctggacccctgcctgcccctggacatcaaggacgagatccagcagaacggccagaccatctacctgagaggcaccggcgacttcgacctgtgcagagagaccatccagcccttcatgaacaagaccaacgagacccagaccagcctgaacggcgtgtaccagccccccatccacttccagaacagcgagttctacggcttcagcgagttctactactgcaccgaggacgtgctgagaatgggcggcgactacaacgccgccaagttcaccaaggccgccaaggactactgcgccaccaagtggagcatcctgagagagagattcgacagaggcctgtacgccagccacgccgacctgcacagactgaagtaccagtgcttcaagagcgcctggatgttcgaggtgttccacagaggcttcagcttccccgtgaactacaagagcctgaagaccgccctgcaggtgtacgacaaggaggtgcagtggaccctgggcgccatcctgtacagaaccagattcctgcccctgagagacatccagcaggaggccttcagagccagccacacccactggagaggcgtgagcttcgtgtacaaccactacctgttcagcggctgcttcctggtggtgctgctggccatcctgctgtacctgctgagactgagaagaatccacagaagaacccccagaagcagcagcgccgccgccctgtggatggaggagggcctgcccgcccagaacgcccccggcaccctgtag

SEQ ID NO: 46779 - DNA, 2097 bp, Artificial Sequence
  derived and/or modified sequence
gcaggcggtgacgtgttgccggcgggggccgggcgggggtgcggctccaggaaaggagcgcggcctccaggaagccggctggccgtgatgctgcccactggtggtcccccgctcccggggtccccggccggccaagcaggagggctctaactccgtgaggaccccagcattatttctataattgtttgtgagaaggactgaatcccagagcattgccttgttgctgacctttcagtatggggaggattggcatctcctgtctttttcctgcttcttggcattttagcatatctccagtagggtgtcctcgaattctgaataccaatttacgccaaattatggtcattagtgtcctggctgctgctgtttcacttttatatttttctgttgtcataatccgaaataagtatgggcgactaaccagagacaagaaatttcaaaggtacctggcacgagttaccgacattgaagctacagacaccaataaccccaatgtgaactatgggatcgtggtggactgtggtagcagtgggtctcgagtatttgtttactgctggccaaggcataatggcaatccacatgatctgttggatatcaggcaaatgagggataaaaaccgaaagccagtggtcatgaagataaaaccgggcatttcagaatttgctacctctccagagaaagtcagtgattacatttctccacttttgaactttgctgcagagcatgtgccacgggcaaaacacaaagagacacctctctacattctctgcacggctggaatgagaatcctccccgaaagccagcagaaagctattctggaagaccttctgaccgatatccccgtgcactttgactttctgttttctgactctcatgcagaagtaatttctgggaaacaagaaggtgtgtatgcttggattggcattaattttgtccttggacgatttgagcatattgaagatgatgatgaggccgttgtggaagttaacattcctggaagtgaaagcagcgaagccattgtccgtaaaaggacagcgggcattctcgacatgggcggcgtgtcgactcagatagcgtacgaagtccccaaaactgaagaagtagctaaaaacttgttagctgaatttaacttgggatgtgatgttcaccaaactgagcatgtgtatcgagtctatgtggccacgtttcttgggtttggtggcaatgctgctcgacagagatacgaagacagaatatttgccaacaccattcaaaagaacaggctcctgggtaaacagactggtctgactcctgatatgccgtacttggacccctgcctacccctagacattaaagatgaaatccagcaaaatggacaaaccatatacctacgagggactggagactttgacctgtgtcgagagactatccagcctttcatgaataaaacaaacgagacccagacttccctcaatggggtctaccagcccccaattcacttccagaacagtgaattctatggcttctccgaattctactactgcaccgaggatgtgttacgaatggggggagactacaatgctgctaaatttactaaagctgcaaaggattattgtgcaacaaagtggtccattttgcgggaacgctttgaccgaggactgtacgcctctcatgctgacctccacaggcttaagtatcagtgcttcaaatcggcctggatgtttgaggtgtttcataggggcttttcgtttcctgtcaactataaaagcttaaagactgccttgcaagtttacgacaaggaggttcagtggacccttggagccatcctctacaggacccgctttctaccattaaggaaaatagggatgctgataataccttgctcagggggttgtccaaagctgtgttgtgcagtatggcagccaccaccatatggggccaccaaacacttgcaatgtgctgcttggaattgagatgcgctgcaaacgcaaagtacgtgctggatttcaaagacttagtacaaaaagaaaaaagaacgcaaaacatctcattaataatttttgtattgattccatattgaaatatattgcatcaaataaaatatatctttaacattga

SEQ ID NO: 46780 - DNA, 2063 bp, Artificial Sequence
  derived and/or modified sequence
gcaggcggtgacgtgttgccggcgggggccgggcgggggtgcggctccaggaaaggagcgcggcctccaggaagccggctggccgtgatgctgcccactggtggtcccccgctcccggggtccccggccggccaagcaggagggctctaactccgtgaggaccccagcattatttctataattgtttgtgagaaggactgaatcccagagcattgccttgttgctgacctttcagtatggggaggattggcatctcctgtctttttcctgcttcttggcattttagcatatctccagtagggtgtcctcgaattctgaataccaatttacgccaaattatggtcattagtgtcctggctgctgctgtttcacttttatatttttctgttgtcataatccgaaataagtatgggcgactaaccagagacaagaaatttcaaaggtacctggcacgagttaccgacattgaagctacagacaccaataaccccaatgtgaactatgggatcgtggtggactgtggtagcagtgggtctcgagtatttgtttactgctggccaaggcataatggcaatccacatgatctgttggatatcaggcaaatgagggataaaaaccgaaagccagtggtcatgaagataaaaccgggcatttcagaatttgctacctctccagagaaagtcagtgattacatttctccacttttgaactttgctgcagagcatgtgccacgggcaaaacacaaagagacacctctctacattctctgcacggctggaatgagaatcctccccgaaagccagcagaaagctattctggaagaccttctgaccgatatccccgtgcactttgactttctgttttctgactctcatgcagaagtaatttctgggaaacaagaaggtgtgtatgcttggattggcattaattttgtccttggacgatttgagcatattgaagatgatgatgaggccgttgtggaagttaacattcctggaagtgaaagcagcgaagccattgtccgtaaaaggacagcgggcattctcgacatgggcggcgtgtcgactcagatagcgtacgaagtccccaaaactgaagaagtagctaaaaacttgttagctgaatttaacttgggatgtgatgttcaccaaactgagcatgtgtatcgagtctatgtggccacgtttcttgggtttggtggcaatgctgctcgacagagatacgaagacagaatatttgccaacaccattcaaaagaacaggctcctgggtaaacagactggtctgactcctgatatgccgtacttggacccctgcctacccctagacattaaagatgaaatccagcaaaatggacaaaccatatacctacgagggactggagactttgacctgtgtcgagagactatccagcctttcatgaataaaacaaacgagacccagacttccctcaatggggtctaccagcccccaattcacttccagaacagtgaattctatggcttctccgaattctactactgcaccgaggatgtgttacgaatggggggagactacaatgctgctaaatttactaaagctgcaaaggattattgtgcaacaaagtggtccattttgcgggaacgctttgaccgaggactgtacgcctctcatgctgacctccacaggcttaagtatcagtgcttcaaatcggcctggatgtttgaggtgtttcataggggcttttcgtttcctgtcaactataaaagcttaaagactgccttgcaagtttacgacaaggaggttcagtggacccttggagccatcctctacaggacccgctttctaccattaagagacatccagcaggaggccttccgagccagtcacacccactggcggggcgtttcctttgtctacaaccactacctgttctctggctgcttcctggtggtgctgctggccatcctgctgtacctgctgcggctgcggcgcatccacaggcgcactccccggagcagctcggccgccgccctctggatggaggagggccttcccgcccagaatgccccggggaccttgtga

SEQ ID NO: 46781 - DNA, 1716 bp, Artificial Sequence
  derived and/or modified sequence
atgggccgaattggcattagttgccttttccctgccagctggcacttctctatctcccccgtcggctgccctaggattctgaacacaaatctgaggcagatcatggtcatatccgtgctcgcggctgctgtgagccttctatacttctctgtcgtaattattcgcaataagtacggccggctgacaagagataagaagttccagagatatctcgcacgcgtgaccgacatcgaagccacagataccaataacccgaacgtgaactacggcattgtggtggattgcggatcctcaggatcccgcgtgtttgtttattgctggcccagacacaacggaaacccacacgacctgctggatatcagacagatgagggacaagaacaggaagccagttgttatgaaaatcaagcctggtatcagcgagtttgccacgtctcccgagaaggtgagcgattatatctcgcctttattaaacttcgctgccgagcacgtgcctagggccaagcacaaagagactccgctgtacattttgtgtacggctggtatgcggatactgccggaaagccagcagaaagcgatcctggaggatctgttgacagatattccagtccattttgatttcctcttttctgactcacatgcagaagtgatctctggcaagcaggagggagtgtatgcctggatcgggattaattttgttctggggcgcttcgaacatattgaggatgatgacgaagctgtggtggaggtaaacattccaggttctgagtcatcggaggccatcgtccggaaacgaacagccggaatcctcgacatgggaggcgtctcgacccagattgcatatgaagtccccaaaacggaggaggtcgctaagaatttattagcagagtttaatcttggctgcgacgtgcatcagactgaacatgtttaccgggtctacgtggctacttttcttggatttggagggaatgcagcccgccagaggtacgaggatcggatcttcgcgaataccatccagaaaaatcgtctgttgggcaagcagaccggcctgacgccggatatgccttaccttgatccctgccttccgctggacattaaggatgagatccaacagaacggccagaccatctacctgcgtggtacaggagatttcgacctttgccgagaaacgattcagccttttatgaacaagaccaacgagactcagacaagcctgaacggggtgtatcagccacccatccatttccagaactctgaattctacggatttagtgagttctactattgcacagaggatgttctgcggatgggtggggactacaacgccgctaaatttaccaaagccgccaaggactactgcgccaccaaatggtcaattctgcgggaaaggtttgacagagggctctacgctagccatgcggacttgcatagactaaaataccagtgcttcaagtccgcgtggatgtttgaagtgttccacagggggttctcctttcccgttaattataaatcgctgaagacagccttgcaagtgtatgataaggaggtgcagtggacgctcggcgcaatcctttatcgaacaagattcctgccgcttagaaagattggaatgcttattatcccttgtagcgggggttgccccaaactctgttgcgccgtctggcagcctccaccgtacggagccactaagcatttacagtgcgcggcttggaattag

SEQ ID NO: 46782 - DNA, 1827 bp, Artificial Sequence
  derived and/or modified sequence
atgggtagaattggaatcagctgcctgttccccgctagctggcatttttctatttctccagtgggctgcccacgcatcctgaatactaacctccgtcagataatggtaatttctgtccttgctgccgccgtttctcttctgtatttttctgtggttataattcggaacaaatatgggagacttactagagataaaaagttccaacggtacctggctagagttacggacatcgaggcaacagatacgaataaccctaatgtcaattacggtattgtagtggactgtggctcttctggatctcgcgtattcgtgtactgctggccacggcataacggcaatcctcatgatctgctcgacattcgacagatgcgggacaagaaccgcaagcccgtggtgatgaagataaagcctggtatttccgaattcgcgacttcacctgagaaagtgtccgactacatatcccctctgctcaacttcgcagcggaacacgtgccccgggccaagcacaaagagactcctctctatatcctgtgtacagcgggaatgcggatcctgccagagagccaacagaaggccattctggaggacctcctgacagacatccctgtgcacttcgattttctgttctcagattcccacgccgaagtgatttcaggcaagcaagaaggagtgtatgcttggatcgggatcaattttgtattaggccgcttcgagcatatcgaggatgatgacgaggccgtggtggaggtgaacatccccgggtcagagagctctgaggctattgtcaggaaacgcacagctggtattctggatatgggaggcgtaagcacacagattgcctatgaagtccccaagactgaagaagtggccaaaaatctgttggctgagttcaacctgggctgcgacgtccatcagaccgaacatgtgtatcgggtgtatgttgcaacgttcctggggttcggcgggaacgccgccagacagagatacgaagatcgaatcttcgccaatactatacagaagaacaggctcctgggcaagcaaaccggcctgactccagacatgccctatttggatccttgccttcccctggatataaaggatgagatacaacagaacggtcaaaccatatatttgcgcggaaccggcgacttcgacctctgtagggagacaatccagccatttatgaacaaaacaaacgagacccagacgagcttgaatggagtctatcagcccccgatccatttccaaaacagtgaattttatggcttcagcgagttttattactgtacagaggatgttttaaggatgggaggtgactataatgccgccaaatttaccaaagcagcaaaggactattgcgccaccaagtggtctatcctgcgggagcggtttgaccgtggtctttatgctagccacgccgatctgcacagattgaagtaccaatgtttcaagtccgcatggatgtttgaggtctttcacagggggttctcatttcccgtcaattataaatccctgaaaaccgctctccaggtgtacgataaagaggtccagtggacgctgggggccattctgtatagaactcggtttcttcctctccgcgatatccaacaggaagccttccgcgcgagtcacactcactggcgcggcgtctcttttgtttataatcactacctgttctccggttgctttctggtggtgcttctggcgatcctcctttatcttttgcgcttgaggcggatccatcgaagaacccctagaagttcctctgcagccgctctgtggatggaagaaggactgccggcccagaatgcccccggcacattatag

SEQ ID NO: 46783 - DNA, 1716 bp, Artificial Sequence
  derived and/or modified sequence
atgggccgcatcggcatcagctgcctcttccctgcctcctggcacttcagcatcagccctgtgggctgcccccgcatcctgaacaccaacctgcggcagatcatggtgatctctgtgctggccgctgctgtgtccctgctgtacttctctgtggtgatcatccggaacaagtatggccgcctgacccgggacaagaagttccagcgctacctggcccgggtgacagacatcgaggccacagacaccaacaaccccaacgtgaactatggaattgtggtggactgtggcagcagcggcagccgggtgtttgtgtactgctggcccaggcacaatggaaacccccatgacctgctggacatccggcagatgagggacaagaacaggaagcctgtggtgatgaagatcaagccaggcatcagcgagtttgccaccagccctgagaaggtgtctgactacatcagccccctgctgaactttgctgctgagcacgtgccccgggccaagcacaaggagacccccctgtacatcctgtgcacagctggcatgaggatcctgcctgagagccagcagaaggccatcctggaggacctgctgacagacatccctgtgcactttgacttcctgttcagtgacagccacgccgaggtgatcagcggcaagcaggagggcgtgtatgcctggattggcatcaactttgtgctgggccgctttgagcacattgaagatgatgatgaggccgtggtggaggtgaacatccctggcagcgagagcagcgaggccatcgtgaggaagaggacagctggcatcctggacatgggcggcgtgtccacccagatcgcctatgaggtgcccaagacagaggaggtggccaagaacctgctggccgagttcaacctgggctgtgatgtgcaccagacagagcacgtgtacagagtgtatgtggccaccttcctgggctttggaggaaatgctgcccggcagagatatgaggaccgcatctttgccaacaccatccagaagaaccggctgctgggcaagcagacaggcctgaccccagacatgccctacctggacccctgcctgcccctggacatcaaggatgagatccagcagaatggccagaccatctacctgcggggcactggagactttgacctgtgccgggagaccatccagcccttcatgaacaagaccaatgagacccagaccagcctgaatggagtgtaccagccccccatccacttccagaacagcgagttctacggcttcagcgagttctactactgcacagaagatgtgctgaggatgggcggggactacaatgctgccaagttcaccaaggccgccaaggactactgtgccaccaagtggagcatcctgcgggagagatttgaccggggcctgtatgccagccatgctgacctgcaccggctgaagtaccagtgcttcaagagcgcctggatgtttgaggtgttccaccggggcttctccttccctgtgaactacaagagcctgaagacagccctgcaggtgtatgacaaggaggtgcagtggaccctgggcgccatcctgtaccgcacccgcttcctgcccctgaggaagattggcatgctgatcatcccctgcagcggcggctgccccaagctgtgctgtgctgtgtggcagcccccaccctatggagccaccaagcacctgcagtgtgccgcctggaactag

SEQ ID NO: 46784 - DNA, 1827 bp, Artificial Sequence
  derived and/or modified sequence
atgggccgcatcggcatcagctgcctcttccctgcctcctggcacttcagcatcagccctgtgggctgcccccgcatcctgaacaccaacctgcggcagatcatggtgatctctgtgctggccgctgctgtgtccctgctgtacttctctgtggtgatcatccggaacaagtatggccgcctgacccgggacaagaagttccagcgctacctggcccgggtgacagacatcgaggccacagacaccaacaaccccaacgtgaactatggaattgtggtggactgtggcagcagcggcagccgggtgtttgtgtactgctggcccaggcacaatggaaacccccatgacctgctggacatccggcagatgagggacaagaacaggaagcctgtggtgatgaagatcaagccaggcatcagcgagtttgccaccagccctgagaaggtgtctgactacatcagccccctgctgaactttgctgctgagcacgtgccccgggccaagcacaaggagacccccctgtacatcctgtgcacagctggcatgaggatcctgcctgagagccagcagaaggccatcctggaggacctgctgacagacatccctgtgcactttgacttcctgttcagtgacagccacgccgaggtgatcagcggcaagcaggagggcgtgtatgcctggattggcatcaactttgtgctgggccgctttgagcacattgaagatgatgatgaggccgtggtggaggtgaacatccctggcagcgagagcagcgaggccatcgtgaggaagaggacagctggcatcctggacatgggcggcgtgtccacccagatcgcctatgaggtgcccaagacagaggaggtggccaagaacctgctggccgagttcaacctgggctgtgatgtgcaccagacagagcacgtgtacagagtgtatgtggccaccttcctgggctttggaggaaatgctgcccggcagagatatgaggaccgcatctttgccaacaccatccagaagaaccggctgctgggcaagcagacaggcctgaccccagacatgccctacctggacccctgcctgcccctggacatcaaggatgagatccagcagaatggccagaccatctacctgcggggcactggagactttgacctgtgccgggagaccatccagcccttcatgaacaagaccaatgagacccagaccagcctgaatggagtgtaccagccccccatccacttccagaacagcgagttctacggcttcagcgagttctactactgcacagaagatgtgctgaggatgggcggggactacaatgctgccaagttcaccaaggccgccaaggactactgtgccaccaagtggagcatcctgcgggagagatttgaccggggcctgtatgccagccatgctgacctgcaccggctgaagtaccagtgcttcaagagcgcctggatgtttgaggtgttccaccggggcttctccttccctgtgaactacaagagcctgaagacagccctgcaggtgtatgacaaggaggtgcagtggaccctgggcgccatcctgtaccgcacccgcttcctgcccctgcgggacatccagcaggaggccttccgggccagccacacccactggaggggcgtgtcctttgtgtacaaccactacctgttcagcggctgcttcctggtggtgctgctggccatcctgctgtacctgctgcggctgcggcgcatccacaggaggacccccaggagcagcagcgctgctgccctgtggatggaggagggcctgcctgcccagaatgcccctggcaccctgtag

SEQ ID NO: 46785 - DNA, 1716 bp, Artificial Sequence
  derived and/or modified sequence
atgggccggatcggcatcagctgcctgttccccgccagctggcacttttccatctctcctgtcggttgtcctagaatcctcaacaccaatcttagacagattatggttataagcgtgctggcagcggcggtctcactgctgtatttttctgtagtgattattagaaacaagtacggccgacttactcgggacaaaaagttccaaagatacctagcccgagtcaccgatattgaggccaccgatacaaataaccctaacgttaattatggcatagtggtagactgtgggagtagtgggtccagagtttttgtctactgctggccccgccataatggaaatccccacgacctgctcgacatccgacagatgagagacaagaaccgaaagcctgtggtgatgaaaataaaacccggcatttccgaatttgcgactagccccgagaaagtgtccgattatatctctccactcctgaatttcgccgccgagcatgtgccacgggcaaaacataaagagaccccactgtatatcctttgcaccgctggcatgaggatcctgcccgaatctcaacaaaaggccatactggaagacctgcttaccgacatccctgtgcacttcgacttcctgttttctgatagccacgcagaagtgatttcagggaagcaggaaggagtgtacgcctggatcggcattaatttcgtcctggggcgattcgagcatattgaggacgacgacgaggccgtggtcgaagttaacatcccaggatccgagagtagcgaagccatcgtgagaaaacgaacagccgggattctggacatggggggtgtgtcaacccagatagcctacgaggtcccaaagacagaggaggttgctaagaaccttttggctgagttcaacctgggatgcgatgtccatcagaccgagcatgtgtacagggtttacgtagccacgtttctcggtttcggaggaaacgctgctcgccaaaggtatgaagatagaatcttcgccaacactatccagaaaaataggctcctgggcaagcagactggtctgacacccgatatgccttacctggacccctgtcttcctctcgatatcaaagatgaaattcagcaaaacggacagaccatttacctgcggggcaccggagatttcgacttgtgccgcgagaccattcagccttttatgaataagacaaacgagacacagacaagccttaacggagtttatcagccacccatccacttccagaatagcgagttttacggtttcagcgaattctattactgcacagaagatgtgctgcgtatgggcggggattataacgctgcaaagtttaccaaggccgccaaggactactgcgctactaagtggtccatactcagggaacgcttcgaccgcggcctttatgctagtcatgcagatttgcacaggttaaaataccagtgttttaaatctgcctggatgtttgaagtgttccaccgggggttttctttcccagtcaactacaaaagtctgaaaactgccctgcaggtgtatgacaaggaggtacagtggaccctcggtgccatcctttaccgtacgagatttctgcccctgcggaagataggaatgttgataattccatgttccggagggtgtcccaaactgtgttgcgccgtgtggcaaccaccgccctacggggctacaaaacatctgcagtgtgctgcctggaactag

SEQ ID NO: 46786 - DNA, 1827 bp, Artificial Sequence
  derived and/or modified sequence
atgggccggatcggcatcagctgcctgttccccgccagctggcacttctccatttcacccgtgggatgtcctagaattctcaatacaaacctcaggcaaatcatggtcatcagcgtgcttgcggcagccgtgagcctactgtattttagcgtggttatcatcagaaataaatacggtcggctgaccagagataagaagttccagcgctacttggcacgggtgacggatatcgaggctacagatactaacaatccgaatgtgaactacggcatcgtagtagactgtgggtccagcggctcaagggtcttcgtatactgttggccacgacataatggtaacccacatgacctgttagacatccgccagatgagggacaagaatagaaaaccagtggttatgaaaatcaaacccggtatcagcgagtttgcaacctcccctgagaaagttagcgactatatcagcccacttctaaacttcgctgccgagcacgtgccaagagcaaagcataaggaaactcctctttacatactgtgcaccgccggaatgaggattctgcccgaatctcagcaaaaggctattttggaggatttgctcaccgacattcccgtgcacttcgactttttgtttagcgacagtcatgctgaagtcatttcgggaaaacaagaaggggtgtacgcctggatcgggattaacttcgtcctggggcggtttgagcacatagaagatgatgatgaggccgttgtggaagtcaatatacctgggagtgaaagtagcgaggccatcgtacgtaaaaggaccgccggaattctggatatgggcggcgtgagcacacagatcgcttacgaagtgcccaagactgaagaagtagctaaaaaccttctagcagaattcaatctcgggtgcgacgtgcaccaaacggaacatgtgtaccgtgtatacgtggctactttcctggggtttggcggcaatgcagcccgtcagcgctatgaggatcggatcttcgcgaacacgatacaaaagaatagactgctgggcaagcagactgggctgaccccagatatgccgtaccttgacccctgcttgcctctggacattaaagatgaaatacagcagaacggccagacgatctatttgcgtggaaccggggacttcgatttatgtcgtgagacaatacagccattcatgaacaaaaccaacgaaacccagacctctctgaatggggtgtaccagcctcctattcacttccaaaatagtgagttttacggcttctcagagttttactattgtaccgaagatgttctccggatggggggcgattataacgccgccaaatttaccaaagcagctaaagactattgcgcaacaaagtggagcatcctccgcgaaaggttcgataggggcctgtacgcttctcatgcggaccttcataggttgaagtatcagtgttttaagagtgcatggatgtttgaggtctttcaccgcggttttagcttccctgtaaattataaatcacttaagactgctttgcaagtctacgataaggaggtccaatggaccctaggcgccatactgtatagaacccggttcctgcccctgcgggacatccagcaagaggcttttagggctagccatacgcattggcggggcgtgtcattcgtttacaaccattacttattcagcggctgtttcctggtggtcttactagccatcctgttatatttactacgcctcaggcggatccaccgtcgtacccctcgcagtagttccgctgcagcactatggatggaggaaggactccccgctcaaaatgctcctgggaccctgtag

SEQ ID NO: 46787 - DNA, 1716 bp, Artificial Sequence
  derived and/or modified sequence
atggggcgtattgggatcagctgccttttcccagcaagttggcattttagtatcagcccagtgggctgccctcgcattctcaacacaaatctgcgacaaatcatggtcattagcgtcctggccgctgctgtaagcttgctgtactttagtgtggttatcattcggaataagtacggacggctgaccagagataagaagttccagcggtacctcgccagagtaactgatattgaggctactgacactaataacccaaacgtcaattatggaattgtggttgactgcggcagtagcggctctcgggtcttcgtgtactgctggccccgtcataacggaaaccctcacgacttactggatatcagacagatgagagacaagaataggaagccggttgtgatgaagattaagcctggaatctctgaattcgcaacatcacctgagaaggtctctgattatatctcacctctgctaaactttgcagccgagcacgtgcctcgggctaagcataaggaaacacctctgtacatcttgtgcacagccggaatgagaatcctgcctgaaagccagcagaaagccattctcgaggatttgctgactgatattcccgtgcatttcgacttcctgttctctgattctcacgccgaggtcatcagtggtaaacaggaaggcgtgtatgcatggatcgggattaactttgtcttggggcgttttgagcatatcgaagacgacgacgaggccgtagtagaagtcaacataccaggttcagagagctcggaggcaatagtgcgaaagagaactgccggaatcctggacatgggcggtgtctccacccagatcgcttacgaagtgcctaaaacagaagaggtcgctaaaaatctcctggccgagtttaatttggggtgtgacgtgcatcagaccgagcatgtgtatagagtgtacgttgcaacgtttctcgggttcggcggtaacgccgcacgacagagatatgaggataggatctttgccaacactattcagaagaacaggctgttggggaagcagacgggcctgacaccggacatgccctacctcgacccatgtctgcccctggatatcaaggatgaaatacagcaaaacgggcagacaatctacctgagagggaccggcgattttgatctgtgccgagaaacgatccagccttttatgaataaaacaaacgaaacccaaacttcattaaacggggtgtaccaacctccgattcacttccagaactctgaattctatggattttccgaattctattactgcactgaagatgtgctgaggatgggcggagactacaatgccgctaaattcaccaaagctgcaaaagactattgcgccacgaaatggtctatccttagagaacgctttgacagaggtttatacgcatcacacgccgatttgcatcgtctcaagtaccagtgttttaaaagtgcttggatgttcgaagtgttccaccgcggtttttctttcccggtgaattataaatcattgaagactgccctccaagtgtacgacaaagaggtgcagtggaccctgggcgcaatcttgtaccggactcggtttctacctctgcgcaagataggcatgctgattattccatgctccggaggctgccccaagttgtgttgtgcagtttggcagccccctccttatggtgctacgaagcacctgcagtgcgctgcttggaattag

SEQ ID NO: 46788 - DNA, 1827 bp, Artificial Sequence
  derived and/or modified sequence
atgggccgtatcgggatttcatgtctgttcccagcgtcttggcacttttcaattagccccgtcggctgcccccgaatccttaacacaaacctgagacagatcatggtgatctcagtacttgccgcagccgtcagcctcctgtacttcagcgttgtgatcattcggaataaatatggaaggcttacgcgagacaagaaatttcagaggtatctggctcgcgtaaccgacattgaagctactgatactaacaatccaaatgtgaattacgggatagttgttgactgcggttcgagcggctctagagttttcgtgtactgctggcctcggcacaatggcaatcctcatgacctgcttgacatccggcaaatgcgtgataagaataggaagcctgttgtgatgaagatcaagcctgggatctctgaatttgccaccagtcccgaaaaggtatccgattatatctctcctctgcttaacttcgccgctgaacatgtccctcgcgcaaaacacaaagagaccccgctttacatactttgtacggccggaatgcgcatccttccagaatcccagcagaaggctattctagaggatctcctaaccgatattccagtccatttcgactttctgttcagtgattcccacgcagaggtgatcagcggaaagcaggaaggggtgtacgcatggattggcataaactttgttcttggaaggtttgaacacattgaagatgatgacgaagcagttgtagaggtgaacatccctggtagcgaaagctcagaggctatcgtacgcaagcggaccgcagggattctcgatatggggggagtgtctacccagattgcttatgaggtgcccaaaacagaagaagtcgccaaaaatctcctcgcagagttcaatcttggttgtgacgtgcaccagaccgagcacgtctatcgggtgtacgtggcgacatttctcggattcggcggaaatgcagcgaggcagcggtatgaagatagaattttcgcgaacacaatccagaaaaatagactgctcgggaagcaaaccggcttaacacctgatatgccttacctggatccctgccttccccttgacatcaaagatgaaattcaacagaatggccagactatttacctgcggggaacgggagattttgacctctgccgggaaacaattcaaccttttatgaataagaccaatgaaactcaaacatccctcaatggcgtgtaccagcccccaattcacttccaaaactccgaattctacgggttcagcgaattttactattgtaccgaagacgtcctgcggatgggaggggactacaacgcggcaaagtttaccaaagctgcaaaagactattgcgctaccaaatggtctattctgcgggagcggttcgatagaggactgtatgcctcccatgctgacctgcatagactgaaataccagtgttttaagtctgcctggatgtttgaggtgttccatcgcggattctctttcccagtgaactacaaatctttgaaaaccgcactgcaggtgtacgacaaggaggtgcaatggacactgggtgctatcctgtatcgcacccgttttctacccctccgagatatccaacaggaggcgttccgcgcaagccacacccactggcggggtgtttcctttgtgtataaccattaccttttttcagggtgttttttggttgtcctgctggctatcttattgtacctgctgaggcttaggcgtattcaccgacgcaccccgaggtcttcaagcgccgctgcactgtggatggaggaaggcctgcctgcacagaacgctcccggtactttatag

SEQ ID NO: 46789 - protein, 389 aa, Artificial Sequence
  derived and/or modified sequence
MEVVEAAAAQLETLKFNGTDFGVGEGPAAPSPGSAPVPGTQPPLQSFEGSPDAGQTVEVKPAGEQPLQPVLNAVAAGTPAPQPQPPAESPACGDCVTSPGAAEPARAPDSLETSDSDSDSDSETDSDSSSSSSSSSSSSSSSSSSCISLPPVLSDGDDDLQIEKENKNFPLKTKDELLLNELPSVEELTIILPEDIELKPLGMVSSIIEQLVIIESMTNLPPVNEETVIFKSDRQAAGKIFEIFGPVAHPFYVLRFNSSDHIESKGIKIKETMYFAPSMKDFTQYIFTEKLKQDKGSDASWKNDQEPPPEALDFSDDEKEKEAKQRKKSQIQGRKKLKSEFNEPGTGISHRYCGLGSRPLQSSESHKLFGFQMHIKVTFTCYFSLLSMQ

SEQ ID NO: 46790 - DNA, 1170 bp, Artificial Sequence
  derived and/or modified sequence
atggaggttgtggaggcggcggccgcacagttggaaaccctaaaattcaacgggacagactttggagtgggggagggccccgccgcaccctcaccagggagtgcacccgtccccggaactcagcccccacttcagagtttcgagggctctcccgatgccggacagacggtagaggtaaaacctgccggcgaacagcctcttcagcctgtacttaatgctgtagctgcaggaactcccgctccacagccgcagccccctgccgagtcacccgcctgcggagattgtgtaacttcccctggtgccgccgaacctgcccgagcacctgacagcctggagacttccgatagtgactccgacagcgacagcgagactgattcagattcaagctcgagctcaagctcctcttcctcatcatctagcagctcttcttcctcatgtatcagcctgccacctgtgctgagcgatggggacgacgacttacagattgaaaaagagaataagaattttcccctgaagaccaaggatgagctcctgcttaatgaactgccctccgtggaagagttgacaattatccttcctgaagacatagaacttaaacccctggggatggtgtcatccatcattgaacagctcgtgatcatcgaaagtatgacaaatctaccccccgtaaacgaggaaaccgtgatattcaagtctgatcggcaggccgcagggaaaatttttgagatctttgggcctgtggctcaccccttctacgtgctcagattcaattcgtctgatcatatcgaatctaaagggattaaaatcaaagaaacaatgtacttcgcaccttccatgaaagacttcacacagtacatatttactgagaaactcaagcaggacaaggggtctgacgcgtcctggaagaatgaccaggagccccccccagaggcactggatttttctgacgacgagaaagagaaagaagccaagcagcgcaagaagtctcagattcagggcagaaagaagctgaagagcgaattcaatgagcccggcacaggcatctcccatcggtactgcggactaggcagcaggccattgcaatctagcgagagtcacaagctgtttggctttcagatgcacatcaaggttaccttcacttgctactttagtctactgtccatgcagtag

SEQ ID NO: 46791 - DNA, 1170 bp, Artificial Sequence
  derived and/or modified sequence
atggaggtggtggaggccgccgccgcccagctggagaccctgaagttcaatggaacagactttggagtgggggagggccctgctgcccccagccctggcagcgcccctgtgcccggcacccagccccccctgcagagctttgagggcagcccagatgctggccagacagtggaggtgaagccagctggggagcagcccctgcagcctgtgctgaatgctgtggccgccggcaccccagccccccagccccagcccccagctgagagccctgcctgtggggactgtgtgaccagccctggagctgctgagcccgcccgggccccagacagcctggagaccagtgacagcgacagcgacagcgacagcgagacagacagcgacagcagcagcagcagcagcagcagcagcagcagcagcagcagcagcagcagcagctgcatcagcctgccccctgtgctgagtgatggagatgatgacctgcagatcgagaaggagaacaagaacttccccctgaagaccaaggatgagctgctgctgaatgagctgcccagcgtggaggagctgaccatcatcctgcctgaggacatcgagctgaagcccctgggcatggtgagcagcatcatcgagcagctggtgatcatcgagagcatgaccaacctgccccctgtgaatgaggagaccgtcatcttcaagagtgaccggcaggccgccggcaagatctttgagatcttcggccctgtggcccaccccttctacgtgctgcgcttcaacagcagtgaccacatcgagagcaagggcatcaagatcaaggagaccatgtactttgcccccagcatgaaggacttcacccagtacatcttcacagagaagctgaagcaggacaagggcagtgatgcctcctggaagaatgaccaggagcccccacctgaggccctggacttcagtgatgatgagaaggagaaggaggccaagcagaggaagaagagccagatccagggcaggaagaagctgaagtctgagttcaatgagcccggcaccggcatcagccaccgctactgcggcctgggcagccggcccctgcagagcagcgagagccacaagctgtttggcttccagatgcacatcaaggtgaccttcacctgctacttcagcctgctgtccatgcagtag

SEQ ID NO: 46792 - DNA, 1170 bp, Artificial Sequence
  derived and/or modified sequence
atggaggtggtggaggccgccgccgcccagctggagaccctgaagtttaatggcaccgactttggagtgggagagggtcccgctgccccctctccagggtccgctccagtccctggaacccagccgcccctgcagtcatttgagggtagccccgatgctggacaaactgtcgaggtcaagcccgccggcgagcagcctcttcagccagttttgaacgccgtcgccgcaggcacacccgcaccccaacctcagccccctgctgaatcgccagcttgcggagattgtgtgacaagtccaggtgcggctgagccagccagggctccggacagcctggaaacatctgactccgactcagattctgattcagagactgactcggatagtagctcttcctcttcctcgtcctctagctcaagtagttcatcctcctcatcctgtatatccctgccccccgtcttgtcagacggagacgatgacctccagatagagaaggagaacaagaactttccgctgaagacaaaggacgagctgctcctgaatgagctgccaagcgtggaggaactaacgatcatcctgccggaagatattgaactcaagccactcggcatggtgtcaagtattatcgaacagctggtgatcatcgaaagtatgactaaccttccccccgttaacgaagagacagtgatctttaaatcagatcggcaggcggctggtaagatatttgaaattttcgggcctgtggcacaccccttttacgtcctccgtttcaacagcagtgatcacatagagtcaaaggggattaagattaaagagacaatgtatttcgcaccctctatgaaagatttcactcagtacatcttcacagagaagctcaaacaggataaggggagcgacgccagctggaaaaacgatcaagaacctccacctgaggcactcgattttagtgacgatgaaaaggaaaaggaagccaagcagcggaaaaagtcacagattcagggaagaaagaaactgaaaagtgaattcaacgagccaggaacagggatatcccatcggtattgcgggctgggatcgcggccattacagtctagcgagagccacaaactatttgggtttcaaatgcatatcaaggtcacttttacatgttattttagcttgctgagtatgcagtag

SEQ ID NO: 46793 - DNA, 1604 bp, Artificial Sequence
  derived and/or modified sequence
gtgtcttttggctcctccgcgtgtagttacctgagaaacgcgggaagttgggcccaggcagtgttgctgcggttgcctaagttgtttttctatttctggagagagccgtgagcttgtccaggggccccaatcctgaggccgacccggtttctggcgcggtgcgatggaggtagtggaggccgccgccgctcagctggaaactctgaaattcaatggcaccgactttggagttggggaaggtccggcggctccgtctccgggctctgcccctgtgccagggacacagccgccgctacagtcgtttgaggggtccccggacgctgggcagaccgtggaggttaagcctgccggggagcagcctctgcagcccgttctgaacgccgtcgcggccgggaccccggcgccgcagccacagccaccggctgaatcgccggcctgcggagactgcgtcacctccccaggagccgcagagcctgcgcgggcgccggactccttggagacctcggactcggattcggactcggacagtgaaacagattcagatagttcaagttcatcgtcttcctcttcatcttcctcatcgtcgtcttcttcctcttgtatatcacttcctccagtgctgtcagatggagatgatgatttacaaattgagaaggaaaataagaattttcctcttaaaacaaaagatgaattacttcttaatgaactgccttctgttgaagaactcactattattctgcctgaagatattgagttaaagcctcttgggatggtttcaagtattattgaacaactagtaataattgaatctatgactaacctacctccagttaatgaggagactgtaatttttaaaagtgatcgacaagcagcaggaaagatattcgagatatttggacctgttgcacatccattttatgtgttacggtttaattcttcagatcacattgagagtaaaggtattaaaataaaggagactatgtattttgctccatcaatgaaagatttcactcaatatatattcacagaaaaactaaaacaggataagggatcagatgcatcatggaagaatgatcaggaaccaccaccagaggccttagattttagtgatgatgaaaaagagaaggaagccaaacagaggaaaaaatctcagattcaaggccggaaaaaactcaaatctgaatttaatgagcctggtacaggtatatctcacagatattgtggcctcggatccagaccattgcagtcaagtgagtcacacaaactttttggtttccaaatgcatataaaagttacgtttacatgctactttagtttattaagtatgcaatagcattgtgtctaaaaaaaccaatgtgcatatctcaattggagaatactttactgttcaaaaaataataatgaccctttgagcctgcagtgagttacagtcttttagctgttggaaggtctggactcaagtgctgttggccgctgactaatcagggtagttgttgctaaaagtggcagtttctcctaatagatagcagtgaagtgtgctacattaattggctcttcctttcaccaaagatttctgtgtagcatgtgatgctacttgatagcat

SEQ ID NO: 46794 - DNA, 1170 bp, Artificial Sequence
  derived and/or modified sequence
atggaggtagtggaagctgcagccgctcagttggaaacacttaagttcaatggtaccgattttggggtaggtgaaggaccagcagccccttcccccggtagtgctccagtgcctggtactcagccccctttacagtctttcgagggatcgcctgacgcgggtcagacagtggaggttaaacctgctggagagcagcccctgcagcctgttctaaatgccgtggcggcaggtactcctgctccccagcctcagccccctgcagaatcacctgcctgcggcgattgtgtgacctcccctggcgcagcagagccagccagggcgccagactctctagaaacgagtgattcagattccgactccgacagtgaaacagattcagatagtagctcttcttcgagtagttcctcttccagctcatcttccagctcttcatcttgtatttctttgccccctgttctatcggatggtgacgacgaccttcagatcgaaaaagagaacaagaatttcccactgaaaacgaaagacgaacttcttctgaatgagctcccaagtgttgaggaactgaccataattctgcccgaagacatcgagctgaagcctttgggcatggtgtcctctatcatcgaacagctagtaattatagagtccatgaccaacctgccgccagtgaacgaggagacggtgatattcaaatccgatcggcaagcggcagggaaaattttcgaaatttttggcccagtggcccacccattctacgtgttaagattcaacagctcagatcacatagagagcaagggcatcaaaatcaaagagactatgtacttcgcacctagtatgaaggatttcactcaatacatcttcaccgagaagctgaagcaggataaaggctcggacgcatcgtggaaaaacgatcaggaacctccacctgaggcgctagatttctctgacgatgaaaaggaaaaagaagcgaaacagcgaaagaagagtcaaatacaggggaggaaaaagctgaagagcgagtttaacgagcctgggacggggatttcacacaggtactgcggactgggctctcgacccctgcagtctagcgagtctcacaagttgttcgggttccagatgcacattaaggtgaccttcacatgctacttttccctcttaagcatgcaatag

SEQ ID NO: 46795 - DNA, 1170 bp, Artificial Sequence
  derived and/or modified sequence
atggaggtggtggaggccgccgccgcccagctggagaccctgaagttcaacggcaccgacttcggcgtgggcgagggccccgccgcccccagccccggcagcgcccccgtgcccggcacccagccccccctgcagagcttcgagggcagccccgacgccggccagaccgtggaggtgaagcccgccggcgagcagcccctgcagcccgtgctgaacgccgtggccgccggcacccccgccccccagccccagccccccgccgagagccccgcctgcggcgactgcgtgaccagccccggcgccgccgagcccgccagagcccccgacagcctggagaccagcgacagcgacagcgacagcgacagcgagaccgacagcgacagcagcagcagcagcagcagcagcagcagcagcagcagcagcagcagcagcagctgcatcagcctgccccccgtgctgagcgacggcgacgacgacctgcagatcgagaaggagaacaagaacttccccctgaagaccaaggacgagctgctgctgaacgagctgcccagcgtggaggagctgaccatcatcctgcccgaggacatcgagctgaagcccctgggcatggtgagcagcatcatcgagcagctggtgatcatcgagagcatgaccaacctgccccccgtgaacgaggagaccgtgatcttcaagagcgacagacaggccgccggcaagatcttcgagatcttcggccccgtggcccaccccttctacgtgctgagattcaacagcagcgaccacatcgagagcaagggcatcaagatcaaggagaccatgtacttcgcccccagcatgaaggacttcacccagtacatcttcaccgagaagctgaagcaggacaagggcagcgacgccagctggaagaacgaccaggagcccccccccgaggccctggacttcagcgacgacgagaaggagaaggaggccaagcagagaaagaagagccagatccagggcagaaagaagctgaagagcgagttcaacgagcccggcaccggcatcagccacagatactgcggcctgggcagcagacccctgcagagcagcgagagccacaagctgttcggcttccagatgcacatcaaggtgaccttcacctgctacttcagcctgctgagcatgcagtag

SEQ ID NO: 46796 - protein, 1093 aa, Artificial Sequence
  derived and/or modified sequence
MGTGDFICISMTGGAPWGFRLQGGKEQKQPLQVAKIRNQSKASGSGLCEGDEVVSINGNPCADLTYPEVIKLMESITDSLQMLIKRPSSGISEALISENENKNLEHLTHGGYVESTTLQIRPATKTQCTEFFLAPVKTEVPLAENQRSGPDCAGSLKEETGPSYQRAPQMPDSQRGRVAEELILREKVEAVQPGPVVELQLSLSQERHKGASGPLVALPGAEKSKSPDPDPNLSHDRIVHINSIPTNEKADPFLRSSKIIQISSGRELRVIQESEAGDAGLPRVEVILDCSDRQKTEGCRLQAGKECVDSPVEGGQSEAPPSLVSFAVSSEGTEQGEDPRSEKDHSRPHKHRARHARLRRSESLSEKQVKEAKSKCKSIALLLTDAPNPNSKGVLMFKKRRRRARKYTLVSYGTGELEREADEEEEGDKEDTCEVAFLGASESEVDEELLSDVDDNTQVVNFDWDSGLVDIEKKLNRGDKMEMLPDTTGKGALMFAKRRERMDQITAQKEEDKVGGTPSREQDAAQTDGLRTTTSYQRKEEESVRTQSSVSKSYIEVSHGLGHVPQQNGFSGTSETANIQRMVPMNRTAKPFPGSVNQPATPFSPTRNMTSPIADFPAPPPYSAVTPPPDAFSRGVSSPIAGPAQPPPWPQPAPWSQPAFYDSSERIASRDERISVPAKRTGILQEAKRRSTTKPMFTFKEPKVSPNPELLSLLQNSEGKRGTGAGGDSGPEEDYLSLGAEACNFMQSSSAKQKTPPPVAPKPAVKSSSSQPVTPVSPVWSPGVAPTQPPAFPTSNPSKGTVVSSIKIAQPSYPPARPASTLNVAGPFKGPQAAVASQNYTPKPTVSTPTVNAVQPGAVGPSNELPGMSGRGAQLFAKRQSRMEKYVVDSDTVQAHAARAQSPTPSLPASWKYSSNVRAPPPVAYNPIHSPSYPLAALKSQPSAAQPSKMGKKKGKKPLNALDVMKHQPYQLNASLFTFQPPDAKDGLPQKSSVKVNSALAMKQALPPRPVNAASPTNVQASSVYSVPAYTSPPSFFAEASSPVSASPVPVGIPTSPKQESASSSYFVAPRPKFSAKKSGVTIQVWKPSVVEE

SEQ ID NO: 46797 - DNA, 3282 bp, Artificial Sequence
  derived and/or modified sequence
atgggcaccggcgacttcatctgcatcagcatgaccggcggcgccccctggggcttcagactgcagggcggcaaggagcagaagcagcccctgcaggtggccaagatcagaaaccagagcaaggccagcggcagcggcctgtgcgagggcgacgaggtggtgagcatcaacggcaacccctgcgccgacctgacctaccccgaggtgatcaagctgatggagagcatcaccgacagcctgcagatgctgatcaagagacccagcagcggcatcagcgaggccctgatcagcgagaacgagaacaagaacctggagcacctgacccacggcggctacgtggagagcaccaccctgcagatcagacccgccaccaagacccagtgcaccgagttcttcctggcccccgtgaagaccgaggtgcccctggccgagaaccagagaagcggccccgactgcgccggcagcctgaaggaggagaccggccccagctaccagagagccccccagatgcccgacagccagagaggcagagtggccgaggagctgatcctgagagagaaggtggaggccgtgcagcccggccccgtggtggagctgcagctgagcctgagccaggagagacacaagggcgccagcggccccctggtggccctgcccggcgccgagaagagcaagagccccgaccccgaccccaacctgagccacgacagaatcgtgcacatcaacagcatccccaccaacgagaaggccgaccccttcctgagaagcagcaagatcatccagatcagcagcggcagagagctgagagtgatccaggagagcgaggccggcgacgccggcctgcccagagtggaggtgatcctggactgcagcgacagacagaagaccgagggctgcagactgcaggccggcaaggagtgcgtggacagccccgtggagggcggccagagcgaggccccccccagcctggtgagcttcgccgtgagcagcgagggcaccgagcagggcgaggaccccagaagcgagaaggaccacagcagaccccacaagcacagagccagacacgccagactgagaagaagcgagagcctgagcgagaagcaggtgaaggaggccaagagcaagtgcaagagcatcgccctgctgctgaccgacgcccccaaccccaacagcaagggcgtgctgatgttcaagaagagaagaagaagagccagaaagtacaccctggtgagctacggcaccggcgagctggagagagaggccgacgaggaggaggagggcgacaaggaggacacctgcgaggtggccttcctgggcgccagcgagagcgaggtggacgaggagctgctgagcgacgtggacgacaacacccaggtggtgaacttcgactgggacagcggcctggtggacatcgagaagaagctgaacagaggcgacaagatggagatgctgcccgacaccaccggcaagggcgccctgatgttcgccaagagaagagagagaatggaccagatcaccgcccagaaggaggaggacaaggtgggcggcacccccagcagagagcaggacgccgcccagaccgacggcctgagaaccaccaccagctaccagagaaaggaggaggagagcgtgagaacccagagcagcgtgagcaagagctacatcgaggtgagccacggcctgggccacgtgccccagcagaacggcttcagcggcaccagcgagaccgccaacatccagagaatggtgcccatgaacagaaccgccaagcccttccccggcagcgtgaaccagcccgccacccccttcagccccaccagaaacatgaccagccccatcgccgacttccccgccccccccccctacagcgccgtgacccccccccccgacgccttcagcagaggcgtgagcagccccatcgccggccccgcccagccccccccctggccccagcccgccccctggagccagcccgccttctacgacagcagcgagagaatcgccagcagagacgagagaatcagcgtgcccgccaagagaaccggcatcctgcaggaggccaagagaagaagcaccaccaagcccatgttcaccttcaaggagcccaaggtgagccccaaccccgagctgctgagcctgctgcagaacagcgagggcaagagaggcaccggcgccggcggcgacagcggccccgaggaggactacctgagcctgggcgccgaggcctgcaacttcatgcagagcagcagcgccaagcagaagacccccccccccgtggcccccaagcccgccgtgaagagcagcagcagccagcccgtgacccccgtgagccccgtgtggagccccggcgtggcccccacccagccccccgccttccccaccagcaaccccagcaagggcaccgtggtgagcagcatcaagatcgcccagcccagctacccccccgccagacccgccagcaccctgaacgtggccggccccttcaagggcccccaggccgccgtggccagccagaactacacccccaagcccaccgtgagcacccccaccgtgaacgccgtgcagcccggcgccgtgggccccagcaacgagctgcccggcatgagcggcagaggcgcccagctgttcgccaagagacagagcagaatggagaagtacgtggtggacagcgacaccgtgcaggcccacgccgccagagcccagagccccacccccagcctgcccgccagctggaagtacagcagcaacgtgagagcccccccccccgtggcctacaaccccatccacagccccagctaccccctggccgccctgaagagccagcccagcgccgcccagcccagcaagatgggcaagaagaagggcaagaagcccctgaacgccctggacgtgatgaagcaccagccctaccagctgaacgccagcctgttcaccttccagccccccgacgccaaggacggcctgccccagaagagcagcgtgaaggtgaacagcgccctggccatgaagcaggccctgccccccagacccgtgaacgccgccagccccaccaacgtgcaggccagcagcgtgtacagcgtgcccgcctacaccagcccccccagcttcttcgccgaggccagcagccccgtgagcgccagccccgtgcccgtgggcatccccaccagccccaagcaggagagcgccagcagcagctacttcgtggcccccagacccaagttcagcgccaagaagagcggcgtgaccatccaggtgtggaagcccagcgtggtggaggagtag

SEQ ID NO: 46798 - DNA, 3282 bp, Artificial Sequence
  derived and/or modified sequence
atgggtacaggtgatttcatctgtatatcaatgacaggtggggctccttggggctttagactgcaaggcgggaaggagcagaaacagcctcttcaggtggccaagatacggaaccagtctaaggcttccgggagcggcctgtgcgaaggggacgaagtggtttctatcaatggcaatccctgcgccgacctcacctatcctgaggtcattaaactgatggaatcgataactgacagtcttcaaatgctcatcaaacggcctagcagtggaatatccgaggctctgatctctgagaatgaaaataaaaacctcgagcatctcacgcatggaggatatgtcgagtctacgactttgcagatacgccccgctaccaagacacagtgcactgaattcttcttggcaccagtgaagacggaagttccgctggcagagaatcaaagatctgggccagattgcgcggggagtctaaaggaggagactggccccagttaccaacgcgccccccagatgccggactcacagagaggacgggtggcagaggaactgatcctgcgcgagaaagttgaggctgtgcagcctggcccggtcgtcgagttgcagctcagcctaagccaggaaagacataagggcgcctctggccctttggttgctcttcccggggctgagaagagtaagtctcccgaccccgatcctaatctttcccacgacagaattgtgcacatcaatagcattcccactaatgaaaaggcagatccatttttgagaagctctaagataattcagatcagttctggaagggagctccgggttattcaggaaagcgaggccggagacgctggcctgcccagggtggaagtgatcctggattgcagtgatagacagaaaactgagggttgtagactgcaagctggcaaggagtgcgtggactcaccagtggaaggaggtcagagcgaagctccgcccagtttggttagcttcgcggtttcctccgaaggaacagagcagggcgaggacccccgttcagaaaaagaccacagcagaccccataaacacagagccaggcatgcgaggctgagacgaagcgaatctctcagcgaaaagcaggtaaaggaggctaagtctaagtgtaagagcatcgctctgctcctgaccgacgcgccgaatccaaattccaaaggcgtgttgatgttcaaaaagagaagaagaagggccagaaaatataccctggtgagctacgggactggggaactggagagggaggccgacgaggaggaggaaggtgacaaggaagatacttgcgaggtggccttcttaggggcctcagagtcagaggtggatgaggagctgttgtcagacgtggacgacaacactcaggtggttaacttcgactgggattctggactggtagatattgagaaaaagcttaataggggcgataagatggagatgctgccggacacaacaggcaaaggtgcgttgatgtttgctaagaggcgggagaggatggatcagatcactgcccagaaggaggaggataaagtcgggggcaccccttctagagagcaggacgctgcgcaaaccgatgggctgcgtacgactaccagttaccagcgcaaagaagaagaatcagtgcggactcagtcatctgtgtccaaatcatacatcgaagtgagccacggcctcgggcacgtgcctcagcagaatgggttctccggcacatccgaaaccgccaacatccagagaatggttccaatgaacaggacagcgaaaccttttcccgggtccgtgaatcagcctgctactccattttctccaacccgaaacatgacaagtcctatcgcggattttccagctcctccaccatatagtgcagtcacccctcccccggatgctttttcccgtggagtttctagccctattgccggaccagctcagcctcccccctggccccagccagccccatggtcacagccggccttttatgattcttccgaacgcatcgcgagtagagatgagcgtattagtgttccagctaaaagaacagggattctccaggaggcgaaaagacgaagtactactaaacctatgttcacctttaaggagcctaaagtgagtccaaacccagagctcctgtccctgttacagaactctgaaggaaagcggggaaccggggctgggggggactctggacctgaggaagattacctgtcgctgggtgccgaagcgtgtaactttatgcagagcagctccgccaagcagaaaacaccgcctcccgtggcccctaaacccgccgtcaaaagctcctccagccagcccgtgactcccgtgtcaccggtgtggtcacctggtgtagcaccaacgcagccgcccgcgttcccaaccagcaatccatctaaaggcaccgtggtgtctagcatcaaaatcgcccagccttcctaccctccggcacgccccgccagcacattgaacgtcgctggtccctttaagggaccccaggccgctgtggcgagccagaattatacccctaaacctaccgtctctacgccaacggtgaacgcggtccaaccaggcgcagttggtcctagcaacgaattgcctggaatgagcgggagaggagcgcagttatttgctaaacgacagagcaggatggaaaaatatgttgtcgacagtgataccgtgcaagctcacgccgcaagagcacaatccccgaccccctcgttgccagcctcctggaaatattcttcaaacgtgagagctcctcctcctgtggcctacaatcccatccattcaccttcataccctcttgcagccttaaagagtcagccctctgcagctcaaccttccaagatgggaaaaaagaaaggcaaaaagccattgaacgctctggatgtgatgaaacatcagccttatcagcttaacgcgtctctgtttaccttccagcccccagatgcaaaagacggtctgccacaaaagtcctctgtcaaagtcaactccgccctggctatgaagcaggccctccccccccgccccgtcaacgctgcatctcccaccaacgtgcaggccagctcagtatacagcgttcccgcatatacctcgccaccatccttcttcgccgaggccagctctccggtcagcgctagccctgttcctgtcggtatccccaccagtcccaagcaagagtctgcctcttcctcttatttcgtagcaccccgacccaaatttagcgccaaaaagtccggcgtgaccattcaggtgtggaagccatccgtggtcgaggaatag

SEQ ID NO: 46799 - DNA, 3282 bp, Artificial Sequence
  derived and/or modified sequence
atgggcactggagacttcatctgcatctccatgactggaggagccccctggggcttccggctgcagggcggcaaggagcagaagcagcccctgcaggtggccaagatccggaaccagagcaaggccagcggcagcggcctgtgtgaaggagatgaggtggtgtccatcaatggaaacccctgtgccgacctgacctacccagaggtgatcaagctgatggagagcatcacagacagcctgcagatgctgatcaagaggcccagcagcggcatcagcgaggccctgatcagtgaaaatgaaaacaagaacctggagcacctgacccatggaggctacgtggagagcaccaccctgcagatccggcctgccaccaagacccagtgcacagagttcttcctggcccctgtgaagacagaggtgcccctggccgagaaccagaggagcggccctgactgtgccggcagcctgaaggaggagaccggccccagctaccagagggccccccagatgccagacagccagaggggccgggtggccgaggagctgatcctgcgggagaaggtggaggccgtgcagcccggccctgtggtggagctgcagctgagcctgagccaggagcggcacaagggggccagcggccccctggtggccctgcctggagctgagaagagcaagagcccagaccctgaccccaacctgagccatgaccgcatcgtgcacatcaacagcatccccaccaatgagaaggctgaccccttcctgcggagcagcaagatcatccagatcagcagcggccgggagctgcgggtcatccaggagagcgaggccggagatgctggcctgccccgggtggaggtgatcctggactgcagcgaccggcagaagacagagggctgccgcctgcaggccggcaaggaatgtgtggacagccctgtggagggcggccagagcgaggccccacccagcctggtgtcctttgctgtgagcagcgagggcacagagcagggcgaggaccccaggtctgagaaggaccacagccggccccacaagcaccgggcccggcatgcccggctgcggcgctctgagagcctgtctgagaagcaggtgaaggaggccaagagcaagtgcaagagcatcgccctgctgctgacagatgcccccaaccccaacagcaagggcgtgctgatgttcaagaagagaagaagaagagccaggaagtacaccctggtgtcctatggcaccggggagctggagcgggaggctgatgaggaggaggagggggacaaggaggacacctgtgaggtggccttcctgggcgccagcgagagcgaggtggatgaggagctgctgagtgatgtggatgacaacacccaggtggtgaactttgactgggacagcggcctggtggacatcgagaagaagctgaacagaggagacaagatggagatgctgcctgacaccaccgggaagggggccctgatgtttgccaagaggcgggagaggatggaccagatcacagcccagaaggaggaggacaaggtgggcggcacccccagccgggagcaggatgctgcccagacagatggcctgcggaccaccaccagctaccagaggaaggaggaggagagcgtgaggacccagagctctgtgtccaagagctacatcgaggtgagccacggcctgggccacgtgccccagcagaatggcttcagcggcaccagcgagacagccaacatccagaggatggtgcccatgaacagaacagccaagcccttccctggctctgtgaaccagcctgccacccccttcagccccaccaggaacatgaccagccccatcgctgacttccctgcccccccaccctacagcgctgtgaccccacctccagatgccttcagcagaggagtgagcagccccatcgccggccctgcccagcccccaccctggccccagcctgccccctggagccagcctgccttctatgacagcagcgagagaattgccagcagagatgagcgcatctctgtgcctgccaagaggacaggcatcctgcaggaggccaagagaagaagcaccaccaagcccatgttcaccttcaaggagcccaaggtgagccccaaccctgagctgctgagcctgctgcagaacagcgagggcaagaggggcactggagctggaggagacagcggccctgaggaggactacctgagcctgggcgctgaggcctgcaacttcatgcagagcagcagcgccaagcagaagaccccacctcctgtggcccccaagccagctgtgaagagcagcagcagccagcctgtgacccctgtgtcccctgtgtggagccctggggtggcccccacccagcccccagccttccccaccagcaaccccagcaaaggaacagtggtgagcagcatcaagatcgcccagcccagctaccccccagcccggcctgccagcaccctgaatgtggccggccccttcaagggcccccaggccgctgtggccagccagaactacacccccaagcccaccgtgtccacccccaccgtgaatgctgtgcagcccggggctgtgggccccagcaatgagctgcccggcatgagcggccgcggggcccagctgtttgccaagaggcagagcaggatggagaagtatgtggtggacagcgacacagtgcaggcccatgctgcccgggcccagagccccacccccagcctgcctgcctcctggaagtacagcagcaatgtgcgggcccctcctcctgtggcctacaaccccatccacagccccagctaccccctggccgccctgaagagccagcccagcgctgcccagcccagcaagatgggcaagaagaagggcaagaagcccctgaatgccctggatgtgatgaagcaccagccctaccagctgaatgccagcctcttcaccttccagcccccagatgccaaggatggcctgccccagaagagctctgtgaaggtgaacagcgccctggccatgaagcaggccctgccccccaggcctgtgaatgctgccagccccaccaacgtgcaggccagctctgtgtacagcgtgcctgcctacaccagccccccatccttctttgctgaggccagcagccctgtgtctgccagccctgtgcctgtgggcatccccaccagccccaagcaggagagcgccagcagcagctactttgtggccccccggcccaagttcagcgccaagaagtctggagtgaccatccaggtgtggaagcccagcgtggtggaggagtag

SEQ ID NO: 46800 - DNA, 3282 bp, Artificial Sequence
  derived and/or modified sequence
atgggcaccggcgacttcatctgcatcagcatgaccggcggcgccccatggggatttcggctccaggggggaaaggaacagaagcagccattgcaggtggctaaaatccgaaaccagtccaaagctagtggctcaggcctatgcgagggcgacgaagtggtgtcgatcaacggcaatccatgtgctgatctgacctatccagaggtcataaaactaatggagtccattacagatagcctacagatgttaataaaacgccctagctcagggatcagcgaagccctgatttcggaaaacgagaataagaacctggagcatctcacccacggcggctatgtcgagtctaccactctgcagatcaggccggccaccaaaacacagtgcactgaattcttcctggccccagtaaaaacagaagtgccactggctgagaaccagcgaagtgggcctgattgcgctgggtcgttgaaggaggaaacaggaccttcataccagcgcgcaccccagatgcccgacagccagcgcggccgcgttgctgaggagctgattttacgagagaaggtagaggctgtgcaacctgggcctgtggttgagctacaactgagtttgtcccaggaacgtcataagggcgccagcggcccattagtggcgctgccgggcgccgaaaagagtaagtctccagatcctgaccccaacctaagccatgatcgcatagtgcacattaattcgataccaactaatgaaaaggcggacccattcctgcggtcctcaaagatcatccagatctccagcgggcgcgaacttcgcgtgattcaggagtctgaggccggagacgccggattaccgagagttgaagtaatcctggattgttctgaccgccagaagacggagggctgtaggctgcaagccggtaaggaatgcgtcgattccccagtggaagggggacagtctgaggcccccccgtctctcgtcagcttcgccgtgtcaagcgaggggaccgagcaaggcgaggacccccgatcagagaaagaccactccaggccccacaagcatagggcaagacacgcgcgtcttagacgctctgagtctctgtctgagaagcaggttaaagaagcaaaaagtaaatgcaagtcgatcgcgctcctgttaaccgacgcgccaaaccccaactcaaagggcgttctgatgtttaaaaagagacggagacgcgccagaaaatatactttggtgagctacggtaccggcgagctggagcgggaagcagatgaggaggaggagggcgacaaagaggacacatgtgaagttgccttcctaggagccagcgaatccgaagttgatgaggagctgctcagcgacgttgatgacaacacacaagttgtgaatttcgattgggacagcggcctcgtggacatcgagaagaagttgaaccgcggagataagatggaaatgttgcccgataccacaggaaagggcgcgctcatgttcgctaagagaagagagcgaatggaccaaatcaccgctcagaaggaagaggacaaggtgggaggcacgccgtccagggagcaggacgccgcccaaactgacggtctgagaaccaccacgagttaccagcgcaaggaagaggagtccgtgagaacacagagttctgtgtcaaaatcctacatagaagtttctcacggattggggcacgttccacaacagaacggattcagcggcaccagcgaaacagccaacatccagaggatggtgcccatgaaccggacggccaaaccatttccaggctccgtcaatcaaccagcgacacctttcagccctacaaggaacatgacatcccccatcgcagactttccggcccccccaccttactcggccgtcacccctccgcctgacgccttctctagaggcgtgtcatcccctattgcagggccagcgcagccaccgccatggccacagccagccccttggtctcaaccagctttttatgattccagcgaacgtattgcttccagggatgaaagaatttccgtaccggccaagaggaccggaatcctacaggaagctaagcggcggagcaccacgaagcctatgtttactttcaaggagccgaaggtgtctccgaacccagagttactttctctgttgcagaattcggaggggaagcggggcactggcgcaggtggagactctggacctgaggaggactatttgagcctgggcgctgaggcttgcaatttcatgcaatcatccagcgcgaagcaaaaaacaccccctcctgttgctcccaaaccagctgtcaaatccagcagctcccagcccgtgaccccagtcagcccggtctggagtccgggcgtcgccccaacacaaccccctgccttcccaacaagcaatccaagtaaggggacagtggtgtcttccatcaagatcgcacaaccatcttatcccccggcgcgccctgcgtccacgctgaacgtagccgggcccttcaaaggccctcaagctgccgtcgctagtcagaattacactccaaagccgaccgtttctacccctaccgtgaatgctgtgcagcctggagccgtgggacctagcaatgagctgccaggcatgtccgggaggggggctcagctgttcgccaaaaggcagtcccggatggagaaatatgtcgttgacagtgacaccgtccaagctcacgcagccagagcccaatcacctaccccttctctgcctgcatcttggaaatactcaagcaatgtgcgggccccaccacctgtggcttacaatcccatccatagtccctcttatcccctagccgcccttaagagccaaccatcggctgcgcagccatccaagatggggaaaaagaaaggcaaaaaacccttgaacgcattggatgtaatgaaacatcaaccatatcaactgaatgcctctttgttcactttccaaccccctgacgccaaggatggactgcctcaaaaatcttccgtgaaggtcaattccgcgctggcaatgaagcaagctctgccgccccgtcccgtcaatgccgcaagtcccacgaacgttcaggcatcaagcgtgtattcggtgccggcgtacactagtcccccatcattctttgccgaggcctcatcccctgtctcagcgagccctgtcccggtaggcattcccacctcgcctaagcaggagagcgctagtagctcctacttcgttgctccgcggcccaaatttagcgctaagaagtcaggcgtgacaatacaagtgtggaagccatcggtagtggaagagtag

SEQ ID NO: 46801 - DNA, 3282 bp, Artificial Sequence
  derived and/or modified sequence
atggggactggcgattttatttgcatcagcatgactggcggagccccttgggggtttaggctacaaggagggaaagagcaaaaacaacctctgcaggttgccaagatccgtaatcaaagtaaggcttccggaagtgggctttgcgagggcgatgaggtagtgagcatcaatgggaacccttgcgccgatcttacttatcctgaggttattaagcttatggaatctatcaccgattctctgcagatgcttataaaaaggccctcgtccggtatcagcgaagctctcatatctgaaaatgaaaataagaatcttgaacacctgacgcacggcggttacgtcgagtctaccactctgcagatccgccctgccaccaagacccaatgcaccgagtttttcctggcccctgtcaaaactgaggtaccactggccgagaaccagcgatcaggcccagattgtgcagggtccttgaaggaggagacaggacccagctatcagagggcccctcagatgccagactctcagcgcggacgggtggcagaggaactcatcttgcgcgaaaaggtcgaagccgtgcagcccggtccagttgtcgagctgcagctgtccctcagccaggaacgccataagggggcatccggcccacttgtcgcgctgcctggcgctgagaagtccaaaagtcccgacccggacccaaacctaagccatgacaggattgttcacattaacagtattccgacaaatgagaaggccgatccttttcttcgcagcagcaaaatcattcagatctcctctgggagggagctaagagttatccaggagagtgaggcgggagatgctgggttgcctcgagtggaagtgatactggactgttcagatcgccagaaaacggaaggctgcaggcttcaggccggaaaggagtgtgtggactctccggtggagggcggacaatccgaagctccaccctctctggtatcctttgcagttagctctgagggtaccgagcagggagaggaccccagaagtgagaaggaccatagccgcccacataagcacagagccagacatgccagactgagaagatcagagtccctgtctgagaaacaggtaaaggaggccaagagtaaatgcaaatctatcgccttgctcttaacagatgccccaaatcccaactctaagggtgtgctgatgttcaaaaaacgcaggagacgcgctagaaaatatacactggtgtcctacggcaccggggaactggagcgcgaagcggacgaagaggaagagggagacaaggaagatacatgtgaagtcgccttccttggggcatccgagtcggaagtggatgaagagctcctgtctgacgttgacgacaacacccaagtggtcaatttcgactgggatagcggactagtggatatagaaaaaaagctaaacaggggcgataaaatggaaatgctgccagacaccacaggcaagggggctctgatgttcgctaagagacgggaaagaatggaccagatcacggcgcaaaaagaagaggataaggtagggggaaccccctctagagagcaagatgcggctcagacggacggactgcggacaactacaagttaccaacgaaaagaagaggagtctgtcaggacacagagttctgtgagcaaatcatatatcgaagtcagtcacggactgggacatgtgccccagcagaacgggttctccggcacaagcgagacagcgaacattcaaaggatggttcccatgaaccgcacagctaagcccttccccggatctgttaaccaaccagcgaccccattcagcccaacccgaaacatgacatcaccaatcgcagacttccctgcccctcccccttatagcgccgtgacccctccccctgatgctttctcacggggagttagttcaccaatcgcagggccagcgcaacctcccccatggccccagccagccccttggagtcagcctgctttctatgattccagtgagaggatcgcatcccgcgacgagcggatatccgttcctgccaagaggacaggtatccttcaggaggctaaacgcagatcaacaaccaagcccatgttcacatttaaggaacccaaagtgtctcccaaccccgaattactcagtctcttgcagaatagcgaagggaagcgcggtacaggcgctgggggagattccggccctgaggaggactatctgtccctaggggctgaagcctgtaacttcatgcagagtagctcagccaagcagaagacgcccccacctgtggcccctaagccagcggttaagtcaagttctagccagccagtgaccccagtgtccccagtgtggtcccccggagtggctcccacccagccacctgccttccccacctcaaatccatctaaaggtacagtggtgagttccattaaaattgctcagccatcctacccgccagccagacctgcatcaacacttaatgtagccggtccctttaagggccctcaggcagccgtggcatcccagaactacaccccaaagcctactgtgtccactcctactgttaacgcagtacagccgggtgccgtcggacctagcaatgagcttcctgggatgagcgggaggggggcacagttgtttgccaagcgacagagtcgcatggagaagtatgttgttgacagtgacactgtgcaggcacatgctgccagggcccaatccccgacaccatcactgccagcttcgtggaagtacagctctaatgtgcgggcaccaccccctgtggcatataatcccatccactctccctcataccccctggccgcactcaaaagccagccatcagccgctcagccctctaaaatggggaaaaaaaagggtaagaagcccctcaacgccttggacgtgatgaaacatcagccctaccagctgaatgcgagcttgttcacattccaaccacccgatgccaaagacggcttgccacagaaatcgtccgtgaaagttaatagcgcactcgcaatgaaacaagctcttccacctagacctgtaaacgcagcctccccaaccaatgtccaggcaagttctgtttatagcgtgcccgcttacaccagccctccatcattttttgctgaggcgtcatcccctgtgtccgctagtccggtccccgtaggcatcccaacatctccgaaacaggagagcgctagtagtagttactttgtggcacccagaccaaagttctccgccaaaaaatctggcgtcaccatccaagtttggaagcctagcgttgttgaggagtag

SEQ ID NO: 46802 - DNA, 7242 bp, Artificial Sequence
  derived and/or modified sequence
cacaaattcgcagcaggcggctggggcggcggctggggcagcggctgcagcagcggcggacgctctgcattacccagtcttgcgtcctcggcaggcgcccgaagctgagtgcgcatcctctaccgcacccaagcttcgtctgtctcgtcaagctcttcatgctgcccaactaaaaggaaaacatgggcacaggggattttatctgcatttccatgactggaggggcgccctgggggttcagattgcaaggtggcaaggagcagaagcagcccttacaagttgcaaagattcgaaatcagagcaaagcctctgggtctgggctctgtgagggagatgaagtggtttccatcaatggcaacccttgtgcagatctcacctaccctgaagtcatcaagctcatggaaagcataacagactctctccaaatgctcatcaaaagaccatccagtggaataagtgaggctttgatatctgaaaatgaaaacaaaaacctcgagcatctcacacatgggggttatgtggaaagtaccaccctgcagattcgaccggccacaaagacccagtgcacagaattcttcctcgcccctgtcaagactgaagttcccctagctgagaaccaaagaagtggtcccgactgtgcaggcagcttgaaagaagaaacaggcccgagctaccaaagggctccccaaatgcctgactcccaaagaggacgcgtggcagaagagctgatcttaagggagaaggtagaagcggtacagcctgggcctgtggttgagctgcaactgtccctttcacaggagagacataagggcgctagtggccctttagtggctctcccgggagctgaaaaatctaagtctcctgacccagaccctaacttgtcacatgacaggattgtccacataaattcgatccctactaatgagaaagcagaccctttcctgaggtccagcaagataatccagatctccagtggcagagagttgagagtgatccaggaaagtgaagcaggagatgcgggactgccccgggtggaagtgatcctcgactgctctgacaggcagaagacagaagggtgcaggcttcaggcaggaaaggagtgtgtggattctccagtggaaggagggcagtcagaagcacctccttctctggtatcctttgccgtctcatcagaaggcacagagcagggagaagatccacgctcggaaaaagatcacagcagacctcacaagcaccgagcgcggcatgcacggctcaggaggagtgaaagcctgtcagaaaaacaagtgaaggaagcaaaatctaaatgcaaaagcattgcccttcttctaacggatgctcccaaccccaactccaagggggtgttgatgtttaagaagcgacgtcggagggccaggaaatacaccctagttagctacggtactggcgagcttgagcgagaggcggacgaggaggaagaaggtgacaaggaggatacatgtgaagtagcatttcttggtgcaagcgaatcagaggtggatgaagagttattgtctgacgttgacgacaacacacaagttgtgaactttgactgggattctggactggtggacattgaaaagaaactgaacagaggggacaagatggagatgttaccagacaccacaggcaagggagccctcatgtttgccaagaggagggagagaatggatcagatcacagcccaaaaagaagaggacaaggtaggtggaacgccaagcagagaacaagatgctgcccagaccgatggcctgagaaccacgacttcttaccaaagaaaggaggaagagtcggtaagaacgcagagctctgtgagcaaaagctacatcgaggtgagtcatggtcttggccatgttccccaacagaatggcttcagtgggacatctgagacagcaaacatccagaggatggtccccatgaatagaacggccaaacccttcccagggtctgtgaatcagccagctacccccttctcgccaacccgaaacatgacgagtcccattgctgactttcctgcacctccaccttactctgcagtcactcctccccctgacgccttctccagaggggtttcaagtccgattgctggcccagcacagccccctccatggccccagcctgccccgtggtcccagccagccttttacgattcgtctgagcgaatagcttcccgagatgagaggatctcagtgccagcaaaaagaacaggaatattgcaggaggccaaaaggagaagcacgacaaaacccatgtttacttttaaagagcccaaagtaagcccaaatcctgaactcttgtcactccttcaaaattcagaaggcaaacggggcactggagctggaggtgattccggaccggaagaagactacctcagcttgggggcagaggcttgtaatttcatgcaaagctcctctgccaaacaaaagacccctcctcctgttgctccaaaacctgcagtcaagtcctcatcctcccaaccagtaactccagtttccccagtctggtctccaggagtggctcccacccaacctcctgccttccccacatccaacccatcaaagggcaccgttgtctcctccatcaaaatagcccagccttcttaccctcctgcccggcctgcaagtactttgaacgtggctggtcccttcaaaggaccacaagcagcagtagccagtcagaattacacacccaaaccaacagtttccacaccaacagtcaatgctgttcagcctggtgcagtgggaccatccaatgagcttccaggaatgagtgggagaggagctcagctctttgctaaaaggcagtcgagaatggagaagtatgtggtcgattcagacacggtgcaggcccacgctgctcgagctcagtctcccactccatctctcccggccagttggaagtactcctccaatgtccgagcacctcctcctgtggcctataatcctatccactcgccgtcttacccactggctgctctcaagtctcagccatcagctgcacagccctccaaaatgggcaagaaaaagggaaagaaacccctcaatgcattagatgtcatgaagcaccaaccgtatcagctcaatgcatccttgtttactttccaacctccagatgcaaaggatggcctcccccagaagtcatcagtcaaggtcaattcagccctggccatgaagcaagctcttcctccccggccagtgaatgctgcctcacctacgaatgtgcaggcttcgtcagtgtactcggtaccagcctatacctctcctccttccttctttgcagaggcctcctcaccagtcagtgcatccccagtgcctgtgggcattcccacctcgccaaagcaagaatcagcctcatcatcttattttgtggcaccaaggccaaagttctcagccaagaaaagtggtgtcacaattcaggtgtggaaaccatctgttgtggaagagtaatcttgtagctgaagctgagtgtccactttgcttgaaatgaattgtttgcagtgtttcttgagtccctgagaatgcctagcaaagtcctcaacttacttaatttcagatatgtcacctcctaatctgggtccaaggagtataatatttttaatgagtcaaaaatccaactcagattgacctaaaatatatttatcttctttgcacacttaaaaaatccaggagcaccccaaaatagacatgtaccgttatattaagtaagcaggagacttaggatttgtgctgtagccacaagaaagacagtgatcagtgatatcaaacatcaggaatcagcctttatgtaacataacagctgtcctcctatggtgaaaggttcaaatgtagtgaaggtataacctatattgactgagatttcccttttaggtagtgccttatctctattactagtgttaaaggaataaggaatctatgaaggacagggagcagctctggtctgtcaatctcagccacctgtttgatatcacagagaagatactcggaggattgttggaatgtatatagtttagtaagaagtgggtaagaaagagggtcttaattactgagcacttattatgtattaggttctttgccagatgtttttacatatataaactcatttcagaaaacttatttaaagtaaatggggccgggtatggtggttcatgcctggaatcctagcactttgggaggctgaggtaggaggactgcttgaggccgggagttggagaccagcctgagcaacatagtgagaccctgtctcaataataataataataatagtaataatgaagtaaatgggataaggaaagaaggataattatctttaaaggttgattcccaccctccctccccagttacttaaggaactaagtgagtacatctccagttgcccatgaaagcataagtttgttttcctcagctgaggcaagtggtagagtatacaggataacgaagtaacatgtaaaaggcaggacgcacataaaggtgtacatggctattgtttcacctggagaaaccacatgattgggacctgaaggtttactgactgactacaggggctgattgtgaagcacgaggaaccccatgtgtgtggagactgtagggtgagagcacacaattattagcatcatttctgagtgatctcacagattttttttcttgtgtttgctttgctttttgacaactgcttctcccacgttccttgcaattctattctctcaccttcactttactatttgtattcgatggaccaggataattcaggcaaggttaccttgtaaactttaattggccacacaccatgttgtcacccagctggctatgaagtgaataatggtactgaaagtaaacctgaagacctttctcagatctattttaagtctgagtctgaccaaccatggaaaatattcgacatgaattaatgtagagaactataaagcatttatgacagctccaagaaaaatcatctactctatgcaggagatatgtttagagacctctcagaaaaacttgcctggtttgagggtacacagtaccattttaatcttctgaaaatatctgtattcctgctctttttctgctgtcactgtcaatctgctatatttttcactatcctattaaaatattactgtctcctttatctgttcaatgtccatattttaaaaaaatcttccttgtatgagctattctgatctaaataatttctctgatatttctctatatggctcccacaacaatttcattgttgttagcatatctatttctccatacattgtaaaactgtaatccttaggtatttctaaaacataaagaggagaattaagtcagctgcagaacaatggggctgattcttctgctttttctctggaaaatctttcattgcttttggtggaaatttacctagaggttacaaccacaggatgtagcttggtctcttatttgcctttttgggaaaccaattaagattaatacaggataaaggaaaaaagcaatctattcattatataacacagttgtttgtattacttgttccctgcaaaggaaatctgttgaatgcttgcattttgaattcttttctaatagaacaaccaaaaaaggcttcttatggtgcagcaggaaaaaagatcatttttatagctttgcattcttaacatagcatttaaagagcggcatgaattagaggaaagacatggaacacacaggtagtcggtttgagatcatcggcttaaaagtatcctaggatggtaatgacccagaagtatttccagttgtctagtggtgtggtatgcaggaatgagaagtgttttctttccatttcctgttggacaggtggcaatcttagcagagccactatttggagttgataactaaagatgcaaataacatgactatgccttctggtcatcctaggactatttggagttctccaaaaccttgtaagaggcatgtcaggcatgcagtaaaagcatctacaacttcagctgggcactggcagcataggtctcatcttggaccatacagtcccactttatagaagagggtggaagttctccaaaacaatatccacaacaaagtctgacctcactctgagggagatgggaagtgggaggaagaaggactaaccagctccctggagtaagaggaatttgctttccctgtctgcccaccaggggctatatgtgccacctttcaggttggggccaaggaagtgatgtcagtgtgacagaagggagagttagacctccagacgtcagcctccctcccatggggtacattttcaatctgagtgttgttgccttagctgtgttggtattagcttgattggttggtccgctggttatgaggtgtagggaggcagtttttgtttagtttttaggactttgcctcttcctttgtccttagcataatttctaggcagagcatccacgaagtcggttttcattgccagctcaagagcgacaatcatttacgagttcctatgttatgttaggtgccttatgtatattatcccaaatccactgcatggtttaaatacaggcactggaatataaatgaaaaaggtcattacagtcactgactttctgcaggaccttaaacatttctctttccacaagtttccccttaatcatgtgtcaaacctctcttcctgacgggaatgttgtgctataatgaatctgcataacgcttgggattctaggaggaaggaaggttccatggacatgtaagtacagcatattcccctcagtcttctaggagggcagagtgaatcccagaactggtaagattgggaatctgagcattgccactttaatcttagaatatttatcattttgacacatcctgttttttagagaggaaaacaaacacagtttctgcattggtagtgtaaagcataccttgttaggaacgtgttttgtaagacacatttgggttgtcactctagagcatgtcaaactttgtacttcaaaatatatttagtatgattgttagtggtaacatatatcaaggctttgaattaactgttttatttaattttcacaagaagcacttattttagccataggaaaaccaatctgagctacaaatagttctttaaaataagcccaggttatttagctattctagaaagtgccgacttctttcaagaagcaggcattgtaggacagctgagaattatcacatagcctaaattctagcctggcagcaagagtcacatctgagatgtccaaaaaaaaaaaaaaaa

SEQ ID NO: 46803 - protein, 1109 aa, Artificial Sequence
  derived and/or modified sequence
MGTGDFICISMTGGAPWGFRLQGGKEQKQPLQVAKIRNQSKASGSGLCEGDEVVSINGNPCADLTYPEVIKLMESITDSLQMLIKRPSSGISEALISENENKNLEHLTHGGYVESTTLQIRPATKTQCTEFFLAPVKTEVPLAENQRSGPDCAGSLKEETGPSYQRAPQMPDSQRGRVAEELILREKVEAVQPGPVVELQLSLSQERHKGASGPLVALPGAEKSKSPDPDPNLSHDRIVHINSIPTNEKADPFLRSSKIIQISSGRELRVIQESEAGDAGLPRVEVILDCSDRQKTEGCRLQAGKECVDSPVEGGQSEAPPSLVSFAVSSEGTEQGEDPRSEKDHSRPHKHRARHARLRRSESLSEKQVKEAKSKCKSIALLLTDAPNPNSKGVLMFKKRRRRARKYTLVSYGTGELEREADEEEEGDKEDTCEVAFLGASESEVDEELLSDVDDNTQVVNFDWDSGLVDIEKKLNRGDKMEMLPDTTGKGALMFAKRRERMDQITAQKEEDKVGGTPSREQDAAQTDGLRTTTSYQRKEEESVRTQSSVSKSYIEVSHGLGHVPQQNGFSGTSETANIQRMVPMNRTAKPFPGSVNQPATPFSPTRNMTSPIADFPAPPPYSAVTPPPDAFSRGVSSPIAGPAQPPPWPQPAPWSQPAFYDSSERIASRDERISVPAKRTGILQEAKRRSTTKPMFTFKEPKVSPNPELLSLLQNSEGKRGTGAGGDSGPEEDYLSLGAEACNFMQSSSAKQKTPPPVAPKPAVKSSSSQPVTPVSPVWSPGVAPTQPPAFPTSNPSKGTVVSSIKIAQPSYPPARPASTLNVAGPFKGPQAAVASQNYTPKPTVSTPTVNAVQPGAVGPSNELPGMSGRGAQLFAKRQSRMEKYVVDSDTVQAHAARAQSPTPSLPASWKYSSNVRAPPPVAYNPIHSPSYPLAALKSQPSAAQPSKMGKKKGKKPLNALDVMKHQPYQLNASLFTFQPPDAKDGLPQKSSVKVNSALAMKQALPPRPVNAASPTNVQASSVYSVPAYTSPPSFFAEASSPVSASPVPVGIPTSPKQESASSSYFVAPRPKFSAKKSGVTIQVKCKSGIHSQDIIRTYFPAYLSSST

SEQ ID NO: 46804 - DNA, 3330 bp, Artificial Sequence
  derived and/or modified sequence
atgggcaccggcgacttcatctgcatcagcatgaccggcggcgccccctggggcttcagactgcagggcggcaaggagcagaagcagcccctgcaggtggccaagatcagaaaccagagcaaggccagcggcagcggcctgtgcgagggcgacgaggtggtgagcatcaacggcaacccctgcgccgacctgacctaccccgaggtgatcaagctgatggagagcatcaccgacagcctgcagatgctgatcaagagacccagcagcggcatcagcgaggccctgatcagcgagaacgagaacaagaacctggagcacctgacccacggcggctacgtggagagcaccaccctgcagatcagacccgccaccaagacccagtgcaccgagttcttcctggcccccgtgaagaccgaggtgcccctggccgagaaccagagaagcggccccgactgcgccggcagcctgaaggaggagaccggccccagctaccagagagccccccagatgcccgacagccagagaggcagagtggccgaggagctgatcctgagagagaaggtggaggccgtgcagcccggccccgtggtggagctgcagctgagcctgagccaggagagacacaagggcgccagcggccccctggtggccctgcccggcgccgagaagagcaagagccccgaccccgaccccaacctgagccacgacagaatcgtgcacatcaacagcatccccaccaacgagaaggccgaccccttcctgagaagcagcaagatcatccagatcagcagcggcagagagctgagagtgatccaggagagcgaggccggcgacgccggcctgcccagagtggaggtgatcctggactgcagcgacagacagaagaccgagggctgcagactgcaggccggcaaggagtgcgtggacagccccgtggagggcggccagagcgaggccccccccagcctggtgagcttcgccgtgagcagcgagggcaccgagcagggcgaggaccccagaagcgagaaggaccacagcagaccccacaagcacagagccagacacgccagactgagaagaagcgagagcctgagcgagaagcaggtgaaggaggccaagagcaagtgcaagagcatcgccctgctgctgaccgacgcccccaaccccaacagcaagggcgtgctgatgttcaagaagagaagaagaagagccagaaagtacaccctggtgagctacggcaccggcgagctggagagagaggccgacgaggaggaggagggcgacaaggaggacacctgcgaggtggccttcctgggcgccagcgagagcgaggtggacgaggagctgctgagcgacgtggacgacaacacccaggtggtgaacttcgactgggacagcggcctggtggacatcgagaagaagctgaacagaggcgacaagatggagatgctgcccgacaccaccggcaagggcgccctgatgttcgccaagagaagagagagaatggaccagatcaccgcccagaaggaggaggacaaggtgggcggcacccccagcagagagcaggacgccgcccagaccgacggcctgagaaccaccaccagctaccagagaaaggaggaggagagcgtgagaacccagagcagcgtgagcaagagctacatcgaggtgagccacggcctgggccacgtgccccagcagaacggcttcagcggcaccagcgagaccgccaacatccagagaatggtgcccatgaacagaaccgccaagcccttccccggcagcgtgaaccagcccgccacccccttcagccccaccagaaacatgaccagccccatcgccgacttccccgccccccccccctacagcgccgtgacccccccccccgacgccttcagcagaggcgtgagcagccccatcgccggccccgcccagccccccccctggccccagcccgccccctggagccagcccgccttctacgacagcagcgagagaatcgccagcagagacgagagaatcagcgtgcccgccaagagaaccggcatcctgcaggaggccaagagaagaagcaccaccaagcccatgttcaccttcaaggagcccaaggtgagccccaaccccgagctgctgagcctgctgcagaacagcgagggcaagagaggcaccggcgccggcggcgacagcggccccgaggaggactacctgagcctgggcgccgaggcctgcaacttcatgcagagcagcagcgccaagcagaagacccccccccccgtggcccccaagcccgccgtgaagagcagcagcagccagcccgtgacccccgtgagccccgtgtggagccccggcgtggcccccacccagccccccgccttccccaccagcaaccccagcaagggcaccgtggtgagcagcatcaagatcgcccagcccagctacccccccgccagacccgccagcaccctgaacgtggccggccccttcaagggcccccaggccgccgtggccagccagaactacacccccaagcccaccgtgagcacccccaccgtgaacgccgtgcagcccggcgccgtgggccccagcaacgagctgcccggcatgagcggcagaggcgcccagctgttcgccaagagacagagcagaatggagaagtacgtggtggacagcgacaccgtgcaggcccacgccgccagagcccagagccccacccccagcctgcccgccagctggaagtacagcagcaacgtgagagcccccccccccgtggcctacaaccccatccacagccccagctaccccctggccgccctgaagagccagcccagcgccgcccagcccagcaagatgggcaagaagaagggcaagaagcccctgaacgccctggacgtgatgaagcaccagccctaccagctgaacgccagcctgttcaccttccagccccccgacgccaaggacggcctgccccagaagagcagcgtgaaggtgaacagcgccctggccatgaagcaggccctgccccccagacccgtgaacgccgccagccccaccaacgtgcaggccagcagcgtgtacagcgtgcccgcctacaccagcccccccagcttcttcgccgaggccagcagccccgtgagcgccagccccgtgcccgtgggcatccccaccagccccaagcaggagagcgccagcagcagctacttcgtggcccccagacccaagttcagcgccaagaagagcggcgtgaccatccaggtgaagtgcaagagcggcatccacagccaggacatcatcagaacctacttccccgcctacctgagcagcagcacctag

SEQ ID NO: 46805 - DNA, 3330 bp, Artificial Sequence
  derived and/or modified sequence
atgggcaccggtgattttatatgcatatctatgaccggcggtgccccctggggctttcgactgcagggaggcaaagaacagaaacagccactgcaggttgctaaaatccggaaccagtccaaagctagcggctctggactctgcgagggtgacgaagtagtgtccatcaatggaaatccctgtgccgacctgacataccccgaggtgataaagttgatggagagcatcacagactcactgcagatgttgattaagcgtccctcttctgggataagcgaagccttgatctccgagaacgaaaacaagaacttggagcatctgacccatggaggatatgtcgaaagtactactctgcagattagacccgccaccaagacccagtgtaccgagttttttctcgccccggtaaagaccgaagtgcctctggccgaaaaccagagaagcggtccagactgcgccggctccctcaaggaggaaacaggcccaagttaccagcgcgcccctcagatgccagacagccagcggggacgcgtagccgaagagctcatattacgggagaaagtggaggccgtgcaaccaggtccagtcgtggaattgcagctgtcactttcccaggaacgccataaaggagcctccggtcctctcgtggccctacctggtgccgaaaaatcgaaatcacctgaccctgaccctaatttgagccacgatcggatcgtgcatataaacagcattccaactaatgagaaggcagatccctttctgcggtccagcaagatcatccagatctcatcgggacgggaactcagggtgatacaggaatcagaggcgggagacgccggattaccccgagtagaagtcatccttgattgcagtgatcggcagaaaactgagggctgtaggctccaggctggtaaagaatgcgtggacagccctgtagaagggggacagtctgaggcgccgcccagcctcgtctcctttgcggtgtccagcgaaggcaccgaacagggcgaggacccacggtccgagaaagaccatagcagacctcacaaacatcgtgcgagacatgcccgcctgaggaggtctgagagtctgtctgaaaagcaagtgaaggaggcaaaatccaaatgcaaaagcatcgctctgcttctgacagatgcccccaacccgaatagtaagggcgtgctgatgtttaaaaaacggcgtcggcgggctcgtaagtatactcttgtctcttacggaaccggcgagctcgaaagagaagctgacgaggaagaggaaggcgacaaggaggatacttgtgaggtggcattcttgggggcaagtgaaagtgaagttgacgaggagctcctctcagatgtggatgacaacactcaggtggtgaattttgattgggacagcggtttggtggatattgaaaagaagctgaacagaggagataaaatggagatgcttcctgataccactggtaagggggcactgatgtttgcaaagcgtcgagagagaatggaccaaatcacggcgcagaaggaagaggacaaagtcggaggtacacctagccgcgaacaagacgccgctcaaacagacgggcttcgaacgacaacaagctaccagaggaaggaagaggagagcgtgagaactcagtcgtccgtaagtaagtcttacattgaggtgtcccacgggttggggcacgttccacaacaaaacggttttagtggcacaagtgagacagctaacatccagcggatggtccctatgaaccgaactgcgaagcccttccccgggtccgttaatcagcctgctacacctttttcccccacccgaaatatgacatccccaattgctgactttccggctccaccgccctacagtgccgtcaccccaccccccgatgcattttcccgcggcgtgtccagtcccattgcagggcccgcacagccgccaccgtggccacaaccagctccatggagccagcccgcattctacgacagctcagaacgcatagccagcagagacgagcgcatctccgtgccagcaaagcgtaccggtatacttcaggaggctaagcggagaagtaccactaagcccatgtttactttcaaggaacccaaggtaagcccaaaccctgaattactaagcctgctgcagaactccgaaggaaagagagggacaggcgccggcggcgatagcggcccagaggaagattatttgtcactgggcgctgaggcgtgtaacttcatgcagagctcgtctgccaagcagaagactccacctccagtggctcctaaacccgctgttaaatcatcgtcatctcaacctgttactccagtgagccccgtgtggagccctggggtcgcacccacccaacccccagccttccccacatctaacccaagcaaaggaaccgtcgtgagcagcataaagattgcccagccctcatatccccccgctagacctgcctccactctgaatgtggccgggccatttaagggcccgcaggcagccgttgcttctcagaattatacacctaaacccacagtcagtactcctaccgtaaatgccgtccagcctggggccgtgggaccttccaacgagcttcccggaatgagcggccggggggcacagctttttgccaagagacaaagtcgcatggagaagtatgtggttgactcagatacagtacaggcccatgccgccagagcccagagtcctactcctagtcttcctgcctcctggaagtacagctccaatgtgagggccccgcccccagtcgcctacaatcccatccatagcccatcatatcctcttgcagccctaaaaagccagccatccgctgctcagccaagcaaaatggggaaaaaaaagggcaagaagccgctgaacgcattggacgtaatgaaacatcagccataccagctgaacgctagtctcttcaccttccaaccccccgatgccaaggacggcctcccgcagaagagcagcgtaaaagtgaacagtgcattggccatgaagcaggccctgcctcctcgtccggtcaatgctgcgagccctactaacgtgcaggcctctagcgtttacagcgtgcctgcctacacctcgccaccatccttctttgcagaggctagctcccctgtgtctgccagtccggtgcccgtcgggatccccacaagccccaagcaggagtccgcgagctcatcttattttgtggccccccgtccgaaattttccgcaaaaaagtcaggtgtgaccatacaagtcaaatgcaaatcgggaattcactctcaggatatcatcagaacatacttccccgcttacctcagctcaagcacttag

SEQ ID NO: 46806 - DNA, 3330 bp, Artificial Sequence
  derived and/or modified sequence
atgggcactggagacttcatctgcatctccatgactggaggagccccctggggcttccggctgcagggcggcaaggagcagaagcagcccctgcaggtggccaagatccggaaccagagcaaggccagcggcagcggcctgtgtgaaggagatgaggtggtgtccatcaatggaaacccctgtgccgacctgacctacccagaggtgatcaagctgatggagagcatcacagacagcctgcagatgctgatcaagaggcccagcagcggcatcagcgaggccctgatcagtgaaaatgaaaacaagaacctggagcacctgacccatggaggctacgtggagagcaccaccctgcagatccggcctgccaccaagacccagtgcacagagttcttcctggcccctgtgaagacagaggtgcccctggccgagaaccagaggagcggccctgactgtgccggcagcctgaaggaggagaccggccccagctaccagagggccccccagatgccagacagccagaggggccgggtggccgaggagctgatcctgcgggagaaggtggaggccgtgcagcccggccctgtggtggagctgcagctgagcctgagccaggagcggcacaagggggccagcggccccctggtggccctgcctggagctgagaagagcaagagcccagaccctgaccccaacctgagccatgaccgcatcgtgcacatcaacagcatccccaccaatgagaaggctgaccccttcctgcggagcagcaagatcatccagatcagcagcggccgggagctgcgggtcatccaggagagcgaggccggagatgctggcctgccccgggtggaggtgatcctggactgcagcgaccggcagaagacagagggctgccgcctgcaggccggcaaggaatgtgtggacagccctgtggagggcggccagagcgaggccccacccagcctggtgtcctttgctgtgagcagcgagggcacagagcagggcgaggaccccaggtctgagaaggaccacagccggccccacaagcaccgggcccggcatgcccggctgcggcgctctgagagcctgtctgagaagcaggtgaaggaggccaagagcaagtgcaagagcatcgccctgctgctgacagatgcccccaaccccaacagcaagggcgtgctgatgttcaagaagagaagaagaagagccaggaagtacaccctggtgtcctatggcaccggggagctggagcgggaggctgatgaggaggaggagggggacaaggaggacacctgtgaggtggccttcctgggcgccagcgagagcgaggtggatgaggagctgctgagtgatgtggatgacaacacccaggtggtgaactttgactgggacagcggcctggtggacatcgagaagaagctgaacagaggagacaagatggagatgctgcctgacaccaccgggaagggggccctgatgtttgccaagaggcgggagaggatggaccagatcacagcccagaaggaggaggacaaggtgggcggcacccccagccgggagcaggatgctgcccagacagatggcctgcggaccaccaccagctaccagaggaaggaggaggagagcgtgaggacccagagctctgtgtccaagagctacatcgaggtgagccacggcctgggccacgtgccccagcagaatggcttcagcggcaccagcgagacagccaacatccagaggatggtgcccatgaacagaacagccaagcccttccctggctctgtgaaccagcctgccacccccttcagccccaccaggaacatgaccagccccatcgctgacttccctgcccccccaccctacagcgctgtgaccccacctccagatgccttcagcagaggagtgagcagccccatcgccggccctgcccagcccccaccctggccccagcctgccccctggagccagcctgccttctatgacagcagcgagagaattgccagcagagatgagcgcatctctgtgcctgccaagaggacaggcatcctgcaggaggccaagagaagaagcaccaccaagcccatgttcaccttcaaggagcccaaggtgagccccaaccctgagctgctgagcctgctgcagaacagcgagggcaagaggggcactggagctggaggagacagcggccctgaggaggactacctgagcctgggcgctgaggcctgcaacttcatgcagagcagcagcgccaagcagaagaccccacctcctgtggcccccaagccagctgtgaagagcagcagcagccagcctgtgacccctgtgtcccctgtgtggagccctggggtggcccccacccagcccccagccttccccaccagcaaccccagcaaaggaacagtggtgagcagcatcaagatcgcccagcccagctaccccccagcccggcctgccagcaccctgaatgtggccggccccttcaagggcccccaggccgctgtggccagccagaactacacccccaagcccaccgtgtccacccccaccgtgaatgctgtgcagcccggggctgtgggccccagcaatgagctgcccggcatgagcggccgcggggcccagctgtttgccaagaggcagagcaggatggagaagtatgtggtggacagcgacacagtgcaggcccatgctgcccgggcccagagccccacccccagcctgcctgcctcctggaagtacagcagcaatgtgcgggcccctcctcctgtggcctacaaccccatccacagccccagctaccccctggccgccctgaagagccagcccagcgctgcccagcccagcaagatgggcaagaagaagggcaagaagcccctgaatgccctggatgtgatgaagcaccagccctaccagctgaatgccagcctcttcaccttccagcccccagatgccaaggatggcctgccccagaagagctctgtgaaggtgaacagcgccctggccatgaagcaggccctgccccccaggcctgtgaatgctgccagccccaccaacgtgcaggccagctctgtgtacagcgtgcctgcctacaccagccccccatccttctttgctgaggccagcagccctgtgtctgccagccctgtgcctgtgggcatccccaccagccccaagcaggagagcgccagcagcagctactttgtggccccccggcccaagttcagcgccaagaagtctggagtgaccatccaggtgaagtgcaagagcggcatccacagccaggacatcatccgcacctacttccctgcctacctgagcagcagcacctag

SEQ ID NO: 46807 - DNA, 3330 bp, Artificial Sequence
  derived and/or modified sequence
atgggcaccggcgacttcatctgcatcagcatgaccggcggcgccccctggggctttcgattacaaggaggaaaggaacagaagcagcccctacaggttgctaagatccgaaaccagagtaaggcatctggaagcggactgtgtgagggggacgaggtcgtgagcatcaatggcaacccctgtgctgaccttacttacccagaagtgattaagctaatggaaagtatcacagacagcctgcagatgctgataaagcgcccctcatccggcatctcggaagctctcattagcgagaatgaaaacaaaaacttggagcatctcactcatggtgggtatgttgagagcacaactctgcagatccgcccagccacaaagacacagtgtactgagttctttttggcaccagttaagaccgaagttcccctggccgaaaatcaacggtctgggccagattgcgctggcagcctcaaggaagaaaccggccccagctaccagcgagcaccacaaatgccagacagtcaacgggggcgcgtggcagaggaattaattctgcgggagaaagtggaggctgtgcaacctggaccagtagttgaattgcagctgtcactctctcaagagagacacaagggggcatccggccctctcgttgctttgcccggcgctgaaaaaagcaagagtccagaccctgaccccaacttgtcacatgatcgcatcgtccacatcaatagtatacccaccaacgagaaagctgatcccttccttcgcagctctaagatcatccagattagttccggacgcgagctccgagtcattcaggaatctgaggccggcgacgccggtctccccagggttgaggtgatcctggactgctccgatcgccagaaaacggaagggtgtcgtctgcaagccggaaaagagtgtgtcgactcccccgtcgagggtggccaatctgaagctcccccatcactggtgagtttcgctgtgagcagtgaaggcaccgagcagggggaagacccccgctcagaaaaggatcatagcagaccgcacaagcatagagctaggcatgctaggctgagacgatcagaatccttaagcgaaaaacaggtgaaggaggccaagtccaaatgcaaaagcatcgctttgctgctgacagatgcacccaatcccaacagcaaaggggtgctgatgttcaaaaaacgacgcaggagggctcggaaatataccctggtgtcttacgggactggggagttggagagagaggctgacgaagaggaagagggtgataaggaggatacttgtgaagtcgcctttcttggcgctagcgaaagtgaggtagacgaagaactgctctcagacgtggacgacaacacacaggtcgtcaattttgattgggattctggcctagttgatattgagaaaaagctgaatcggggggacaagatggaaatgctgccggacaccaccgggaagggcgcgttgatgtttgccaaacggcgcgagcggatggaccagattactgcacagaaggaagaagataaggttggcgggacaccctcccgagagcaggacgctgcacaaactgatggtctgcggaccacaacgagctaccagagaaaagaggaagagtccgtgcgtacccagtccagcgtgtcaaaatcatatatcgaagtgtcccacggcctgggacacgtgccgcagcaaaatggattttctgggacctctgagactgctaacatccagcgaatggtccccatgaataggacggctaagccatttcctgggtctgtaaaccagccagccacaccgttctctcctacccgtaacatgacatcacccatcgctgatttcccggccccccccccttatagcgcagttacccccccgccagatgcgttcagccgtggcgttagttcccccatcgctggcccagcacagccccccccatggccacagcccgcaccctggtcccagccagctttctatgatagtagtgagcgcatagcttcacgcgatgaacgcatcagcgtacccgctaagaggaccggaattctgcaggaggctaagaggcgaagcacaacaaagccaatgtttacattcaaagagccgaaggtttcacctaatccagaacttctaagtctgctgcaaaactcagaagggaagagaggcacaggcgccggcggcgacagtggaccagaggaagattacttatctctgggagcggaggcctgcaattttatgcagagctcttctgcaaagcaaaagacacccccgccagtggccccaaaaccggctgttaagagcagctcatcccagcccgtcactcccgtgtctccagtgtggtctccaggtgtggcccccacgcagcccccagcctttcctacatcaaacccttctaaagggacagtagtttctagcatcaagatcgcccagcccagctatcctccagccagaccagccagtactctgaatgttgcaggacctttcaaggggccccaagcagctgtggcaagtcaaaactacacaccaaaaccaaccgtgtcaacgccaactgtgaacgccgtgcagcctggagccgtggggccctcaaatgagttaccaggaatgtctgggagaggagcacagctgttcgccaagagacaatctagaatggagaaatacgttgttgattcagacaccgtccaggcgcatgccgctcgggctcagtcccctaccccttccctgccagcatcctggaagtactctagcaacgtcagggcaccaccgccagtggcttataatcccatccactcaccttcctaccccctggctgctctaaagagccagccttccgctgcccagccctccaagatgggcaaaaaaaagggcaagaagcccctgaacgccttggacgtgatgaagcaccagccctaccagctcaatgcctctctcttcacctttcaaccaccagacgctaaggacgggctgccccagaaatcctctgtgaaagtgaattcggctctcgcgatgaaacaggccctgcctccaaggcccgtcaacgcggcttcccctacaaatgtacaggcatcgtccgtatacagcgttccagcctatacttccccaccctcatttttcgctgaagcttcgtcccctgtttcagcttcaccagttccggtcggtatcccgacctcacccaagcaggagtccgctagcagttcatatttcgtcgcacccaggcccaagttttctgccaagaaatctggcgtgactatccaggtgaagtgcaagtcaggcattcactctcaggacattatcagaacatacttcccggcttacttaagctcatccacatag

SEQ ID NO: 46808 - DNA, 3330 bp, Artificial Sequence
  derived and/or modified sequence
atgggaacgggagattttatatgcattagcatgacaggtggagctccttggggctttcgcctccaaggtggcaaggagcagaagcagccattgcaagttgcaaaaataaggaatcagagcaaagcgtccgggagcggactctgcgagggagacgaggtggttagcataaatgggaatccatgcgcagatcttacatatccagaagtcataaagttaatggagtcaattaccgactccctgcagatgctgatcaaaagacctagctcaggaatctcagaggcgctcatctccgagaacgagaataagaacctcgagcacttaacccatggaggctacgtcgagtccactaccctccaaatccgacccgcaacgaagacccagtgtactgagtttttcctcgcacccgttaagacggaagtgcctttggccgaaaaccagcggtctgggccagactgcgctggatccctcaaagaagaaaccggaccatcctaccaaagagctcctcaaatgcccgacagccagcggggtagggttgccgaagaactcatcctgagggaaaaagtcgaggccgtccagccaggacctgtagtcgagctccaactttccctgagccaggagcgccacaagggcgcttcaggtccactggtggcactgccaggagcggaaaagtctaaatctccagacccggaccctaacctgtcacacgatcgcatcgtgcacatcaattcaatccccaccaacgaaaaagctgatccatttcttcgtagctccaagataattcagatctcaagcgggcgtgagctgcgcgttattcaggagagcgaagcaggcgacgcagggctgcctcgggtcgaggttattctggattgttctgaccgccagaagacggagggctgccgactgcaggctgggaaagaatgcgtggattcgcctgtggaaggcggtcaatcggaagctcccccttctctggtcagtttcgcagtttcaagcgaagggacagaacagggtgaagacccccgttctgaaaaagatcactcccgaccgcacaagcaccgagccagacatgccaggctacgacgatccgagtccttaagtgaaaagcaggtgaaggaagcaaaatccaagtgtaaatccatcgcactgctgctgaccgatgcaccgaaccccaatagcaagggcgtgctcatgtttaagaaaagaagacgccgagctaggaagtatacgctagtgtcgtacggcacgggggaattggaacgggaagcagatgaggaagaagagggggataaggaagacacatgcgaagtggccttccttggtgcatctgagtccgaggtcgatgaggaactgctttcggacgtggacgacaatacgcaggtcgtgaattttgactgggattcagggctggtcgacattgaaaagaagctgaatagaggcgacaagatggagatgctacctgacactacaggcaagggcgcattgatgttcgcaaagaggcgtgagcgtatggaccaaatcactgcccagaaagaagaagataaagtcggtggtacaccaagccgtgagcaggatgcagcgcagaccgacggtctgagaactaccaccagctatcaaagaaaagaagaagagtccgtgcggacacagagttcagtctcaaagtcctacatcgaggtttcccatgggctcgggcacgtcccccagcagaatggattttccgggacaagtgagactgcgaacattcagaggatggtaccaatgaaccgcactgcaaaaccttttcctggatccgtgaatcagccggctacacctttcagtcccacgcgaaatatgacttcccccatagcagatttccccgctccacccccatacagcgccgtgacccctccaccggatgctttcagcagaggcgtgtccagcccgattgctggccctgctcagcctccaccctggccccagcctgcaccatggtcgcagccagccttttatgacagctctgaaagaatcgcgagcagagatgaaaggattagcgtcccggcaaaaagaactggcatactgcaggaggccaagagaaggagcaccactaaacctatgtttactttcaaagaaccaaaagtttcccctaatccagagcttctctccttgctacagaactccgagggaaagagagggacaggcgcagggggagactcaggcccagaggaggattacctctcactgggtgccgaggcctgcaatttcatgcagtcctcaagcgccaagcaaaagacgcctcctcccgtagcacccaagccagccgtcaagagctcatcttcccagcctgttacacccgtctctcctgtttggagtcctggtgtggcacccacacagcctccagccttcccaacctctaatccttccaaggggacggttgtatctagcatcaaaatcgcccaacccagctatccgccagctcggcctgcatcaacactgaacgtggccggtccattcaagggccctcaggccgcagtggctagccaaaactacacgcctaagccaactgtgagtaccccaactgtgaacgccgtccagccgggagccgtcggccctagcaacgaacttcctggcatgagtggtcgcggagcgcagctattcgcaaagcggcagtcccgtatggaaaagtatgtggttgacagcgacactgtgcaagctcacgcggctagagcccagagtcctacccctagccttcctgcaagctggaaatattcctccaatgttcgtgcgccaccaccagtggcttacaaccccatccacagtcctagttacccattggctgccctgaaatctcagccctctgcggctcaaccctccaagatgggtaaaaaaaaaggcaagaaaccgttaaacgctctggacgtgatgaaacatcagccctatcagctcaatgcatccctcttcacattccagcccccagacgctaaagacggtctgcctcagaagtcaagcgtgaaggtcaatagcgcactggccatgaagcaggcgctgccaccccgtcccgttaatgccgcttcaccaacaaatgtgcaggcttcctctgtttattctgtcccagcatataccagccccccaagcttctttgctgaagccagctcccctgtttccgcctctccagtgcccgtcggcatacctacatctccaaaacaggaaagcgcttcatctagctacttcgtagcgccacggcctaagtttagtgcgaagaaatctggggtgacaatccaggtgaagtgcaagtctggcatccacagccaggacataattcggacctatttccctgcatacctgtcaagttctacctag

SEQ ID NO: 46809 - DNA, 3524 bp, Artificial Sequence
  derived and/or modified sequence
atgggcacaggggattttatctgcatttccatgactggaggggcgccctgggggttcagattgcaaggtggcaaggagcagaagcagcccttacaagttgcaaagattcgaaatcagagcaaagcctctgggtctgggctctgtgagggagatgaagtggtttccatcaatggcaacccttgtgcagatctcacctaccctgaagtcatcaagctcatggaaagcataacagactctctccaaatgctcatcaaaagaccatccagtggaataagtgaggctttgatatctgaaaatgaaaacaaaaacctcgagcatctcacacatgggggttatgtggaaagtaccaccctgcagattcgaccggccacaaagacccagtgcacagaattcttcctcgcccctgtcaagactgaagttcccctagctgagaaccaaagaagtggtcccgactgtgcaggcagcttgaaagaagaaacaggcccgagctaccaaagggctccccaaatgcctgactcccaaagaggacgcgtggcagaagagctgatcttaagggagaaggtagaagcggtacagcctgggcctgtggttgagctgcaactgtccctttcacaggagagacataagggcgctagtggccctttagtggctctcccgggagctgaaaaatctaagtctcctgacccagaccctaacttgtcacatgacaggattgtccacataaattcgatccctactaatgagaaagcagaccctttcctgaggtccagcaagataatccagatctccagtggcagagagttgagagtgatccaggaaagtgaagcaggagatgcgggactgccccgggtggaagtgatcctcgactgctctgacaggcagaagacagaagggtgcaggcttcaggcaggaaaggagtgtgtggattctccagtggaaggagggcagtcagaagcacctccttctctggtatcctttgccgtctcatcagaaggcacagagcagggagaagatccacgctcggaaaaagatcacagcagacctcacaagcaccgagcgcggcatgcacggctcaggaggagtgaaagcctgtcagaaaaacaagtgaaggaagcaaaatctaaatgcaaaagcattgcccttcttctaacggatgctcccaaccccaactccaagggggtgttgatgtttaagaagcgacgtcggagggccaggaaatacaccctagttagctacggtactggcgagcttgagcgagaggcggacgaggaggaagaaggtgacaaggaggatacatgtgaagtagcatttcttggtgcaagcgaatcagaggtggatgaagagttattgtctgacgttgacgacaacacacaagttgtgaactttgactgggattctggactggtggacattgaaaagaaactgaacagaggggacaagatggagatgttaccagacaccacaggcaagggagccctcatgtttgccaagaggagggagagaatggatcagatcacagcccaaaaagaagaggacaaggtaggtggaacgccaagcagagaacaagatgctgcccagaccgatggcctgagaaccacgacttcttaccaaagaaaggaggaagagtcggtaagaacgcagagctctgtgagcaaaagctacatcgaggtgagtcatggtcttggccatgttccccaacagaatggcttcagtgggacatctgagacagcaaacatccagaggatggtccccatgaatagaacggccaaacccttcccagggtctgtgaatcagccagctacccccttctcgccaacccgaaacatgacgagtcccattgctgactttcctgcacctccaccttactctgcagtcactcctccccctgacgccttctccagaggggtttcaagtccgattgctggcccagcacagccccctccatggccccagcctgccccgtggtcccagccagccttttacgattcgtctgagcgaatagcttcccgagatgagaggatctcagtgccagcaaaaagaacaggaatattgcaggaggccaaaaggagaagcacgacaaaacccatgtttacttttaaagagcccaaagtaagcccaaatcctgaactcttgtcactccttcaaaattcagaaggcaaacggggcactggagctggaggtgattccggaccggaagaagactacctcagcttgggggcagaggcttgtaatttcatgcaaagctcctctgccaaacaaaagacccctcctcctgttgctccaaaacctgcagtcaagtcctcatcctcccaaccagtaactccagtttccccagtctggtctccaggagtggctcccacccaacctcctgccttccccacatccaacccatcaaagggcaccgttgtctcctccatcaaaatagcccagccttcttaccctcctgcccggcctgcaagtactttgaacgtggctggtcccttcaaaggaccacaagcagcagtagccagtcagaattacacacccaaaccaacagtttccacaccaacagtcaatgctgttcagcctggtgcagtgggaccatccaatgagcttccaggaatgagtgggagaggagctcagctctttgctaaaaggcagtcgagaatggagaagtatgtggtcgattcagacacggtgcaggcccacgctgctcgagctcagtctcccactccatctctcccggccagttggaagtactcctccaatgtccgagcacctcctcctgtggcctataatcctatccactcgccgtcttacccactggctgctctcaagtctcagccatcagctgcacagccctccaaaatgggcaagaaaaagggaaagaaacccctcaatgcattagatgtcatgaagcaccaaccgtatcagctcaatgcatccttgtttactttccaacctccagatgcaaaggatggcctcccccagaagtcatcagtcaaggtcaattcagccctggccatgaagcaagctcttcctccccggccagtgaatgctgcctcacctacgaatgtgcaggcttcgtcagtgtactcggtaccagcctatacctctcctccttccttctttgcagaggcctcctcaccagtcagtgcatccccagtgcctgtgggcattcccacctcgccaaagcaagaatcagcctcatcatcttattttgtggcaccaaggccaaagttctcagccaagaaaagtggtgtcacaattcaggtgaaatgtaaatctgggatccatagtcaagatatcataaggacctacttcccagcctacctttcttcctctacctgataatgataatactcaaaataacaacattcaaaggaaacacaaagaaatcctgctttcacatctcctatttcttgggctccttaataactactgatggtttgttcatgaaaaaaaatttttaaatcaaaagattgtacttggccctgagttgaaaaaatttcaaaaatcaaaagtttgtacttggccctgagttg

SEQ ID NO: 46810 - protein, 249 aa, Artificial Sequence
  derived and/or modified sequence
MEIKHLLFLVAAACLLPMLSMKKKSARDQFNKLVTDLPNVQEEIVNIHNALRRRVVPPASNMLKMSWSEEAAQNARIFSKYCDMTESNPLERRLPNTFCGENMHMTSYPVSWSSVIGVWYSESTSFKHGEWTTTDDDITTDHYTQIVWATSYLIGCAIASCRQQGSPRYLYVCHYCHEGNDPETKNEPYKTGVPCEACPSNCEDKLCTNPCIYYDEYFDCDIQVHYLGCNHSTTILFCKATCLCDTEIK

SEQ ID NO: 46811 - protein, 1191 aa, Artificial Sequence
  derived and/or modified sequence
MERPLENGDESPDSQGHATDWRFAVCSFRDAWEEEEPASQMHVKDPGPPRPPAGATQDEELQGSPLSRKFQLPPAADESGDAQRGTVESSSVLSEGPGPSGVESLLCPMSSHLSLAQGESDTPGVGLVGDPGPSRAMPSGLSPGALDSDPVGLGDPLSEISKLLEAAPSGSGLPKPADCLLAQDLCWELLASGMATLPGTRDVQGRAVLLLCAHSPAWLQSECSSQELIRLLLYLRSIPRPEVQALGLTVLVDARICAPSSSLFSGLSQLQEAAPGAVYQVLLVGSTLLKEVPSGLQLEQLPSQSLLTHIPTAGLPTSLGGGLPYCHQAWLDFRRRLEALLQNCQAACALLQGAIESVKAVPQPMEPGEVGQLLQQTEVLMQQVLDSPWLAWLQCQGGRELTWLKQEVPEVTLSPDYRTAMDKADELYDRVDGLLHQLTLQSNQRIQALELVQTLEARESGLHQIEVWLQQVGWPALEEAGEPSLDMLLQAQGSFQELYQVAQEQVRQGEKFLQPLTGWEAAELDPPGARFLALRAQLTEFSRALAQRCQRLADAERLFQLFREALTWAEEGQRVLAELEQERPGVVLQQLQLHWTRHPDLPPAHFRKMWALATGLGSEAIRQECRWAWARCQDTWLALDQKLEASLKLPPVGSTASLCVSQVPAAPAHPPLRKAYSFDRNLGQSLSEPACHCHHAATIAACRRPEAGGGALPQASPTVPPPGSSDPRSLNRLQLVLAEMVATEREYVRALEYTMENYFPELDRPDVPQGLRGQRAHLFGNLEKLRDFHCHFFLRELEACTRHPPRVAYAFLRHRVQFGMYALYSKNKPRSDALMSSYGHTFFKDKQQALGDHLDLASYLLKPIQRMGKYALLLQELARACGGPTQELSALREAQSLVHFQLRHGNDLLAMDAIQGCDVNLKEQGQLVRQDEFVVRTGRHKSVRRIFLFEELLLFSKPRHGPTGVDTFAYKRSFKMADLGLTECCGNSNLRFEIWFRRRKARDTFVLQASSLAIKQAWTADISHLLWRQAVHNKEVRMAEMVSMGVGNKAFRDIAPSEEAINDRTVNYVLKCREVRSRASIAVAPFDHDSLYLGASNSLPGDPASCSVLGSLNLHLYRDPALLGLRCPLYPSFPEEAALEAEAELGGQPSLTAEDSEISSQCPSASGSSGSDSSCVSGQALGRGLEDLPCV

SEQ ID NO: 46812 - protein, 193 aa, Artificial Sequence
  derived and/or modified sequence
MERPLENGDESPDSQGHATDWRFAVCSFRDAWEEEEPASQMHVKDPGPPRPPAGATQDEELQGSPLSRKFQLPPAADESGDAQRGTVESSSVLSEGPGPSGVESLLCPMSSHLSLAQGESDTPGVGLVGDPGPSRAMPSGLSPGALDSDPVGLGDPLSEISKLLEAGKEGWAREVWEGNGDAWRDECQDFGGL

SEQ ID NO: 46813 - DNA, 3576 bp, Artificial Sequence
  derived and/or modified sequence
atggagaggcccctggagaacggcgacgagtctcctgattcccagggccacgccacggactggaggtttgctgtgtgttctttccgggacgcctgggaagaggaggagcctgcatctcagatgcatgtcaaggaccctgggcctccccgccctcctgccggcgcgactcaggacgaagaactacagggtagccccttgagtagaaagttccagctacctccagccgcagacgagagtggcgatgcccaacgcgggactgttgagagtagttcagttttatcagaaggccctggcccatccggagttgagtctctcctgtgccctatgtccagccacttgagcttggcccagggagagtctgacaccccaggagtcggtctggttggggaccctggcccctcacgagcaatgccatcggggctgtcccctggagccctggacagcgaccccgtaggcctcggggatccactatcagagatcagtaagctgttagaagccgccccaagcggatcgggcttacccaagcccgccgactgcttactggcacaggatctgtgctgggagctcttggctagtggaatggctacgctccccggcacccgagacgttcagggacgcgctgtccttctcctttgcgcacacagtccggcttggcttcagtcagagtgttcatctcaggagctcatacgcttgctgttgtatctccggtcaattccgcggcccgaggtccaggcactgggtttaactgttctcgtggatgccagaatctgcgccccctcaagctctctcttttctggtctgagccagctgcaggaggctgcccccggtgcagtttatcaagtgttgctggtgggaagcaccctgctgaaggaggtcccatccgggttgcagctggagcagctgccatcccaatcccttctgacgcatattccaacagcaggactgcctacttctctgggcggaggcctaccctactgtcaccaggcttggttggacttccgcagaaggctggaagcactcctccaaaattgccaggcagcgtgcgccctgctccagggcgctattgagagtgtgaaggctgttccacagcctatggaacccggcgaagtggggcagcttcttcaacaaacggaggtgctcatgcaacaggttttggacagcccatggctggcatggctgcagtgccagggaggaagagaactcacatggctcaagcaggaagtgccagaggtgactttaagtcccgattaccgaactgccatggacaaggcagatgagctttacgaccgagtagacggcttacttcaccagttaactctgcagtccaatcagagaatccaggcactggaactagtgcagacgctggaggcccgggagtctggccttcaccaaattgaggtttggctgcagcaagtcggatggcccgcacttgaagaagccggcgaacccagtctggacatgctcttacaggcacagggatcttttcaggagctataccaggttgcccaagaacaggtccgccaaggtgagaaatttctccaaccactgaccggctgggaagccgccgagctggacccaccaggggcacgcttccttgctctgcgcgcacaattgaccgagttctctagggcgctcgctcagcgctgccagaggcttgctgacgcggagagactgtttcagctgttccgtgaggccctcacctgggctgaagagggccagagggtgcttgcagagctcgagcaggagagacctggcgtcgtccttcaacagttacagctgcattggacccgacacccagacctcccaccagcccatttccgcaaaatgtgggctcttgcaactgggctaggctccgaagccattcggcaagagtgtagatgggcatgggcacgctgccaggacacatggctggcattggatcagaaactggaagcctcactaaagctaccgccagtgggatccactgcgtctttgtgcgtgtctcaggtgccagcagcacccgcacatcctccactgaggaaagcctattcgttcgataggaacctcgggcagtctctaagtgaacccgcttgccattgccaccacgcagctacgattgcagcctgccgcaggcctgaggccgggggaggtgcgttgccccaggcatcaccaacggtgccacctcctgggtcttcagatccaaggagcttgaaccggctgcagctcgtcctggctgaaatggtagctaccgagcgcgaatacgtcagagctttggaatacacgatggaaaattactttcctgagctggacaggccggacgtgccacaaggccttaggggccaaagagcacacctatttggcaacctggagaaacttcgcgactttcactgccacttctttcttagagaactggaggcctgcaccaggcatccaccccgtgttgcatacgcattcttaaggcatagagtccagtttggtatgtatgcattgtactccaaaaacaagccccgttcagatgctttgatgtcatcttacggtcacacattctttaaggacaagcagcaagcgctgggcgaccatttggacttggctagttacctgctgaaaccaatccaacggatgggtaagtatgctctcctgctgcaggaactggctcgtgcttgtggcgggcccacccaggagctatcagccctcagggaagcacaaagtctggttcatttccagctacgccacgggaatgaccttcttgctatggatgctatccagggctgtgatgtcaacctgaaggagcagggccaacttgtgcgccaggacgagtttgtggtgcggactggaagacataaatctgtgcgtcgtatcttccttttcgaagagctgctgctattttccaaacctcgacacggcccgacaggagtggacactttcgcctataaacgcagctttaaaatggccgatttggggctgaccgagtgctgtgggaactccaatctccgctttgaaatttggtttaggcggagaaaggccagagacacctttgtgctacaagcctcatcactggctatcaaacaggcatggactgctgatatatcacatttactgtggcggcaggcagtacacaacaaggaagttcggatggcggaaatggtttccatgggagtcggcaacaaagcatttagagatatcgctccgtcagaagaggcaataaatgaccgaacggttaactacgtgcttaagtgtagggaagtgagaagtagagccagcatcgctgtagcacccttcgatcatgattcactctacctcggtgcaagtaactctctgcccggcgatcccgccagctgcagtgtcctgggctccctgaaccttcacctctatcgagaccctgccctgttgggcctgcgatgcccactatatccttccttccctgaggaggcagcgctcgaggccgaggctgagcttggggggcagccgtcgctcactgctgaggacagcgaaatctcaagtcagtgccccagcgctagcgggagcagcggtagcgatagcagctgcgtcagcggtcaggctctgggacgcgggctcgaagatttgccttgtgtgtag

SEQ ID NO: 46814 - DNA, 3576 bp, Artificial Sequence
  derived and/or modified sequence
atggaacgtcctttggaaaatggggacgaaagcccagatagccagggacacgcgacagattggcggtttgctgtctgtagctttagggacgcatgggaggaggaggaacccgcttcccagatgcatgttaaggacccgggcccccctagacctccagccggggcaacccaggatgaggagctccagggcagccccctaagccgcaaatttcaactgcctccagcggccgatgaatctggagatgctcaacgtggcactgtggagtcctcttccgttttatccgaaggtcccggtccttctggggtggaaagtttgttgtgtcctatgagctcccacctttcactagcccagggagagagcgacacccctggggttgggctcgtgggtgatcccggacctagtcgagccatgcctagcgggctgtcacccggggctctcgattcagatcccgtgggcctcggcgacccactcagcgagatctcaaaactgctcgaggctgcaccaagcggatctggtcttcccaaacccgcggattgcctgctggcccaagatctctgctgggaactgctggcctctggtatggcaaccctgcccggaacccgcgatgtccaaggtcgggccgtattactgctctgcgcccatagccccgcctggcttcaaagtgagtgcagtagccaggaactcattcgtctactactgtaccttcgaagcatacccaggccggaagtgcaagccttgggattaacagtgctggtcgatgctagaatttgtgctccatcgtccagcctgttttctggactctcacagctccaagaagctgcccccggggctgtctatcaagtcctccttgtgggatccactttgctgaaagaggtccctagcgggctgcaattagagcagttaccatctcagtccctgctgacccacatacccactgcaggcctgcccacatcgctgggtggcggattgccttattgccatcaagcgtggctggattttcgcagaagactcgaggccctactccagaattgtcaggccgcctgtgcccttctacagggggcaatcgaatccgtgaaggccgttcctcaacccatggaaccgggggaagtaggtcaactgttgcagcagacggaggttcttatgcagcaggtgctcgatagcccctggctcgcctggctgcagtgtcaaggtgggcgagagctgacatggcttaaacaagaggtgcctgaggtaacactctcacctgattatcgcacagccatggacaaggcagacgagctctacgaccgcgtggatgggctactccaccagctgaccctccagtccaaccagagaatacaggctctggagctggtgcagaccctagaggcccgcgaatcaggcctgcatcagatcgaagtgtggctccagcaggttgggtggcccgccctggaagaagctggagagccatccctagacatgcttctgcaggcccagggctcattccaggagctgtatcaggtggcccaagaacaggtgaggcagggggaaaaatttcttcagccacttactgggtgggaggcagctgagctagatccccccggcgcgcgatttcttgccctgagggcacagctaacagaattttcacgggctctcgcccagaggtgtcaacgactcgccgacgcggaacggctgttccagctgttcagggaggccctaacctgggccgaagagggacaaagggtactcgccgagctcgagcaggagcggccaggtgtcgtgctgcaacaattgcagctacattggacgcgacatcccgatctcccaccggctcacttccgtaagatgtgggctctcgcaactggcttaggatctgaggcaatccgccaggagtgccgatgggcttgggcccgctgtcaggacacttggttagcccttgatcaaaagttagaagcgtctctaaagctgccccctgtgggttcaaccgctagcctgtgtgtgagccaagtgcctgctgcccccgcccatcctcccttgaggaaggcatattcattcgaccgcaatctcggccagagccttagtgagcccgcatgccactgtcaccacgctgcgactatcgctgcgtgtcgccggccggaagctggaggaggtgccttaccccaagcctccccaacggttccaccgccaggaagcagtgatcccaggtccctaaaccgactgcagctggtgttagctgagatggtggccaccgaacgggagtacgttagagctcttgagtatacaatggaaaactactttccagaactcgaccgaccagacgtaccgcaggggctcaggggacagcgagcacacctgttcggaaatctggagaagctcagggattttcactgccacttctttttgagagagctagaagcatgcacccgacaccccccccgtgtggcttacgcttttcttcgccaccgggtccagtttggcatgtacgctctgtacagcaaaaacaagcccagaagcgacgctctcatgtccagctatggccacacattctttaaggacaagcagcaggctctgggcgatcacttggatcttgcttcttatctactaaagccaatccagagaatgggcaaatacgcattgcttctgcaagagttggcccgcgcttgtggtggacccacccaggaactaagtgcactaagagaggctcagtcactcgtgcacttccagctgagacacggtaatgacctcctcgcaatggatgccatccaggggtgtgacgtgaatcttaaggagcagggccaactcgttaggcaagatgaattcgtagtacgaacaggcagacacaaaagcgtgagacggattttcctctttgaagagttactactgttcagcaagccacgccacggcccgacaggtgtggacacatttgcctataaacgctcttttaaaatggccgacttaggtcttacagagtgctgcgggaactcgaacctgcggtttgagatttggttccgtcgtcgcaaagcaagagacaccttcgtgttgcaggcaagttccctggcaatcaaacaggcctggaccgccgatattagccatctcctgtggcggcaggcggtgcataacaaggaggtccggatggccgagatggtgagcatgggcgtggggaacaaggcctttagggatatcgcaccatctgaggaggccattaacgacaggactgttaattacgttctgaagtgtagagaggtacggtcacgcgcctccatcgcagttgcaccctttgatcacgattccctgtatcttggcgcctcaaactccctgcccggagatcctgcatcttgcagtgtccttggatccctcaatctccatttgtacagagatcccgcactcctgggtttgaggtgtcccctgtacccatcatttcccgaggaggcagcactggaagctgaggccgagctcggtggccaaccctcactgaccgctgaggacagcgagatcagcagccaatgtccaagtgcttcaggatcttcgggctccgattcaagctgcgttagcgggcaggctctggggcgaggtctggaggacttgccgtgtgtgtag

SEQ ID NO: 46815 - DNA, 3576 bp, Artificial Sequence
  derived and/or modified sequence
atggagaggcctctggagaacggggacgaaagccccgattctcaagggcacgctactgattggaggttcgcagtgtgtagctttagggatgcctgggaggaggaagaaccagcctcgcagatgcacgtaaaggatccagggcctccccgaccaccagccggggctactcaggacgaggagctccagggtagccccctgagtaggaaatttcagctccctcctgcagccgatgaaagcggagatgcgcagagaggaactgtcgaatctagctccgtgctgtcagaggggcccgggccaagcggggttgagagtctcttgtgtcctatgtcgagccacctgtccctggctcaaggagagagcgacacaccgggggtcgggcttgttggcgatccaggaccatctcgcgcaatgcctagcgggctgtctccgggcgcacttgattccgacccagtcggcctgggcgacccactctccgagatcagtaaactgctcgaggcagcaccatctggttccggtctgcccaaacccgctgactgcttgctggcacaggatctgtgctgggagctgctggccagcggcatggccactttgcctggaactcgggacgtccaggggcgggcagtgctgttactatgtgcacattctcctgcctggctgcagtccgaatgctctagtcaggagctcatccgtctgctcctttacctacgaagtatcccgcgcccagaggtccaggcgctgggcctaaccgtcctagtagacgcgaggatctgcgccccctcaagcagcttgtttagcggactgtcccagctgcaggaagccgcccccggagcagtttatcaggttttactggtgggttcaacacttctcaaagaagtccctagtggactccagctggaacagttgccctctcaaagccttctgactcacattcctacggctggcttgccgacctcactcggaggtgggcttccttactgccaccaggcctggttagactttcgcagacgcttggaggcactcctacagaactgccaagctgcctgtgctcttctgcagggcgcgattgaaagcgtaaaggcagttcctcagccaatggagccaggagaagtggggcagttgttgcaacaaactgaagtcctcatgcaacaggtcctggacagtccatggctggcttggctgcaatgtcagggaggcagggagcttacttggctcaaacaggaggtgccggaagtcacgctgtccccggattatagaacagccatggacaaggccgatgaactctacgaccgtgtcgatggcttactgcatcagctcaccctgcaatctaatcagcgaatccaggccctggagctagtccagaccctggaagcgagagaatctggtctgcaccagatcgaggtctggctgcagcaggttggttggcctgcactagaggaagccggtgaacctagtctcgacatgttgctccaggcgcaggggtcttttcaggagctctaccaggtggcacaagaacaagtaagacagggggaaaagtttttacagcctttgactgggtgggaggcggccgaactggacccccccggggcaagatttctcgctctgcgagcccagttaaccgaattctctagggccttggcacagcgttgccagcggctcgctgatgctgagcggctgttccagctattcagggaagcgttgacatgggccgaggaggggcagcgcgtgctggcagagctggagcaggagcgcccaggtgttgtgctgcaacaactccagttgcactggaccaggcatccagacttgccccctgctcactttcggaagatgtgggcacttgccactgggctgggctctgaggccatcagacaggagtgtcgatgggcgtgggcccgatgtcaagacacatggctggccctggatcagaaattggaggcctccctgaagctgcctcctgttggtagtacagccagcctttgcgttagtcaggtccccgcagccccagcccatcccccactgcgcaaggcttatagctttgataggaacctcggacagagcctgtctgaaccggcgtgtcactgtcaccacgctgcaacaatagccgcctgtagaagacccgaagccggaggcggtgcactgccacaggcaagcccgacagtgccacctccgggttcttctgatccgcgctctctaaaccgcctccagctagtgctggccgagatggtagcgacggagagagagtacgtccgcgcattagagtatacaatggagaactactttcctgaactggatagacccgatgtgccccagggcctacgcggccaacgggcacatctgtttggaaaccttgaaaagctcagggactttcactgtcacttctttctgagagagctggaggcctgcacgcgccaccctcctagggtggcatacgccttcttgaggcacagggtgcagttcgggatgtacgctctgtacagcaaaaataaacctagaagcgacgccttgatgagcagctatggacatactttttttaaggataagcagcaggccctcggagatcatctggacctggcaagctacctgctgaaacctatccagagaatgggcaaatacgctctgctcctccaggaacttgctcgtgcttgtggcggacccactcaggagctctccgccctgagagaagcccaaagcttggtacatttccagctccgccacggaaacgacttgctggctatggacgctatacaaggttgtgacgtgaatctcaaggaacagggccaattagtgagacaagacgaatttgtggtgagaacaggcagacataagagtgtcaggcggattttcttatttgaggagttattgctcttctccaagcctagacacgggcctaccggagtagacacattcgcctataagcgcagttttaaaatggccgatctgggcctgaccgaatgctgcggaaacagcaacctacgattcgagatctggtttaggcgccggaaagcccgggacacatttgtgctgcaagcttctagtctcgccataaaacaggcatggacagcagatatctctcatctgttgtggaggcaggctgtgcacaataaggaagtgcgtatggcggaaatggtgtcaatgggcgtgggcaataaggccttcagagacatcgccccgtccgaagaggccattaatgaccgcaccgtgaattatgtgctaaaatgtagagaggtgcgctctagggctagtattgctgtggctccgttcgaccacgactcactgtacctgggagcttcaaactctctacctggcgaccccgcaagctgcagcgtgctgggcagcctcaacttgcatctctatagagaccccgctctgctcggtcttcgctgtcccctctaccccagttttcccgaggaggccgcactggaagccgaggctgagctgggggggcagcccagtctgacggccgaagattctgagatttcaagccagtgcccctcagcaagcgggtcttccgggagcgattcctcatgcgtcagcggccaggctctgggaagaggtcttgaagacctgccctgtgtttag

SEQ ID NO: 46816 - DNA, 3576 bp, Artificial Sequence
  derived and/or modified sequence
atggagcggcccctggagaatggagatgagagcccagacagccagggccacgccacagactggaggtttgctgtgtgcagcttcagagatgcctgggaggaggaggagcccgccagccagatgcacgtgaaggaccccggcccccccaggcctcctgctggggccacccaggatgaggagctgcagggcagccccctgagcaggaagttccagctgcccccagctgctgatgaaagtggagatgcccagaggggcaccgtggagagcagctctgtgctgtctgagggccctggccccagcggcgtggagagcctgctgtgccccatgagcagccacctgagcctggcccagggcgagagtgacaccccaggagtgggcctggtgggggaccccggccccagccgggccatgcccagcggcctgagccctggggccctggacagcgaccctgtgggcctgggggaccccctgtctgagatcagcaagctgctggaggccgcccccagcggcagcggcctgcccaagccagctgactgcctgctggcccaggacctgtgctgggagctgctggccagcggcatggccaccctgcccggcaccagagatgtgcagggccgggctgtgctgctgctgtgtgcccacagccctgcctggctgcagagcgagtgcagcagccaggagctgatccggctgctgctgtacctgcggagcatccccaggcctgaggtgcaggccctgggcctgactgtgctggtggatgcccgcatctgtgcccccagcagcagcctcttcagcggcctgagccagctgcaggaggccgcccctggagctgtgtaccaggtgctgctggtgggcagcaccctgctgaaggaggtgcccagcggcctgcagctggagcagctgcccagccagagcctgctgacccacatccccacagctggcctgcccaccagcctgggcggcggcctgccctactgccaccaggcctggctggacttcagaagaaggctggaggccctgctgcagaactgccaggccgcctgtgccctgctgcagggcgccattgaatctgtgaaggctgtgccccagcccatggagcctggagaggtgggccagctgctgcagcagacagaggtgctgatgcagcaggtgctggacagcccctggctggcctggctgcagtgccagggcggccgggagctgacctggctgaagcaggaggtgcctgaggtgaccctgagcccagactacagaacagccatggacaaggcagatgagctgtatgacagagtggatggcctgctgcaccagctgaccctgcagagcaaccagaggatccaggccctggagctggtgcagaccctggaggcccgggagagcggcctgcaccagatcgaggtgtggctgcagcaggtgggctggccagccctggaggaggccggggagcccagcctggacatgctgctgcaggcccagggcagcttccaggagctgtaccaggtggcccaggagcaggtgcggcagggcgagaagttcctgcagcccctgaccggctgggaggccgctgagctggaccccccaggggcccgcttcctggccctgcgggcccagctgacagagttcagccgggccctggcccagcgctgccagaggctggctgatgctgagcggctcttccagctgttccgggaggccctgacctgggccgaggagggccagagggtgctggccgagctggagcaggagaggcctggggtggtgctgcagcagctgcagctgcactggaccaggcacccagacctgcccccagcccacttcaggaagatgtgggccctggccaccggcctgggcagcgaggccatccggcaggagtgccgctgggcctgggcccgctgccaggacacctggctggccctggaccagaagctggaggccagcctgaagctgccccctgtgggcagcacagccagcctgtgtgtgtcccaggtgcctgctgccccagcccacccccccctgaggaaggcctacagctttgacaggaacctgggccagagcctgtctgagcccgcctgccactgccaccacgccgccaccatcgccgcctgcagaagacctgaggccggcggcggggccctgccccaggccagccccaccgtgcccccacctggcagcagtgaccccaggagcctgaaccggctgcagctggtgctggccgagatggtggccacagagcgggagtatgtgcgggccctggagtacaccatggagaactacttccctgagctggacagaccagatgtgccccagggcctgcggggccagagggcccacctgtttggaaacctggagaagctgcgggacttccactgccacttcttcctgcgggagctggaggcctgcaccaggcaccccccccgggtggcctatgccttcctgcggcaccgggtgcagtttggcatgtatgccctgtacagcaagaacaagcccaggagtgatgccctgatgagcagctatggccacaccttcttcaaggacaagcagcaggccctgggggaccacctggacctggccagctacctgctgaagcccatccagaggatgggcaagtatgccctgctgctgcaggagctggcccgggcctgtggcggccccacccaggagctgagcgccctgcgggaggcccagagcctggtgcacttccagctgcggcacggcaatgacctgctggccatggatgccatccagggctgtgatgtgaacctgaaggagcagggccagctggtgcggcaggatgaatttgtggtgaggacaggccgccacaagtctgtgcggcgcatcttcctgtttgaggagctgctgctcttcagcaagcccaggcatggccccactggagtggacacctttgcctacaagaggagcttcaagatggctgacctgggcctgacagagtgctgcggcaacagcaacctgcgctttgagatctggttcagaagaaggaaggcccgggacacctttgtgctgcaggccagcagcctggccatcaagcaggcctggacagctgacatcagccacctgctgtggaggcaggccgtgcacaacaaggaggtgaggatggccgagatggtgtccatgggcgtgggcaacaaggccttccgggacatcgcccccagcgaggaggccatcaatgacagaacagtgaactacgtgctgaagtgccgggaggtgcgcagccgggccagcattgctgtggccccctttgaccatgacagcctgtacctgggcgccagcaacagcctgcccggggaccctgccagctgcagcgtgctgggcagcctgaacctgcacctgtacagagatcctgccctgctgggcctgcgctgccccctgtaccccagcttccctgaggaggccgccctggaggccgaggccgagctgggcggccagcccagcctgacagctgaggacagcgagatcagcagccagtgccccagcgccagcggcagcagcggcagtgacagcagctgtgtgtctggccaggccctgggccggggcctggaggacctgccctgtgtgtag

SEQ ID NO: 46817 - DNA, 3576 bp, Artificial Sequence
  derived and/or modified sequence
atggagcggcccctggagaacggcgacgagagccccgacagccagggacacgccacggattggcgctttgcagtgtgttctttccgtgatgcctgggaggaggaggagcctgcctcacaaatgcatgtcaaagacccaggccctcctcgccctcctgccggagccactcaggacgaggagctccagggttctcctctttctagaaaatttcagctgcccccggccgcagacgagagcggcgatgcacagcggggaaccgtagaatctagtagcgttctgagcgaggggcctggcccctccggagttgagtccctgttgtgtccgatgtcgagtcaccttagtctagcacagggtgagtccgacacacccggggtcggcctagttggggaccccggaccctcccgggcaatgccttcgggactgagtccaggagctcttgattccgatcctgtcggcctcggtgaccccctctcagaaattagtaagctgctagaggccgcaccctctggatctggtctgcctaagcccgctgactgcctgttggcacaagacctctgctgggagctcttagcctctggaatggccacgcttccaggcacaagggacgtgcagggccgagccgtgctcctcctgtgcgcacatagcccagcctggctgcagtctgagtgcagctcacaggagctcattcggctcctactctacttgagatccattccaagacctgaagttcaggctttgggactgacagtgctcgtggatgcaaggatttgtgccccctcatcaagcctcttttccggactgtcccagctgcaggaagccgcgcctggtgctgtgtatcaggtgctgttagtgggtagtaccttactgaaggaggtaccaagtgggttacaactagagcagcttcctagccagagcctgctgacccatatcccaaccgccggcctgcccacttccttgggtggaggcttgccttactgtcatcaagcctggctagattttcggagaaggctggaggccctgttgcagaactgccaggccgcgtgtgcgttgttacaaggagccattgagagcgtgaaagccgtacctcaacccatggagcccggtgaggtgggccagctcctgcagcaaacagaggttctgatgcagcaagttctggactctccctggttggcttggcttcaatgccaaggcggcagggaactgacttggctgaagcaggaggtgcctgaggtgactctctctcccgactaccgtacagccatggataaagccgacgagctctacgacagagtggatggactgctgcatcaactgacccttcaaagcaatcagaggattcaggctttggaactggtccaaaccctagaggcccgcgagtctgggctgcaccagatcgaggtgtggctgcagcaagtgggatggcctgctctcgaggaggccggagaaccttccttggacatgttactccaagcacaggggtctttccaagagctttaccaggtagcccaggagcaggtcagacagggggaaaagttccttcagcccctcaccggctgggaggccgctgagcttgaccctccgggggctaggttcctggccttaagggctcaactgaccgagtttagcagggctttagctcagaggtgccagaggctggcggacgcagaacggctgtttcagctctttcgcgaagcactcacctgggctgaggaggggcagcgcgttctggcagagctggaacaggagcggccaggcgtggtactgcagcagctacagttgcactggacccgccaccctgacttgccacctgcacacttccgcaaaatgtgggccctcgccacagggctgggttccgaagcgatcagacaagagtgtcgctgggcgtgggcccgatgccaggacacctggcttgcactggatcagaagctcgaagctagtctaaaactgccacccgttggaagcactgctagtctttgtgtatcccaagtgcccgcagccccagcccatcctcctctgcgtaaggcatattcattcgatagaaacctggggcagtcactaagcgagcccgcttgccactgtcatcacgccgccaccattgctgcgtgtcgtcgccctgaggcgggaggtggcgcactccctcaagcctcccccaccgtgccgcctcccggatcaagtgaccctcgttcccttaataggctacagcttgtcttggccgaaatggtggctacagagcgcgagtatgtacgcgcattagagtataccatggaaaactactttccagagctcgacagaccggatgtgccccagggcctcaggggccagagggctcacctgttcggaaacttggagaagcttagggatttccactgtcacttttttttaagagagctggaggcctgcacacgccaccctcctcgggtcgcctatgccttccttcggcatcgcgtgcagttcggcatgtatgcgctctattccaagaacaagccacgttcggacgctttgatgagttcatatgggcatacatttttcaaagataagcagcaagcactgggggatcatttagacctggctagttacctgctcaagcctatacagcgcatgggtaagtacgcacttcttctccaggaacttgctcgagcttgcggcggcccgacccaggagctcagtgctctgagagaggcccagtccttagtgcacttccagctgcgccacggcaatgatctgttggctatggatgccattcagggatgtgatgttaacttaaaggagcaaggccagctcgtaagacaggatgagtttgtggtccgcaccggacgccacaaatctgttcgtagaattttcctatttgaagagctcctgctcttcagcaagcctcggcacggccccacaggggttgacactttcgcttacaagcggagctttaaaatggcagatctcggcctgactgaatgctgcggaaactctaatctgcgctttgaaatctggtttcgcagaagaaaagctcgtgataccttcgtactgcaggctagctcacttgcaatcaagcaggcctggaccgctgacatttcccatctgctgtggcgccaggccgtgcacaacaaggaagtgagaatggccgagatggtgtccatgggtgtcgggaataaagcattccgagatatcgctccaagcgaggaagccattaacgatcgtaccgtgaattacgtgcttaaatgccgagaggtgcggtcccgtgcctccatcgccgttgctccattcgatcacgatagcctgtatctcggcgcctccaatagccttcccggggatcctgcctcctgtagcgtcttgggaagcttgaacctccacctctaccgggatcccgctctgctgggcctgcggtgtccactttacccaagcttccccgaagaagctgctctggaggccgaagccgagcttggaggccagccctccctgaccgcggaggactctgaaatcagctctcagtgtccgtccgccagcgggagcagcggctccgattcctcttgcgtgtctggtcaggccctaggacgtggactggaagatctgccctgcgtatag

SEQ ID NO: 46818 - DNA, 3576 bp, Artificial Sequence
  derived and/or modified sequence
atggagcggcccctggagaacggcgacgagagccccgacagccaggggcacgctacagattggaggtttgctgtgtgtagcttccgggacgcatgggaagaggaagagccggcctcccagatgcacgtgaaagatccaggaccccccagaccgccggcaggcgccacccaagatgaggagctgcagggttctcctctgagccgcaaattccaactgcccccagccgcggatgaatccggagacgcccaaagaggaacagttgaaagcagttccgtcctaagcgaaggaccgggcccttccggagtggagtcgctcttgtgtccaatgtcctctcatctctcactggctcagggtgagtctgacaccccaggagtgggacttgtgggcgatcccggtccttcaagagctatgccttccggcttgtctccgggcgctctggatagtgatccggtcggactgggtgacccactgtcggaaatttctaagttgctggaggccgccccctctggctctgggttgccaaagcccgcagactgcctgctcgctcaggacctctgctgggaattgttggcgagtggcatggcgactcttccaggcacccgagacgtgcagggacgggctgtgcttttgttgtgtgctcattcacccgcctggttgcagtcagaatgtagctcacaggagcttattagactgttgttgtatctgaggtccataccccggcccgaggtacaggccttgggtcttacagtgcttgtagatgctcggatatgcgccccaagcagctcactgtttagtggcttgtcacagctccaggaggccgcccctggggccgtgtaccaggtactgctcgtcggctccacgctgttaaaggaagtgccgtccggactgcagctggaacagctgcctagccaatcactgcttacgcacattcctaccgccggccttcccacatcgctaggtgggggacttccatactgtcaccaggcctggctggactttcggcggcgtttagaggcactgcttcagaactgtcaggcagcatgcgcattgctgcagggagccatagagtccgtgaaggctgtgcctcagcccatggaacccggagaggtgggccagcttttacagcaaacagaggtgcttatgcagcaggtactcgattctccctggctggcttggttgcagtgtcaaggaggccgggagctcacttggctcaaacaggaagtgcccgaggtcacactgagtcctgactaccgaacggctatggacaaggccgacgaactgtacgaccgggttgatggcctcctgcaccagttgactctacagagcaatcagcgtattcaagctctcgagctcgtacaaacactggaggctcgggaaagtggcttgcatcagatcgaggtttggctccagcaggtcggctggcctgccctggaagaagctggtgaaccttctttagatatgctgcttcaagcccaagggtccttccaagagctgtaccaggtggcgcaggaacaggtccggcaaggcgaaaaattcctccaacctctcaccggatgggaggccgccgaactggatccccccggagcacgatttctcgccctcagagcccaactgaccgaattcagcagggcccttgctcagcggtgccaaaggctcgctgacgccgaaaggctgttccaactcttccgagaagctctcacctgggcggaagagggacagagggtgctcgctgagctcgaacaggagcgcccgggggtggtcctccagcagctgcagcttcattggacgcggcaccccgacctgccgccagcacatttccgcaaaatgtgggcgctggcaacgggactcggatccgaggccatcagacaggagtgcaggtgggcctgggcgcggtgccaggatacgtggctggctcttgaccagaaactcgaggcctctctcaaactaccccccgttggctccacagccagcctatgcgtgtcacaggtgcccgctgcccctgctcaccctcctttaagaaaggcttacagctttgatcgaaaccttggccagagcctcagcgaaccggcctgccactgtcatcatgctgccacaatcgccgcatgtcgccgccccgaggccggtggcggcgccttaccccaggcctcaccaaccgtcccaccaccagggtcctctgacccgaggtctctgaacagactccagctcgtgttggccgagatggtcgccactgaacgggagtatgtgcgcgccctagagtacacaatggagaactactttccggaattggaccgcccagatgtcccgcagggactgagaggacaaagagctcacctgttcggaaacctggaaaagctgcgggactttcactgccatttttttctaagagagttagaagcttgcactcggcaccctccaagagtggcatatgccttcctccggcaccgggtccagtttggaatgtatgcactgtattctaagaacaaacccagatcagacgccctcatgtccagctacggacatacattttttaaggataaacagcaggcactgggtgatcacctcgatcttgccagttacctgctgaaacccatacagcggatgggaaagtacgccctcctgttacaggagcttgctagagcttgcggcgggcctacccaggaactctcagcgttacgtgaggcccagtcactggtccatttccagctgcgccatgggaatgatttgcttgccatggatgctattcaaggatgtgatgtcaatctcaaagagcagggccaactggtacgtcaggacgagtttgtcgttaggacagggaggcacaagagcgtgcgcagaatcttcttgttcgaagaactgcttcttttcagtaagcctcgtcatggccccactggggtggacacattcgcatataagcggagcttcaagatggccgatcttggacttactgagtgctgcggcaattcaaacctgcggtttgaaatctggttcaggcgccggaaggcaagagatacattcgtgcttcaggcctccagccttgccatcaagcaggcttggacagctgatattagccatcttctttggcgccaggctgtgcacaacaaagaagtcaggatggctgaaatggtcagtatgggcgtgggtaataaggccttcagggacatcgcacccagcgaggaggcgatcaacgacaggaccgttaattacgtgctaaagtgccgggaagtgcgctcacgtgctagcatcgctgtggcaccatttgatcacgattctctgtatttgggcgccagcaacagtctccctggggatccagccagttgttcagtcctgggatccctcaatctgcacctgtacagggaccctgctctgctgggcctgagatgccctctttatccatcctttccagaggaggccgcactggaagccgaggcagagttgggtggccagccctctctgaccgcagaagattcagaaatttccagtcagtgcccttccgccagcgggagcagtggctcggacagcagttgcgtaagcggtcaggccctcggacgaggcctggaggatctgccatgtgtctag

SEQ ID NO: 46819 - DNA, 3576 bp, Artificial Sequence
  derived and/or modified sequence
atggagcggcccctggagaacggcgacgagagccccgacagccagggccatgccaccgattggaggttcgctgtgtgcagctttcgggatgcatgggaagaggaggaaccggctagtcagatgcatgtcaaggatcctgggccgccccggccccctgcgggcgccacacaggatgaggaattacaaggttcgccactgtcgagaaaatttcagcttccccccgccgccgatgaatctggcgacgctcaacgcggcaccgtggagtcctcttctgtgctttctgaaggtcccgggccatctggggtggagtccttactgtgccctatgagttctcacctctccctggcacagggtgaaagcgacacacccggggtggggcttgtgggcgatcccggtccaagccgcgcgatgccttcagggctgtctcctggcgctctagactctgaccccgttggattgggcgatccgctgagcgagatctcaaagttgttagaagcggcaccatcaggttccggcttgccaaaacctgcagactgcttactcgcccaggacctttgctgggagctgttggcctcaggaatggctaccctgcccggaaccagagatgttcagggacgggcggtgctccttctttgcgcgcactcccccgcctggttgcagtcagagtgtagcagccaggagctgattaggcttctcctgtacctgcggagcatccctcggccagaagtccaggcactaggactgacagtgctcgtcgacgcacgaatttgtgcacccagtagctctctgttttccgggctttctcaacttcaagaggcagcccccggcgccgtctatcaggtgctgctcgtcggcagtacactgctcaaagaggtgccgtccggcctgcagctcgagcaacttccaagccaaagcctattaacacacatccccaccgccggtcttcccaccagtttaggcggcggtctgccttattgtcatcaggcctggctggactttaggcggcgtctggaagcactcttacagaactgccaggcagcatgcgccctcctccagggtgccatagagtcagtaaaggccgtccctcagccaatggagccaggcgaagtaggtcagttgctgcagcagacagaggtgctaatgcagcaggtgctggattcaccctggctagcctggctgcagtgccagggcggccgggagctcacatggcttaagcaggaagttcccgaggttaccctgagcccggattatagaacagcaatggataaagcagacgaactctatgaccgcgttgatggcctgcttcaccaattgacacttcagagtaaccagcggattcaggctcttgaacttgttcagacattggaggcgcgcgaaagcgggctgcaccagattgaagtgtggctacaacaagtgggctggcccgccctcgaagaggccggtgagccaagcctagatatgctgttacaggcccagggcagtttccaggaactctatcaggtggctcaggaacaagtccggcagggcgaaaagttcttgcaaccgctcactggatgggaggccgctgaacttgatcctcctggcgctcgattcctcgctctccgagcccagctgaccgaattctcacgcgctctggcccagcgatgccagagacttgccgacgcagagcgcctttttcaactctttcgagaggctcttacctgggccgaggagggccagcgggtgctggccgagttggaacaggagagacctggagtggtgctacagcaacttcagttacactggacacggcaccccgacctaccaccagcgcatttcaggaagatgtgggccttagctacaggcctaggatcagaagctatccgccaagaatgccgctgggcatgggcacggtgccaggatacttggctggccttagatcaaaagctcgaggcctcattaaagctcccacccgtgggtagcaccgccagtctatgtgtttcgcaggttccagctgcccctgcgcaccctccactgaggaaggcctattccttcgacagaaacctgggccagtccctctcagaaccagcctgtcattgtcatcacgcggccaccatcgcagcctgtcgccgtccagaggccggaggcggggcactccctcaagcttctccgaccgtgccacctcctggaagttctgatccgcggtcactgaaccgactgcagctggttctcgccgagatggtggccaccgagcgggagtatgtccgcgctctcgaatacaccatggagaactatttccctgaattagataggcccgatgtcccacaggggctgaggggccagagagcccatctgttcggcaacctggagaagctaagggatttccactgtcatttcttcctgcgagaactcgaggcgtgcacccggcatcctccgcgagtagcctacgcctttcttcgccatagggtccaattcggcatgtacgcactttatagtaaaaataagccaaggagcgatgcgttaatgagcagctatggtcataccttctttaaggacaagcaacaggcgcttggagatcatctagatctggcctcatacttgctgaagccgatccagagaatgggaaaatatgccctcctcctccaggaactcgccagggcttgtggtggtccaactcaggagctgtcggctctacgtgaggcacagagtttggtgcactttcagctaagacacggaaatgacctgctggctatggatgccatccagggatgtgacgttaacctgaaggagcagggtcaacttgttcggcaggatgagtttgtagtgcgaactggcagacacaaatctgttcgtagaatatttctgtttgaggagctactacttttctcaaagccacggcacggacctactggtgttgacacctttgcttacaagagatccttcaagatggcggacctaggcctaaccgagtgctgcgggaatagcaatctaagattcgagatttggttccgcaggcggaaagcaagagacacttttgtccttcaggcctccagcctggcaataaagcaggcatggaccgcagacatcagtcacctgctttggcgccaggccgtacacaacaaggaggtgaggatggcagaaatggtctcaatgggggtcgggaataaagcatttagggacatcgccccatccgaagaagccatcaacgatcggacggtcaattacgtgctgaagtgccgcgaggtaaggagccgggctagcattgccgtggctccgttcgatcacgattctctgtacctgggagccagcaattcactgcctggtgatcccgcgtcttgtagcgtgctcgggagtctgaatttgcatctctatcgcgaccccgcacttctcggcctgcggtgcccgctctacccttcattcccagaggaggcagcccttgaggctgaagctgaactcggtggccagccatcactgacagccgaggattctgagattagcagccagtgcccatctgctagtggaagctctgggtctgatagctcttgtgttagcggccaggccctaggcagaggcctggaggatttgccttgtgtgtag

SEQ ID NO: 46820 - DNA, 6802 bp, Artificial Sequence
  derived and/or modified sequence
tggtcagccacccctggctggctccaggcccagctccccaatattccccactaggcctcagtgtgtcctcatttctatctgtacctttgccatcctgggccatgcaacctgtagctctcggcctcttctgtctcctttcaggctgagtctctgaatctgtctccatttgtgactctggtttccatgggatacatagatgtggagcctcaggagggcaggggtagtgtgatcagtgtcaggcgccccaaagcatttattctgtgccaggccctgtgctggatgctgaaagtacggaagtggataacatacagtctctgtttccatgaagcctacaatgcacattctctgtggagtggagaaaccagggcccagccctgcctctatctcagtatggctgtacctcccctgaatctgcctgctgtgcccagggtgccaggtcagctatagcctgtggcttgaggctcttctttgcctctggcattcacaggggtatgtgtgcccgccagcaggtcccccccggctcttagggctcctgggggacttggctggtgggtgctggtgggcagcagaaggggagggagggagcagaaggcagtgactcagtgggggtggccctgggacagaactggggaggaagccaaggttggatgatgcttcctgaagccaggagggtgggaagagaggtctggctgggagttagggatggagcaggacaactccaaggctcccctctggcagccagacctgctcatgaagaaggctcctcggtagctgcctgaaagtctggactctgggggctgggctgggctgggtggggagattgctgttggtcccactgtgcctgttgtaatccccaggttcatgaaagaggtgcctgccttagagccagggaagccgttgcacccggtgccccctctccccagggaccatgggcctgggcacactgtggggctcagggtcttctcctggtcgcagagctgaccttcccacaatcttcccacaaattctggggagtgtcgggccaggcccacatgccctaaagggacctcaaatcgcacagctacccacttgggtagctttcatcagttcaggattccctgactgcgggtgaaatgagggggcagggcaccaacacagcccgagtgctggcagcgggtgaacgtataacacagggagtcttccccagtcctcacggcaaccccaggagaaaaatgactttccatttttacaggtgaggagggtgaggctcaaagagcagagttcctggagcgcccccagcaggtaagtggagaagccaggcctgggctgggggctctggctccagaaccccacctcagcaccagcctcctgcaccggactttgtggagaagggggtaagggggtgccagggatggcaaaggggtagaggatctggtggactctggcaggcctgggtcagctccacccattggtctcactcccacccggatggcagccccatcccacgtgggatcatgcgacctgtctctgggtgcccgcggcgaggcagcaccccgcttccctacacagaaggccttcccctcccgtcggctcattcagccgcggaagcccctgggagaccccgccccgccccgtcccgcggtgccccccgcgcactcaccctcgctcacccacgcggccttcctggcgggagagcgcttccggcgtcctcgccaggcccggggagtgggcacggtggagctgccgaccgttggtcgctgccccaacccacgcactgcgacgccgcgggtgaggcgcgcggtctgcggggcccgggggtgcggcggggcggggctggcgggctgtccgggcccacggagaggacggcggcgggcgggggttgctgcagggcccgcaccttgtcttccgcgccggcagggctgtgccccgtcgagacctgctcgggctgtggctccgtcctccggcctccagggggcggcgcggcgctgcgcggcgccccggcggcactgccctcccttcccagcggccaggaggcggtgtcccgtgacgccgcgcggccgcgctgtagtggccgtcgaggccgccgtctgttcgaaggctgtccgacttcacggttccccgcggctcggcccgggggcgtgagtgtcgccagcgggcgacgggggggcgcgcggtaggccctgcaacaaggccagggcctgggggggccggcaggagagcgaacccgaggcatcgtggtgccatggcggggccgcccccacgggcatgggcctgcagagcgtggccgtgaggacgctgagggtgggcgcgcacggagcagaggcccacgggcgtccgacgggggacctggacagagggacacccttaacgttattccctcttcccaggcctgaattgcagttcctgtgccctggcactaagactggcacctcctgcggcccatgcccttcgcctgcattgcccactgagtcccactcgactgtcttcagcgcggttcacactgagacccagccctctcccgctggccccgagcaggcccacctttaggagggcgtgatggaaaggcccctggagaatggggatgagtccccagactctcagggccatgccaccgactggagatttgctgtgtgcagtttcagggatgcctgggaagaggaggaacctgcttcccagatgcacgttaaggacccaggtcctccaagaccaccagccggggccacccaggatgaggagctacagggcagccccttgtccaggaaattccagttacccccagctgcagatgagtcgggggatgcccagaggggcacagtagaaagctcctcagtcctgtcagaagggccaggcccctctggagtggagagtctcctatgccccatgtcctcccacctcagcttggcacagggtgagagtgacaccccaggggtagggttggtaggggacccaggtccaagcagggcgatgccatctggcttgagccctggggcattggacagcgaccctgtgggccttggagaccctttatcagaaatatcaaagctgctggaggcagcccccagtggatccggcctccctaagcctgctgactgcctcctggcccaagacctctgttgggagctgctggccagtggtatggccaccttgccagggactcgggatgtccaaggccgggcagtgctgcttctgtgtgcccacagcccagcctggcttcagtctgagtgcagcagccaggaactcatccgcctcctgctgtacctgcgaagcatccccaggcccgaagtacaggcactgggactgacagtgctagttgatgcccgaatttgtgctccaagttcttccctcttctctgggctcagccaactacaagaagcagccccaggggccgtgtaccaggtgctgctagtgggaagcacgctgctgaaggaagtgccttccgggctgcagctggagcagttgccttctcagagcctgctgacccacatcccaacggcggggctgcccacttcgctaggaggaggcctgccttactgccaccaggcctggctggatttccgaaggcggctggaagctctactacagaactgccaggcagcttgtgccctgctccagggggccatcgaaagtgtgaaggctgtgccccagcccatggagcctggggaggtcggtcagctgctacagcagacagaggtcctgatgcagcaggtgctagactcgccatggctggcatggctacaatgccaggggggccgggagctgacatggctgaagcaagaggtcccagaggtgaccctgagcccagactacaggacggcaatggacaaggctgacgagctatatgaccgggtggatggattgctgcaccaactgaccctgcagagcaaccagcgaatacaggccctagagttggtccaaacactggaggcccgggaaagcggactgcaccagattgaagtgtggctgcagcaggtgggctggccagcactggaggaggctggggagccctcgctggacatgctgctccaggcccaaggctcttttcaggagctgtaccaggttgcccaggagcaggtcaggcaaggggagaagtttctgcagccgctgactggctgggaggcggctgaactggacccccctggggcacgctttctggccctgcgagcccagctgactgaattctctagggctttggcccagcggtgccagcggctggcggatgctgagaggctgtttcagctcttcagggaggccttgacgtgggctgaggaggggcagcgagtgttggcagagctggagcaggaacgcccgggggttgtgttgcagcagctgcagctgcactggaccaggcaccctgacttgcctcctgcccacttccgaaagatgtgggctctggccacggggctgggctcagaggccatccgccaggagtgccgctgggcctgggcgcggtgccaggacacctggctggccctggaccaaaagcttgaggcttcactgaagctaccaccggtgggcagcacagctagcctgtgtgtcagccaggtccccgctgcacctgcccaccctcccctgaggaaggcctacagcttcgatcggaatctggggcagagtctcagtgaacctgcctgccactgccaccatgcggccactattgctgcctgccgcagaccagaggctggaggaggtgccctgccccaggcatcccctactgtgcctccaccaggcagctctgaccccaggagcctcaacaggctacagctggtgctggcagagatggtggccacggagcgggagtatgtccgggctctagagtacactatggagaactatttccccgagctggatcgccccgatgtgccccagggcctccgcggtcagcgtgcccacctctttggcaacctggagaagctgcgggacttccactgccacttcttcctgcgtgagctggaggcttgcacccggcacccaccacgagtggcctatgccttcctgcgccatagggtgcagtttgggatgtacgcgctctacagcaagaataagcctcgctccgatgccctgatgtcaagctatgggcacaccttcttcaaggacaagcagcaagcactgggggaccacctggacctggcctcctacctgctaaagcccatccagcgcatgggcaagtacgcactgctgctgcaggagctggcacgggcctgcgggggccccacgcaggagctcagtgcgctgcgggaggcccagagccttgtgcacttccagctgcggcacggaaacgacctgctggccatggacgccatccagggctgtgatgttaacctcaaggaacaggggcagctggtgcgacaggatgagtttgtggtgcgcactgggcgccacaagtccgtgcgccgcatcttcctttttgaggagctgctgctcttcagcaagcctcgccatgggcccacaggggttgacacatttgcctacaagcgctccttcaagatggcagaccttggtctcactgagtgctgtgggaacagcaacctgcgcttcgagatctggttccgccgccgcaaggccagggacacctttgtgctgcaggcctccagcctggctatcaagcaggcctggacagctgacatctcccacctgctttggaggcaggccgtccacaacaaggaggtgcgcatggctgagatggtgtccatgggtgtggggaacaaggccttccgagacattgctcccagcgaggaagccatcaacgaccgcaccgtcaactatgtcctgaagtgccgagaagttcgctctcgggcgtccattgccgtagccccgtttgaccatgacagcctctacctgggggcctcgaactcccttcctggagaccctgcctcttgctctgttctggggtccctcaacctgcacctgtacagagacccagctcttctgggtctccgctgtcccctgtatcccagcttcccagaggaagcagcactggaggctgaggcagagctgggcggccagccctctttgactgctgaggactcagagatctcgtcccaatgcccatcagccagtggctccagtggctctgacagcagctgtgtgtcagggcaggccctgggtaggggcctggaggacttaccctgtgtctgagcccgggactggacgagcagtagatccagcagcctgcagctccaaggaacattgcctctctggatctgctgtgaccagggtgtggctgacacctgggctacctccaacctacatgtgcaacgctgttgactaccctttctgatgtgtgtggccattggactaactggcacggggcctctctagggaagtctggttgtagagcctgaataggctcctggccccatgaccccttctcctgtccccagctcccatcccagttgtgggttaagaataggctagagcagacattgggtgtttccatgctgtaggctggtgggggaccatgtgcctctaggcagtgactagggtgcccccacccctcaggaagaacacaggtgggctcctagcagctgatccccaatgcctggccttaaagccgagctcagttaccatagggacaggtccacctctactgggccctcatgcttgcctttcctggcccccaggcccagcccctttttactggggcagtttcgttattttgacttgatgccttttgaataactttcaatagaattgtctaaaattatcttactggttgttaggcctttggtgtctcagagaaggagtctaggtctttgatgtgtgatttaatcttttatttgtttataataaaaaatagactgatatgtaccctctgatgggcacatgc

SEQ ID NO: 46821 - DNA, 4477 bp, Artificial Sequence
  derived and/or modified sequence
gctgtccgacttcacggttccccgcggctcggcccgggggcgcctgaattgcagttcctgtgccctggcactaagactggcacctcctgcggcccatgcccttcgcctgcattgcccactgagtcccactcgactgtcttcagcgcggttcacactgagacccagccctctcccgctggccccgagcaggcccacctttaggagggcgtgatggaaaggcccctggagaatggggatgagtccccagactctcagggccatgccaccgactggagatttgctgtgtgcagtttcagggatgcctgggaagaggaggaacctgcttcccagatgcacgttaaggacccaggtcctccaagaccaccagccggggccacccaggatgaggagctacagggcagccccttgtccaggaaattccagttacccccagctgcagatgagtcgggggatgcccagaggggcacagtagaaagctcctcagtcctgtcagaagggccaggcccctctggagtggagagtctcctatgccccatgtcctcccacctcagcttggcacagggtgagagtgacaccccaggggtagggttggtaggggacccaggtccaagcagggcgatgccatctggcttgagccctggggcattggacagcgaccctgtgggccttggagaccctttatcagaaatatcaaagctgctggaggcagcccccagtggatccggcctccctaagcctgctgactgcctcctggcccaagacctctgttgggagctgctggccagtggtatggccaccttgccagggactcgggatgtccaaggccgggcagtgctgcttctgtgtgcccacagcccagcctggcttcagtctgagtgcagcagccaggaactcatccgcctcctgctgtacctgcgaagcatccccaggcccgaagtacaggcactgggactgacagtgctagttgatgcccgaatttgtgctccaagttcttccctcttctctgggctcagccaactacaagaagcagccccaggggccgtgtaccaggtgctgctagtgggaagcacgctgctgaaggaagtgccttccgggctgcagctggagcagttgccttctcagagcctgctgacccacatcccaacggcggggctgcccacttcgctaggaggaggcctgccttactgccaccaggcctggctggatttccgaaggcggctggaagctctactacagaactgccaggcagcttgtgccctgctccagggggccatcgaaagtgtgaaggctgtgccccagcccatggagcctggggaggtcggtcagctgctacagcagacagaggtcctgatgcagcaggtgctagactcgccatggctggcatggctacaatgccaggggggccgggagctgacatggctgaagcaagaggtcccagaggtgaccctgagcccagactacaggacggcaatggacaaggctgacgagctatatgaccgggtggatggattgctgcaccaactgaccctgcagagcaaccagcgaatacaggccctagagttggtccaaacactggaggcccgggaaagcggactgcaccagattgaagtgtggctgcagcaggtgggctggccagcactggaggaggctggggagccctcgctggacatgctgctccaggcccaaggctcttttcaggagctgtaccaggttgcccaggagcaggtcaggcaaggggagaagtttctgcagccgctgactggctgggaggcggctgaactggacccccctggggcacgctttctggccctgcgagcccagctgactgaattctctagggctttggcccagcggtgccagcggctggcggatgctgagaggctgtttcagctcttcagggaggccttgacgtgggctgaggaggggcagcgagtgttggcagagctggagcaggaacgcccgggggttgtgttgcagcagctgcagctgcactggaccaggcaccctgacttgcctcctgcccacttccgaaagatgtgggctctggccacggggctgggctcagaggccatccgccaggagtgccgctgggcctgggcgcggtgccaggacacctggctggccctggaccaaaagcttgaggcttcactgaagctaccaccggtgggcagcacagctagcctgtgtgtcagccaggtccccgctgcacctgcccaccctcccctgaggaaggcctacagcttcgatcggaatctggggcagagtctcagtgaacctgcctgccactgccaccatgcggccactattgctgcctgccgcagaccagaggctggaggaggtgccctgccccaggcatcccctactgtgcctccaccaggcagctctgaccccaggagcctcaacaggctacagctggtgctggcagagatggtggccacggagcgggagtatgtccgggctctagagtacactatggagaactatttccccgagctggatcgccccgatgtgccccagggcctccgcggtcagcgtgcccacctctttggcaacctggagaagctgcgggacttccactgccacttcttcctgcgtgagctggaggcttgcacccggcacccaccacgagtggcctatgccttcctgcgccatagggtgcagtttgggatgtacgcgctctacagcaagaataagcctcgctccgatgccctgatgtcaagctatgggcacaccttcttcaaggacaagcagcaagcactgggggaccacctggacctggcctcctacctgctaaagcccatccagcgcatgggcaagtacgcactgctgctgcaggagctggcacgggcctgcgggggccccacgcaggagctcagtgcgctgcgggaggcccagagccttgtgcacttccagctgcggcacggaaacgacctgctggccatggacgccatccagggctgtgatgttaacctcaaggaacaggggcagctggtgcgacaggatgagtttgtggtgcgcactgggcgccacaagtccgtgcgccgcatcttcctttttgaggagctgctgctcttcagcaagcctcgccatgggcccacaggggttgacacatttgcctacaagcgctccttcaagatggcagaccttggtctcactgagtgctgtgggaacagcaacctgcgcttcgagatctggttccgccgccgcaaggccagggacacctttgtgctgcaggcctccagcctggctatcaagcaggcctggacagctgacatctcccacctgctttggaggcaggccgtccacaacaaggaggtgcgcatggctgagatggtgtccatgggtgtggggaacaaggccttccgagacattgctcccagcgaggaagccatcaacgaccgcaccgtcaactatgtcctgaagtgccgagaagttcgctctcgggcgtccattgccgtagccccgtttgaccatgacagcctctacctgggggcctcgaactcccttcctggagaccctgcctcttgctctgttctggggtccctcaacctgcacctgtacagagacccagctcttctgggtctccgctgtcccctgtatcccagcttcccagaggaagcagcactggaggctgaggcagagctgggcggccagccctctttgactgctgaggactcagagatctcgtcccaatgcccatcagccagtggctccagtggctctgacagcagctgtgtgtcagggcaggccctgggtaggggcctggaggacttaccctgtgtctgagcccgggactggacgagcagtagatccagcagcctgcagctccaaggaacattgcctctctggatctgctgtgaccagggtgtggctgacacctgggctacctccaacctacatgtgcaacgctgttgactaccctttctgatgtgtgtggccattggactaactggcacggggcctctctagggaagtctggttgtagagcctgaataggctcctggccccatgaccccttctcctgtccccagctcccatcccagttgtgggttaagaataggctagagcagacattgggtgtttccatgctgtaggctggtgggggaccatgtgcctctaggcagtgactagggtgcccccacccctcaggaagaacacaggtgggctcctagcagctgatccccaatgcctggccttaaagccgagctcagttaccatagggacaggtccacctctactgggccctcatgcttgcctttcctggcccccaggcccagcccctttttactggggcagtttcgttattttgacttgatgccttttgaataactttcaatagaattgtctaaaattatcttactggttgttaggcctttggtgtctcagagaaggagtctaggtctttgatgtgtgatttaatcttttatttgtttataataaaaaatagactgatatgtaccctctgatgggcacatgc

SEQ ID NO: 46822 - DNA, 2182 bp, Artificial Sequence
  derived and/or modified sequence
gccctggcactaagactggcacctcctgcggcccatgcccttcgcctgcattgcccactgagtcccactcgactgtcttcagcgcggttcacactgagacccagccctctcccgctggccccgagcaggcccacctttaggagggcgtgatggaaaggcccctggagaatggggatgagtccccagactctcagggccatgccaccgactggagatttgctgtgtgcagtttcagggatgcctgggaagaggaggaacctgcttcccagatgcacgttaaggacccaggtcctccaagaccaccagccggggccacccaggatgaggagctacagggcagccccttgtccaggaaattccagttacccccagctgcagatgagtcgggggatgcccagaggggcacagtagaaagctcctcagtcctgtcagaagggccaggcccctctggagtggagagtctcctatgccccatgtcctcccacctcagcttggcacagggtgagagtgacaccccaggggtagggttggtaggggacccaggtccaagcagggcgatgccatctggcttgagccctggggcattggacagcgaccctgtgggccttggagaccctttatcagaaatatcaaagctgctggaggcaggtaaggaaggctgggctagggaagtctgggaagggaatggggatgcctggagagatgagtgtcaagactttggaggtctctgaccctactcaggctgaagcccgggtccaagtaggggtctctggataggtggtccaaggcagacccaagtcatttcccttcccaagcccccagtggatccggcctccctaagcctgctgactgcctcctggcccaagacctctgttgggagctgctggccagtggtatggccaccttgccagggactcgggatgtccaaggccgggcagtgctgcttctgtgtgcccacagcccagcctggcttcagtctgagtgcagcagccaggaactcatccgcctcctgctgtacctgcgaagcatccccaggcccgaagtacaggcactgggactgacagtgctagttgatgcccgaatttgtgctccaagttcttccctcttctctgggctcagccaactacaagaagcagccccaggggccgtgtaccaggtgctgctagtgggaagcacgctgctgaaggaagtgccttccgggctgcagctggagcagttgccttctcagagcctgctgacccacatcccaacggcggggctgcccacttcgctaggaggaggcctgccttactgccaccaggcctggctggatttccgaaggcttattgccctcaatcacaggaggtcggtcagctgctacagcagacagaggtcctgatgcagcaggtgctagactcgccatggctggcatggctacaatgccaggggggccgggagctgacatggctgaagcaagaggtcccagaggtgaccctgagcccagactacaggacggcaatggacaaggctgacgagctatatgaccgggtggatggattgctgcaccaactgaccctgcagagcaaccagcgaatacaggccctagagttggtccaaacactggaggcccgggaaagcggactgcaccagattgaagtgtggctgcagcaggtgggctggccagcactggaggaggctggggagccctcgctggacatgctgctccaggcccaaggctcttttcaggagctgtaccaggttgcccaggagcaggtcaggcaaggggagaagtttctgcagccgctgactggctgggaggcggctgaactggacccccctggggcacgctttctggccctgcgagcccagctgactgaattctctagggctttggcccagcggtgccagcggctggcggatgctgagaggctgtttcagctcttcagggaggtctgagcccgggactggacgagcagtagatccagcagcctgcagctccaaggaacattgcctctctggatctgctgtgaccagggtgtggctgacacctgggctacctccaacctacatgtgcaacgctgttgactaccctttctgatgtgtgtggccattggactaactggcacggggcctctctagggaagtctggttgtagagcctgaataggctcctggccccatgaccccttctcctgtccccagct

SEQ ID NO: 46823 - DNA, 4566 bp, Artificial Sequence
  derived and/or modified sequence
accctcgctcacccacgcggccttcctggcgggagagcgcttccggcgtcctcgccaggcccggggagtgggcacggtggagctgccgaccgttggtcgctgccccaacccacgcactgcgacgccgcgggcctgaattgcagttcctgtgccctggcactaagactggcacctcctgcggcccatgcccttcgcctgcattgcccactgagtcccactcgactgtcttcagcgcggttcacactgagacccagccctctcccgctggccccgagcaggcccacctttaggagggcgtgatggaaaggcccctggagaatggggatgagtccccagactctcagggccatgccaccgactggagatttgctgtgtgcagtttcagggatgcctgggaagaggaggaacctgcttcccagatgcacgttaaggacccaggtcctccaagaccaccagccggggccacccaggatgaggagctacagggcagccccttgtccaggaaattccagttacccccagctgcagatgagtcgggggatgcccagaggggcacagtagaaagctcctcagtcctgtcagaagggccaggcccctctggagtggagagtctcctatgccccatgtcctcccacctcagcttggcacagggtgagagtgacaccccaggggtagggttggtaggggacccaggtccaagcagggcgatgccatctggcttgagccctggggcattggacagcgaccctgtgggccttggagaccctttatcagaaatatcaaagctgctggaggcagcccccagtggatccggcctccctaagcctgctgactgcctcctggcccaagacctctgttgggagctgctggccagtggtatggccaccttgccagggactcgggatgtccaaggccgggcagtgctgcttctgtgtgcccacagcccagcctggcttcagtctgagtgcagcagccaggaactcatccgcctcctgctgtacctgcgaagcatccccaggcccgaagtacaggcactgggactgacagtgctagttgatgcccgaatttgtgctccaagttcttccctcttctctgggctcagccaactacaagaagcagccccaggggccgtgtaccaggtgctgctagtgggaagcacgctgctgaaggaagtgccttccgggctgcagctggagcagttgccttctcagagcctgctgacccacatcccaacggcggggctgcccacttcgctaggaggaggcctgccttactgccaccaggcctggctggatttccgaaggcggctggaagctctactacagaactgccaggcagcttgtgccctgctccagggggccatcgaaagtgtgaaggctgtgccccagcccatggagcctggggaggtcggtcagctgctacagcagacagaggtcctgatgcagcaggtgctagactcgccatggctggcatggctacaatgccaggggggccgggagctgacatggctgaagcaagaggtcccagaggtgaccctgagcccagactacaggacggcaatggacaaggctgacgagctatatgaccgggtggatggattgctgcaccaactgaccctgcagagcaaccagcgaatacaggccctagagttggtccaaacactggaggcccgggaaagcggactgcaccagattgaagtgtggctgcagcaggtgggctggccagcactggaggaggctggggagccctcgctggacatgctgctccaggcccaaggctcttttcaggagctgtaccaggttgcccaggagcaggtcaggcaaggggagaagtttctgcagccgctgactggctgggaggcggctgaactggacccccctggggcacgctttctggccctgcgagcccagctgactgaattctctagggctttggcccagcggtgccagcggctggcggatgctgagaggctgtttcagctcttcagggaggccttgacgtgggctgaggaggggcagcgagtgttggcagagctggagcaggaacgcccgggggttgtgttgcagcagctgcagctgcactggaccaggcaccctgacttgcctcctgcccacttccgaaagatgtgggctctggccacggggctgggctcagaggccatccgccaggagtgccgctgggcctgggcgcggtgccaggacacctggctggccctggaccaaaagcttgaggcttcactgaagctaccaccggtgggcagcacagctagcctgtgtgtcagccaggtccccgctgcacctgcccaccctcccctgaggaaggcctacagcttcgatcggaatctggggcagagtctcagtgaacctgcctgccactgccaccatgcggccactattgctgcctgccgcagaccagaggctggaggaggtgccctgccccaggcatcccctactgtgcctccaccaggcagctctgaccccaggagcctcaacaggctacagctggtgctggcagagatggtggccacggagcgggagtatgtccgggctctagagtacactatggagaactatttccccgagctggatcgccccgatgtgccccagggcctccgcggtcagcgtgcccacctctttggcaacctggagaagctgcgggacttccactgccacttcttcctgcgtgagctggaggcttgcacccggcacccaccacgagtggcctatgccttcctgcgccatagggtgcagtttgggatgtacgcgctctacagcaagaataagcctcgctccgatgccctgatgtcaagctatgggcacaccttcttcaaggacaagcagcaagcactgggggaccacctggacctggcctcctacctgctaaagcccatccagcgcatgggcaagtacgcactgctgctgcaggagctggcacgggcctgcgggggccccacgcaggagctcagtgcgctgcgggaggcccagagccttgtgcacttccagctgcggcacggaaacgacctgctggccatggacgccatccagggctgtgatgttaacctcaaggaacaggggcagctggtgcgacaggatgagtttgtggtgcgcactgggcgccacaagtccgtgcgccgcatcttcctttttgaggagctgctgctcttcagcaagcctcgccatgggcccacaggggttgacacatttgcctacaagcgctccttcaagatggcagaccttggtctcactgagtgctgtgggaacagcaacctgcgcttcgagatctggttccgccgccgcaaggccagggacacctttgtgctgcaggcctccagcctggctatcaagcaggcctggacagctgacatctcccacctgctttggaggcaggccgtccacaacaaggaggtgcgcatggctgagatggtgtccatgggtgtggggaacaaggccttccgagacattgctcccagcgaggaagccatcaacgaccgcaccgtcaactatgtcctgaagtgccgagaagttcgctctcgggcgtccattgccgtagccccgtttgaccatgacagcctctacctgggggcctcgaactcccttcctggagaccctgcctcttgctctgttctggggtccctcaacctgcacctgtacagagacccagctcttctgggtctccgctgtcccctgtatcccagcttcccagaggaagcagcactggaggctgaggcagagctgggcggccagccctctttgactgctgaggactcagagatctcgtcccaatgcccatcagccagtggctccagtggctctgacagcagctgtgtgtcagggcaggccctgggtaggggcctggaggacttaccctgtgtctgagcccgggactggacgagcagtagatccagcagcctgcagctccaaggaacattgcctctctggatctgctgtgaccagggtgtggctgacacctgggctacctccaacctacatgtgcaacgctgttgactaccctttctgatgtgtgtggccattggactaactggcacggggcctctctagggaagtctggttgtagagcctgaataggctcctggccccatgaccccttctcctgtccccagctcccatcccagttgtgggttaagaataggctagagcagacattgggtgtttccatgctgtaggctggtgggggaccatgtgcctctaggcagtgactagggtgcccccacccctcaggaagaacacaggtgggctcctagcagctgatccccaatgcctggccttaaagccgagctcagttaccatagggacaggtccacctctactgggccctcatgcttgcctttcctggcccccaggcccagcccctttttactggggcagtttcgttattttgacttgatgccttttgaataactttcaatagaattgtctaaaattatcttactggttgttaggcctttggtgtctcagagaaggagtctaggtctttgatgtgtgatttaatcttttatttgtttataataaaaaatagactgatatgtaccctctgatgggcacatgc

SEQ ID NO: 46824 - DNA, 3576 bp, Artificial Sequence
  derived and/or modified sequence
atggaacggcctctggaaaacggagacgaatctccagattcccagggtcatgccacggattggaggttcgctgtctgctccttccgtgacgcttgggaggaagaagagcctgctagccagatgcatgttaaggatccaggaccgcctcgaccaccagcgggtgccacacaagacgaggagctgcaaggcagccctttgtcacggaagttccaactaccaccagccgctgatgaatccggagacgctcagcgaggtaccgtggagtcaagctccgtccttagtgaaggacctggaccatccggcgtggaaagcctgttgtgtcccatgtcgagccacctgagtctggcccagggcgagtcagatacaccaggagtaggcttggtgggcgaccctggcccttctagggcaatgccatcgggattgtctcccggagccttggattcagatcccgtaggcctgggcgacccattaagcgaaatcagcaagctgctagaagcggctccctccggcagtggcctccccaagccagctgactgtttgttagcccaggacttgtgctgggagctcctggcttcaggtatggctaccctgcctggcaccagagatgtgcagggaagagctgtgctactcctgtgcgctcattcacctgcatggctgcagagcgagtgttccagccaggaacttatccggctgttgctctacctgcgctcaatccccagaccagaagtgcaggctttgggcctcactgttctcgtggatgctcggatttgcgcccctagctcaagcctcttctccggactctcccagcttcaggaagccgcacccggagctgtgtaccaggtgctgctggtaggaagcactttgttaaaagaggtcccgtcaggcctgcagttggaacagctacctagccagagcctgctgacgcatattccaacagctggtctaccaacctcactggggggagggttaccttactgtcaccaagcgtggctagacttccgtcggcgattagaggctctgctgcagaactgccaggccgcatgcgccctgctacagggggctatcgaatccgtgaaagccgttccccagcccatggagcctggggaggtgggacagctccttcagcagaccgaagttctcatgcaacaagtccttgatagtccatggctagcctggctgcagtgccaaggcggtcgcgaactcacctggcttaaacaagaggtgcctgaagtaacactaagccctgactacagaacggccatggataaggctgatgagctctatgacagagtggacggactgctccaccagcttaccctccagtccaatcaacgcatccaggccttagagctggttcagaccctggaagccagggagagcggactgcaccaaattgaagtttggctgcaacaggttggttggccagcactggaggaggctggggaacctagcctggacatgctgttgcaggctcagggatccttccaagagctctatcaagtggcacaggagcaggtacggcagggcgagaagttcctgcagcctctgaccgggtgggaagctgccgagctggatccacccggtgcccgattccttgctctccgtgcacagctcactgaattttcgcgggcactggcacaaaggtgccagagactggccgatgccgaacgactttttcagctgtttcgagaggctctgacttgggctgaggagggacagcgcgttctggctgagctcgagcaggaacgtcccggagtggtgttgcagcaactacaacttcactggacaaggcacccagacctgcctcccgctcacttccggaaaatgtgggcgcttgccaccggcctcgggtccgaggcaatccgccaggagtgtcgatgggcatgggcccgatgccaggacacatggttggcgttggaccagaagctcgaagccagccttaagcttcctcccgtaggctctacggcctctctttgcgtgtcacaggtgcccgctgccccagcgcaccctccactgcgcaaagcttactcctttgatcggaatctgggacaatcgcttagtgaaccagcctgtcattgtcaccatgctgctactatagcagcctgccggaggcctgaagcaggagggggagctctgccccaggcaagcccaactgtgcccccacccggttccagcgaccctcgcagccttaaccggctgcagctggtactagcagagatggtggcaacggaaagggaatacgtgagagctctcgaatacactatggagaattactttccagaactggaccggccagacgtgcctcagggcttgcgaggccaaagagcacacctattcggcaatctggagaaacttcgagactttcactgccacttctttctgcgggagctggaggcttgcaccagacatcctccgcgagtggcctatgcctttctaaggcacagagtgcaattcggcatgtatgcactttactccaaaaataagcctcggagcgacgccctgatgtctagctatggacatactttcttcaaagataagcagcaagctctcggcgaccacctggatctcgcatcataccttctgaaacccatccaacggatgggcaagtatgccctgctgctccaggaactcgctcgcgcatgtggtgggcctacacaggaactttccgcactgagggaagcccaaagtcttgttcactttcagctgagacatgggaatgacctgctcgccatggatgccatccagggttgtgacgttaacctaaaggagcagggacaacttgttcgtcaggatgagtttgtcgtccggacaggtaggcacaaatcagtcaggcggatcttcctgtttgaggagctgctgctgttctcgaaaccgaggcatgggcctacgggcgtggatacgttcgcctacaagagatcctttaaaatggcggacctgggcttaacggaatgttgcgggaatagcaatctgagatttgagatctggttccggaggagaaaggctagagatacatttgtgcttcaagcatcaagtctggctatcaagcaagcgtggaccgcggatatctcccatttactgtggaggcaggctgtgcacaataaggaggtccgtatggccgaaatggtatccatgggggtaggtaacaaggcctttcgggatattgcgccaagtgaggaggccatcaatgaccggaccgttaactacgtactgaagtgtcgagaagtgcgcagtcgcgcaagtatcgctgttgcccctttcgaccacgatagcctgtacctcggcgcatcgaactccctgcccggtgatccagcatcttgcagcgtcctaggatctctgaacctccacttgtacagggaccccgcactgttaggcttgagatgtccactgtacccatcctttccagaagaagcagccctagaggcagaggcagaattaggagggcagccatccttaacggctgaggacagcgagatctcctctcaatgtccttccgcatccggatcctcggggtcagattcatcatgtgtctcaggacaggcactggggaggggcctggaggatctgccgtgcgtctag

SEQ ID NO: 46825 - DNA, 3576 bp, Artificial Sequence
  derived and/or modified sequence
atggagcggccactagagaacggtgatgagtcacctgattcccaaggccatgccactgactggagattcgccgtgtgttcctttcgcgacgcttgggaggaagaggaaccagcctcacagatgcacgtcaaggatcccggacctcctcggcctcccgcaggagcaacccaagatgaggaactccagggaagccccctctcacggaaattccaactaccacccgctgccgacgagtctggtgacgctcagcggggaaccgtcgaatcgtctagcgttcttagtgaaggccctggtccctcaggagtcgagtccctgctctgtccaatgtcatctcacctgtcccttgcccagggcgagtctgatactccgggagtgggccttgtgggcgaccccggtccctctagggccatgccttcaggactgtctcctggcgcattggatagtgacccagtcggcctgggggaccccctgagcgaaatctccaagctgcttgaggcagcccctagcggatctggcctccccaagcctgccgattgccttctggcccaggacctctgttgggaattactcgcatctggcatggccactttgcccggtactcgggacgtgcagggacgtgcggttttgttgctctgtgctcattcaccagcatggctgcagagtgagtgttcctcacaggagcttattcggctgctcctgtacctgagaagcataccacggcctgaagtgcaggcccttggcctcactgttctggtagacgctagaatctgtgctccatcaagctcattgttcagcggcctgagtcagctccaggaagccgcacccggtgccgtgtaccaggtcctattagtgggaagtacccttctaaaggaggttcctagtggtcttcagctggagcaactgccttcccagtctctcctgacacacataccaacagccggattgcctacatctttgggcggaggtcttccatactgtcatcaggcatggctggacttccgcagaagactcgaggccctcctgcagaattgtcaggctgcttgcgctctgctgcagggggcaattgaatctgtgaaagctgttccccagcctatggagcctggtgaagtagggcagctcctgcagcaaaccgaagtcctgatgcagcaggtgctggatagcccctggttagcctggctgcagtgtcaagggggtagggagctgacgtggctgaaacaggaggtcccagaagtgacattatctccggattataggaccgccatggacaaggctgatgagctgtatgacagagtcgacggcctcctacatcagttaactctgcagtcgaatcagagaattcaggcgctggaattagttcaaactctggaagctagagagagcggattacaccaaattgaggtgtggctgcagcaggtgggttggccagcactcgaagaagcgggtgaaccgtcgctggatatgctcctgcaggctcagggatcattccaagagctctatcaggttgcccaagagcaggtacgccagggggaaaaatttcttcagccgttgacaggctgggaggccgcagaactcgaccctcctggcgcaagattcctggcactgcgggcacagctgacggagttttcccgagcgctcgctcaaaggtgccagagactggccgacgctgaacggctgttccaactttttcgggaggcactgacatgggcagaggagggccagagagttcttgcggaattggaacaggagcgccctggagtggtgctgcagcagttacagctgcattggacacgacatcctgatctaccacctgcccactttagaaaaatgtgggccttggcaacaggtctgggatctgaagccatccgtcaagaatgcaggtgggcgtgggctagatgtcaagacacttggcttgctttggaccaaaagcttgaggcaagccttaaacttcccccagttggttcgacagctagcctgtgcgtcagccaggtgcctgctgcacccgctcacccgcctctcaggaaggcctacagctttgatcgtaaccttggccagtcgctcagcgaacccgcttgccactgccaccacgccgcaacgatcgcagcttgccgcaggcctgaagcaggtggcggagctctgccacaagctagtcctacagtgcctccacctggctctagtgacccacgcagcctcaatcgcctacagttggtactagccgaaatggttgcgacagagcgtgaatatgttcgagcactggagtacactatggaaaactattttccagagctggatagacccgacgtgccacagggcctgaggggccaaagagcccacctgttcggaaatctcgagaaactgagggatttccactgccactttttcttacgcgagttagaggcttgtacaaggcacccacccagggttgcttacgctttcctgagacacagagtgcagttcggaatgtacgccttatactccaagaataaaccgaggtctgatgccctgatgtcctcctatggccacaccttcttcaaggataagcagcaagcgctgggagaccacttggatttggcctcgtacttgctgaagcctatacagagaatgggcaagtatgccctgttgctgcaggaactggccagggcctgtgggggacccactcaggagctgagtgctctgagagaagcccagtctttagtgcattttcagctaaggcacgggaacgatctgttagctatggacgctatccaggggtgtgatgttaatctgaaagaacaaggtcaactggtccgacaggatgaattcgttgtgcggacaggacgtcataaatcagtgcgacgtatcttccttttcgaagaacttttgcttttttcaaaaccaaggcacggcccaaccggtgtggacacttttgcatataagaggagtttcaagatggcagacttgggactcacagaatgttgcggcaattccaatcttcgctttgagatctggttccgcaggaggaaagctagagataccttcgttctgcaggcgtccagtctggctatcaaacaagcttggaccgccgacatcagccatttgctctggcgtcaggcagttcacaataaagaagtgagaatggctgagatggtttccatgggcgtggggaataaggccttcagagatatcgcgccttctgaagaagccatcaacgacaggacagtcaactacgttttgaaatgccgtgaggtgcggtctcgagcctccattgcagtcgctccgtttgatcatgacagtttgtatctgggcgcatctaatagcctgccaggcgatcctgcctcatgctctgtcctcgggtccctgaatctccacctgtatagagacccagccctgttaggtttgcggtgtccactgtatccgtccttcccagaagaggccgctctcgaggccgaagctgaacttggcggacaaccaagcctcacagccgaggactccgagatctctagccagtgtccctctgctagcgggtcctccggatccgattctagttgcgtgtccggccaggcactggggcgtggtctggaggatttgccatgtgtgtag

SEQ ID NO: 46826 - DNA, 3576 bp, Artificial Sequence
  derived and/or modified sequence
atggagcggcctctggaaaatggtgacgagagcccggacagtcagggccatgctaccgattggcggtttgccgtgtgttcattccgagacgcctgggaggaggaagagcctgcctcgcagatgcatgtgaaagaccctgggcctccaaggcctcccgcaggagcgacacaggatgaagagttgcagggcagccccttgtccagaaaattccagctccctcccgctgccgatgagagcggggatgcccagagaggcaccgtggaatcaagcagtgtccttagcgaggggcctggacccagtggcgtcgagagtctactctgtcccatgagtagtcacttgtccctggcccaaggcgagtcagacaccccaggagtgggtctggttggggaccccggtccgagtcgggctatgcccagtgggctgtcaccaggggcactcgatagcgatcctgttgggctcggtgatccgctgagtgaaatctctaaactgctcgaagcggcaccatccgggagtgggctgccaaagcccgcagactgtttacttgcgcaggacctttgctgggaactcctggcctctggcatggcaaccctgcctggcacccgcgatgttcaggggagagcagtgttactactctgcgctcatagtccagcctggctgcaatcggagtgtagtagccaggaactcattcggctgctgctttatttaaggtcaatcccaaggcctgaggtacaggccttaggactgacagtgctggttgacgccaggatttgcgccccatcctcttccctgttttccggattatcccagttgcaagaggctgcgcctggcgcagtctaccaagtcctgctcgttggctctacgcttctgaaggaagtgccctcgggccttcagctcgaacagttacccagccaaagcctcctgacccacattcccactgctggcttacccacttctttggggggaggcctcccatactgtcatcaagcttggttagattttcgtcgaagacttgaagccctgctgcagaactgccaagctgcatgcgccttgctccagggagccatagaaagcgtgaaagcagtgcctcagccaatggaaccgggtgaggtcgggcaacttctacagcagacggaggtactcatgcagcaagtgctcgattctccgtggttggcatggttgcagtgccaaggagggagagagcttacttggctcaaacaggaggttcccgaggtgacacttagcccggactacagaacagccatggataaggccgatgagctttacgatagggtggatggcctgctgcaccagctaactctgcagtctaaccagaggatacaggccctcgagttggtacagaccttggaagccagggaaagcggcctgcatcagatcgaggtgtggctgcagcaagtgggatggccagcactcgaagaggcaggagaaccttccttggacatgcttctgcaggcccagggctctttccaggagttataccaagttgctcaggagcaggtgcgccagggcgagaagttcctgcaaccattgactggatgggaggccgctgagctggacccacccggagccagattcctggctctcagagcccagctgacggagttctctcgagcccttgcacaaaggtgccaacgcctggcggacgctgagaggctctttcaactcttcagggaagcactgacctgggctgaggagggccagcgggtgctggcagagttagagcaagaaagaccaggggtggtactccagcagctgcagttgcactggacccggcaccctgatctgcccccagcgcacttcagaaagatgtgggcacttgctaccggcctggggagcgaggccatccggcaggagtgtcgatgggcatgggctcggtgtcaggatacttggctggccctcgatcagaagctggaagcgagcttgaaattgccccctgtgggcagcactgcatcattgtgtgtatcacaggtgccggcagccccagcccacccaccactgaggaaggcttatagttttgaccgcaatctgggtcaaagtctgtctgagcctgcctgccactgtcaccacgccgcaacaattgcagcctgcagacgccctgaagccggaggaggtgccctccctcaagccagcccgacggtcccaccgccaggatcttccgatcctagatcacttaaccgcttgcagcttgtgcttgcagagatggttgccacagaaagggaatatgtgcgagccctggaatataccatggagaactattttcctgaattagataggccagatgtccctcaaggcctgagaggacagcgggctcacctgttcggcaatttagagaagctccgcgactttcactgccactttttcctgcgagagctcgaggcctgcaccagacacccgcctcgggttgcttacgctttcctgcgacatcgtgtccagttcggtatgtatgccctgtacagcaaaaacaagccacgctctgatgctttgatgtcgtcctatggccataccttcttcaaggacaagcagcaggcacttggcgatcacctcgatctggctagctacttgctcaaacccatccagcgcatgggcaaatatgcattacttctgcaggaactcgcacgtgcttgcggagggccaactcaggaactctccgctcttcgggaagcccaaagtcttgtgcactttcagcttcgacacggaaatgatctgctggcgatggatgctatacagggatgcgatgtcaacctgaaagagcaggggcagctggtgagacaggatgaattcgttgttcgcactggaagacataagtcagtgagaagaatcttcctttttgaagagttgttgctcttctctaagcccagacacggccctacaggggtggacaccttcgcctacaagcgaagcttcaagatggctgacttggggttgaccgagtgctgtgggaacagcaatctcaggtttgaaatctggtttcggagacgcaaagcgagggatacctttgtgctgcaggcttcaagcctggcaatcaagcaagcatggaccgcagatatctcacacctactgtggagacaggctgtgcataataaggaggtcagaatggccgagatggtgagcatgggggtcggtaacaaggcgtttcgcgacattgcccctagcgaggaagccatcaatgaccgcactgtcaactatgtgctgaagtgccgcgaagtgagaagccgcgcatccattgccgtggccccattcgatcatgactctctgtatctgggagcgtctaattccctccctggcgacccagcctcctgtagcgtcctgggctcccttaatcttcacttgtaccgggacccagcccttctggggctgcgctgtccactctacccgtctttcccagaagaagccgcactggaagccgaggccgagctggggggtcagccgagccttacagctgaggattccgagatttcgtcacagtgtccctctgccagcggcagttctggatcggattcctcctgtgtcagcggccaagccctggggagaggtcttgaagatcttccctgtgtgtag

SEQ ID NO: 46827 - DNA, 3576 bp, Artificial Sequence
  derived and/or modified sequence
atggagagacccctggagaacggcgacgagagccccgacagccagggccacgccaccgactggagattcgccgtgtgcagcttcagagacgcctgggaggaggaggagcccgccagccagatgcacgtgaaggaccccggcccccccagaccccccgccggcgccacccaggacgaggagctgcagggcagccccctgagcagaaagttccagctgccccccgccgccgacgagagcggcgacgcccagagaggcaccgtggagagcagcagcgtgctgagcgagggccccggccccagcggcgtggagagcctgctgtgccccatgagcagccacctgagcctggcccagggcgagagcgacacccccggcgtgggcctggtgggcgaccccggccccagcagagccatgcccagcggcctgagccccggcgccctggacagcgaccccgtgggcctgggcgaccccctgagcgagatcagcaagctgctggaggccgcccccagcggcagcggcctgcccaagcccgccgactgcctgctggcccaggacctgtgctgggagctgctggccagcggcatggccaccctgcccggcaccagagacgtgcagggcagagccgtgctgctgctgtgcgcccacagccccgcctggctgcagagcgagtgcagcagccaggagctgatcagactgctgctgtacctgagaagcatccccagacccgaggtgcaggccctgggcctgaccgtgctggtggacgccagaatctgcgcccccagcagcagcctgttcagcggcctgagccagctgcaggaggccgcccccggcgccgtgtaccaggtgctgctggtgggcagcaccctgctgaaggaggtgcccagcggcctgcagctggagcagctgcccagccagagcctgctgacccacatccccaccgccggcctgcccaccagcctgggcggcggcctgccctactgccaccaggcctggctggacttcagaagaagactggaggccctgctgcagaactgccaggccgcctgcgccctgctgcagggcgccatcgagagcgtgaaggccgtgccccagcccatggagcccggcgaggtgggccagctgctgcagcagaccgaggtgctgatgcagcaggtgctggacagcccctggctggcctggctgcagtgccagggcggcagagagctgacctggctgaagcaggaggtgcccgaggtgaccctgagccccgactacagaaccgccatggacaaggccgacgagctgtacgacagagtggacggcctgctgcaccagctgaccctgcagagcaaccagagaatccaggccctggagctggtgcagaccctggaggccagagagagcggcctgcaccagatcgaggtgtggctgcagcaggtgggctggcccgccctggaggaggccggcgagcccagcctggacatgctgctgcaggcccagggcagcttccaggagctgtaccaggtggcccaggagcaggtgagacagggcgagaagttcctgcagcccctgaccggctgggaggccgccgagctggacccccccggcgccagattcctggccctgagagcccagctgaccgagttcagcagagccctggcccagagatgccagagactggccgacgccgagagactgttccagctgttcagagaggccctgacctgggccgaggagggccagagagtgctggccgagctggagcaggagagacccggcgtggtgctgcagcagctgcagctgcactggaccagacaccccgacctgccccccgcccacttcagaaagatgtgggccctggccaccggcctgggcagcgaggccatcagacaggagtgcagatgggcctgggccagatgccaggacacctggctggccctggaccagaagctggaggccagcctgaagctgccccccgtgggcagcaccgccagcctgtgcgtgagccaggtgcccgccgcccccgcccacccccccctgagaaaggcctacagcttcgacagaaacctgggccagagcctgagcgagcccgcctgccactgccaccacgccgccaccatcgccgcctgcagaagacccgaggccggcggcggcgccctgccccaggccagccccaccgtgcccccccccggcagcagcgaccccagaagcctgaacagactgcagctggtgctggccgagatggtggccaccgagagagagtacgtgagagccctggagtacaccatggagaactacttccccgagctggacagacccgacgtgccccagggcctgagaggccagagagcccacctgttcggcaacctggagaagctgagagacttccactgccacttcttcctgagagagctggaggcctgcaccagacacccccccagagtggcctacgccttcctgagacacagagtgcagttcggcatgtacgccctgtacagcaagaacaagcccagaagcgacgccctgatgagcagctacggccacaccttcttcaaggacaagcagcaggccctgggcgaccacctggacctggccagctacctgctgaagcccatccagagaatgggcaagtacgccctgctgctgcaggagctggccagagcctgcggcggccccacccaggagctgagcgccctgagagaggcccagagcctggtgcacttccagctgagacacggcaacgacctgctggccatggacgccatccagggctgcgacgtgaacctgaaggagcagggccagctggtgagacaggacgagttcgtggtgagaaccggcagacacaagagcgtgagaagaatcttcctgttcgaggagctgctgctgttcagcaagcccagacacggccccaccggcgtggacaccttcgcctacaagagaagcttcaagatggccgacctgggcctgaccgagtgctgcggcaacagcaacctgagattcgagatctggttcagaagaagaaaggccagagacaccttcgtgctgcaggccagcagcctggccatcaagcaggcctggaccgccgacatcagccacctgctgtggagacaggccgtgcacaacaaggaggtgagaatggccgagatggtgagcatgggcgtgggcaacaaggccttcagagacatcgcccccagcgaggaggccatcaacgacagaaccgtgaactacgtgctgaagtgcagagaggtgagaagcagagccagcatcgccgtggcccccttcgaccacgacagcctgtacctgggcgccagcaacagcctgcccggcgaccccgccagctgcagcgtgctgggcagcctgaacctgcacctgtacagagaccccgccctgctgggcctgagatgccccctgtaccccagcttccccgaggaggccgccctggaggccgaggccgagctgggcggccagcccagcctgaccgccgaggacagcgagatcagcagccagtgccccagcgccagcggcagcagcggcagcgacagcagctgcgtgagcggccaggccctgggcagaggcctggaggacctgccctgcgtgtag

SEQ ID NO: 46828 - protein, 1110 aa, Artificial Sequence
  derived and/or modified sequence
MERPLENGDESPDSQGHATDWRFAVCSFRDAWEEEEPASQMHVKDPGPPRPPAGATQDEELQGSPLSRKFQLPPAADESGDAQRGTVESSSVLSEGPGPSGVESLLCPMSSHLSLAQGTRDVQGRAVLLLCAHSPAWLQSECSSQELIRLLLYLRSIPRPEVQALGLTVLVDARICAPSSSLFSGLSQLQEAAPGAVYQVLLVGSTLLKEVPSGLQLEQLPSQSLLTHIPTAGLPTSLGGGLPYCHQAWLDFRRRLEALLQNCQAACALLQGAIESVKAVPQPMEPGEVGQLLQQTEVLMQQVLDSPWLAWLQCQGGRELTWLKQEVPEVTLSPDYRTAMDKADELYDRVDGLLHQLTLQSNQRIQALELVQTLEARESGLHQIEVWLQQVGWPALEEAGEPSLDMLLQAQGSFQELYQVAQEQVRQGEKFLQPLTGWEAAELDPPGARFLALRAQLTEFSRALAQRCQRLADAERLFQLFREALTWAEEGQRVLAELEQERPGVVLQQLQLHWTRHPDLPPAHFRKMWALATGLGSEAIRQECRWAWARCQDTWLALDQKLEASLKLPPVGSTASLCVSQVPAAPAHPPLRKAYSFDRNLGQSLSEPACHCHHAATIAACRRPEAGGGALPQASPTVPPPGSSDPRSLNRLQLVLAEMVATEREYVRALEYTMENYFPELDRPDVPQGLRGQRAHLFGNLEKLRDFHCHFFLRELEACTRHPPRVAYAFLRHRVQFGMYALYSKNKPRSDALMSSYGHTFFKDKQQALGDHLDLASYLLKPIQRMGKYALLLQELARACGGPTQELSALREAQSLVHFQLRHGNDLLAMDAIQGCDVNLKEQGQLVRQDEFVVRTGRHKSVRRIFLFEELLLFSKPRHGPTGVDTFAYKRSFKMADLGLTECCGNSNLRFEIWFRRRKARDTFVLQASSLAIKQAWTADISHLLWRQAVHNKEVRMAEMVSMGVGNKAFRDIAPSEEAINDRTVNYVLKCREVRSRASIAVAPFDHDSLYLGASNSLPGDPASCSVLGSLNLHLYRDPALLGLRCPLYPSFPEEAALEAEAELGGQPSLTAEDSEISSQCPSASGSSGSDSSCVSGQALGRGLEDLPCV

SEQ ID NO: 46829 - DNA, 177 bp, Artificial Sequence
  derived and/or modified sequence
atgccaaatcgccacaagactaaagaccagactcttctgcctgcgcagcagtatatttggctcctgaacagtcatacccagatgactgctcccgtgcctcagttcaaactttctgagactgcctccctgctttgcaagcggaagatctccacggctatgagttcaacgtgcctctag

SEQ ID NO: 46830 - DNA, 3333 bp, Artificial Sequence
  derived and/or modified sequence
atggagcgcccgttagagaatggcgatgagtctcctgactctcagggtcacgcaactgattggaggttcgcagtgtgtagctttagagacgcgtgggaggaagaggaacctgcctcacagatgcacgtgaaggatcctggtcccccccggcctccagccggcgctacccaagacgaggagctgcaggggagcccactgagtagaaaatttcagctgccccccgctgctgacgagagcggagacgcacagagaggaactgtggagtcatcctccgtcctgtccgagggccctggacccagcggggtggaatctttgttgtgccctatgtcctctcacctaagcctagcccagggcaccagggacgttcagggccgggcggtcctgttgctgtgcgctcattctcccgcatggctgcagtctgagtgctctagccaggagctcattcgactgctgctatatttgcgttccatcccacgcccagaggttcaggctcttggacttactgtgttggttgatgcaaggatctgcgcaccttcatcaagcctgttcagtggtttatcccagctccaagaagctgctccgggcgcagtgtatcaggtgctccttgtagggagcacccttctgaaagaggtaccctcaggactgcagctcgagcaattacccagccagagtctgctaacacacatcccaaccgcagggctgccaacctcattagggggaggtttaccttactgccatcaggcatggctggactttagaagacgccttgaggcccttttgcagaattgccaggcagcctgcgccctgctgcaaggtgctatcgaatctgtcaaagcggttcctcagccaatggagcctggagaggttgggcaactgctgcagcaaacagaggtcttgatgcagcaggtcttggactcgccttggctggcctggctacagtgtcagggggggagggagctaacatggctcaaacaagaagttccagaggtcacactgtcccccgactacaggactgcgatggataaagcagacgagctctacgatcgggttgacgggttattgcaccagctaaccctgcagtcaaaccaacgtatccaggctctcgagcttgtccagaccttggaagcccgggagagcggcctgcaccagattgaggtttggctgcaacaggtgggctggcccgccctagaagaggcaggtgaacctagtttggatatgctcttgcaggcccagggctcctttcaagagctctaccaggttgctcaagagcaggtccgccagggggaaaagttcttacagcctctgaccggatgggaagcagccgaactggatcccccaggggccagatttctagctctgcgggcccaactcacggagtttagcagggctctagcacaaaggtgccagcgactggctgacgccgagcggctctttcagctgttccgcgaagctctaacttgggccgaggaggggcagcgggtactcgccgagctggagcaagaacgccccggtgtggtgctccagcagttacagctccactggacccgtcaccccgatcttcctcccgcccactttaggaaaatgtgggccttggctacggggctgggaagcgaagccataaggcaggaatgccggtgggcatgggctagatgccaagacacttggcttgccctggaccaaaaattagaagcttcgttgaaactgcccccggtgggcagtaccgcatccctctgcgttagccaggtccccgcagctcctgcccacccaccattgaggaaggcttacagttttgacaggaacctcgggcaatcgctgtcagagccagcctgccactgccatcatgctgctacaatcgccgcatgccgccgccctgaagccggagggggcgccctcccccaggcaagtccaactgtcccgcctccaggatcaagtgatcctcgcagtctgaaccggcttcagttggtcctggcagaaatggttgcgaccgagcgcgagtatgtccgtgcactcgagtacaccatggagaattacttcccggaactagaccgccccgatgtgccccagggcctgcggggtcaacgtgcccacctctttgggaatcttgagaaactgcgggactttcactgtcatttctttttgagggaactagaggcatgcacaagacaccctccgagagtggcctatgctttcctgagacatcgcgtgcagttcgggatgtatgccttgtattctaagaacaaaccacgctccgacgcccttatgagttcctacggacacaccttttttaaggataagcagcaggctcttggggaccacctcgacctcgcatcatatctcctgaagccgattcaacgcatggggaaatacgcccttcttttgcaggaactggctcgtgcctgtgggggcccaactcaagaactgtcagctctgcgagaagcccagtctcttgtccacttccagctccgccacgggaacgacctcttagcaatggacgccatacaaggttgtgatgtcaaccttaaggaacagggccagttggtaaggcaagacgaattcgtggtaagaacgggtaggcacaagagtgtacggcgaattttcctcttcgaggaactgctgctcttcagcaaaccacggcacggacccacgggggttgatacatttgcgtacaagcgctcctttaagatggctgacttggggctgacggaatgctgcggcaattcaaatttaaggtttgagatttggttcagacgcagaaaagcccgcgatacattcgtgctgcaagcatcttctctggccattaaacaggcatggacggcagatatctctcacctgttatggagacaggcggttcacaacaaagaggtgagaatggccgagatggtaagtatgggtgtgggcaacaaggctttcagggacatagctccttccgaggaggccataaacgatcgcacagtgaattacgtcctcaaatgccgagaagtccgttccagagcctcaatcgccgtggcgccattcgatcatgactctctgtacttgggcgccagcaatagtctccctggcgatccagcatcttgtagtgtgttgggcagtctcaatctacatttataccgggacccagctctgctaggactgagatgccccctgtaccccagttttcccgaggaggctgccctcgaagcagaagccgaactgggtgggcagccaagtcttacagcggaggattctgaaatttcctcacaatgtcccagtgctagcggcagcagtggctctgatagcagttgcgttagcggacaggccctaggcaggggcctggaggacctcccttgcgtctag

SEQ ID NO: 46831 - DNA, 3333 bp, Artificial Sequence
  derived and/or modified sequence
atggagcggcccctggagaatggagatgagagcccagacagccagggccacgccacagactggaggtttgctgtgtgcagcttcagagatgcctgggaggaggaggagcccgccagccagatgcacgtgaaggaccccggcccccccaggcctcctgctggggccacccaggatgaggagctgcagggcagccccctgagcaggaagttccagctgcccccagctgctgatgaaagtggagatgcccagaggggcaccgtggagagcagctctgtgctgtctgagggccctggccccagcggcgtggagagcctgctgtgccccatgagcagccacctgagcctggcccagggcaccagagatgtgcagggccgggctgtgctgctgctgtgtgcccacagccctgcctggctgcagagtgaatgtagcagccaggagctgatccggctgctgctgtacctgcggagcatccccaggcctgaggtgcaggccctgggcctgactgtgctggtggatgcccgcatctgtgcccccagcagcagcctcttcagcggcctgagccagctgcaggaggccgcccctggagctgtgtaccaggtgctgctggtgggcagcaccctgctgaaggaggtgcccagcggcctgcagctggagcagctgcccagccagagcctgctgacccacatccccacagctggcctgcccaccagcctgggcggcggcctgccctactgccaccaggcctggctggacttcagaagaaggctggaggccctgctgcagaactgccaggccgcctgtgccctgctgcagggcgccatcgagagcgtgaaggctgtgccccagcccatggagcccggggaggtgggccagctgctgcagcagacagaggtgctgatgcagcaggtgctggacagcccctggctggcctggctgcagtgccagggcggccgggagctgacctggctgaagcaggaggtgcctgaggtgaccctgagcccagactacagaacagccatggacaaggcagatgagctgtatgacagagtggatggcctgctgcaccagctgaccctgcagagcaaccagaggatccaggccctggagctggtgcagaccctggaggcccgggagagcggcctgcaccagatcgaggtgtggctgcagcaggtgggctggccagccctggaggaggccggggagcccagcctggacatgctgctgcaggcccagggcagcttccaggagctgtaccaggtggcccaggagcaggtgcggcagggcgagaagttcctgcagcccctgaccggctgggaggccgctgagctggaccccccaggggcccgcttcctggccctgcgggcccagctgacagagttcagccgggccctggcccagcgctgccagaggctggctgatgctgagcggctcttccagctgttccgggaggccctgacctgggccgaggagggccagagggtgctggccgagctggagcaggagaggcctggggtggtgctgcagcagctgcagctgcactggaccaggcacccagacctgcccccagcccacttcaggaagatgtgggccctggccaccggcctgggcagcgaggccatccggcaggagtgccgctgggcctgggcccgctgccaggacacctggctggccctggaccagaagctggaggccagcctgaagctgccccctgtgggcagcacagccagcctgtgtgtgtcccaggtgcctgctgccccagcccacccccccctgaggaaggcctacagctttgacaggaacctgggccagagcctgtctgagcccgcctgccactgccaccacgccgccaccatcgccgcctgccggcggcctgaggccggcggcggggccctgccccaggccagccccaccgtgcccccacctggcagcagtgaccccaggagcctgaaccggctgcagctggtgctggccgagatggtggccacagagcgggagtatgtgcgggccctggagtacaccatggagaactacttccctgagctggacagaccagatgtgccccagggcctgcggggccagagggcccacctgtttggaaacctggagaagctgcgggacttccactgccacttcttcctgcgggagctggaggcctgcaccaggcaccccccccgggtggcctatgccttcctgcggcaccgggtgcagtttggcatgtatgccctgtacagcaagaacaagcccaggagtgatgccctgatgagcagctatggccacaccttcttcaaggacaagcagcaggccctgggggaccacctggacctggccagctacctgctgaagcccatccagaggatgggcaagtatgccctgctgctgcaggagctggcccgggcctgtggcggccccacccaggagctgagcgccctgcgggaggcccagagcctggtgcacttccagctgcggcatggaaatgacctgctggccatggatgccatccagggctgtgatgtgaacctgaaggagcagggccagctggtgcggcaggatgaatttgtggtgaggacaggccgccacaagtctgtgcggcgcatcttcctgtttgaggagctgctgctcttcagcaagcccaggcatggccccaccggggtggacacctttgcctacaagaggagcttcaagatggctgacctgggcctgacagagtgctgcggcaacagcaacctgcgctttgagatctggttcagaagaaggaaggcccgggacacctttgtgctgcaggccagcagcctggccatcaagcaggcctggacagctgacatcagccacctgctgtggaggcaggccgtgcacaacaaggaggtgaggatggccgagatggtgtccatgggcgtgggcaacaaggccttccgggacatcgcccccagcgaggaggccatcaatgacagaacagtgaactacgtgctgaagtgccgggaggtgcgcagccgggccagcattgctgtggccccctttgaccatgacagcctgtacctgggcgccagcaacagcctgcccggggaccctgccagctgcagcgtgctgggcagcctgaacctgcacctgtacagagatcctgccctgctgggcctgcgctgccccctgtaccccagcttccctgaggaggccgccctggaggccgaggccgagctgggcggccagcccagcctgacagcagaagattctgagatcagcagccagtgccccagcgccagcggcagcagcggcagtgacagcagctgtgtgtctggccaggccctgggccggggcctggaggacctgccctgtgtgtag

SEQ ID NO: 46832 - DNA, 3333 bp, Artificial Sequence
  derived and/or modified sequence
atggagcggcccctggagaacggcgacgagagccccgacagccagggccacgccacagactggaggttcgccgtctgttctttcagggatgcttgggaagaagaagaacctgccagccagatgcacgtgaaggatccgggcccgcccaggcccccagcgggtgctacccaggatgaggaattgcaaggctctccattatctcgcaaatttcagctgcccccagcggccgatgagagtggggacgcacagagaggcacggtggaatcaagctctgtgttgtctgaggggcctgggccttctggagttgaaagcctgctgtgccctatgagttcccatctctctcttgcacagggaacaagagacgtgcaagggcgagctgtgttacttctgtgtgcccatagcccagcctggctacagtccgagtgctcttctcaggagctgatacgcttgctgctctacctcagaagtatccccaggcccgaagtccaggcgctcgggctgacagtgctggtagacgcacggatctgcgctcctagttcctctttgttttctggtctgtctcagctgcaggaggcagctccgggggctgtgtaccaggttcttctggtaggcagtaccttgttgaaagaggtcccatctggactccagctcgaacagctgcccagccagagtctcctgacccacatcccaacagcaggcctccccactagcctgggtgggggcctgccttactgtcatcaggcctggctggacttccggaggagactggaggcactgctgcagaactgccaggccgcttgcgctttactccagggggcgatcgagagcgtgaaagctgtgccccagcccatggagccaggcgaagtgggccaattgctccagcaaactgaggtgctcatgcagcaggtcctagacagcccttggctggcctggcttcagtgccagggaggcagagagcttacctggcttaaacaggaggtgcctgaagtgactctgagcccagattatagaacggcaatggacaaagccgatgagctgtacgatcgggtggatggcctgcttcaccagctaacactccaatcaaatcagaggattcaggccttggagctggtgcagactttagaggcccgggaaagcggcctgcaccagatagaggtgtggttacaacaggtgggctggcctgctctcgaggaagccggcgaaccgagtctggacatgctattgcaggcgcagggcagttttcaagaattataccaagtggctcaggaacaggtcaggcaaggagagaagttcttgcaaccattaacgggctgggaggccgctgagctggacccgccaggggcccggttcctcgcattacgggcccagttaacagagttcagccgagccttagcacagcggtgtcagagattggcggacgccgagcggctattccaactctttcgcgaggcactaacctgggcagaagaaggacagagagtgctcgccgaactggaacaagagcgacctggggtggtgctgcagcagctccagctccattggacccggcatccagatctgccgcctgctcacttccggaaaatgtgggctcttgcgaccggattgggctcagaggctatccggcaggaatgtagatgggcgtgggccagatgccaggatacctggttagctcttgaccagaaactggaggcttctctgaaactgcctcccgtgggaagcactgccagcctttgtgtctctcaagtgccagctgcacccgcgcacccccccctgagaaaagcctacagctttgaccggaatctgggccagagtctgagtgagccagcatgccactgccaccacgccgccaccatcgccgcgtgtaggagacctgaagccggagggggcgcactcccacaggcgagtccgaccgtgccccctccaggcagcagcgacccgcgcagtctgaatcgattacaactggtactcgcagagatggtagccacagagagagaatatgtccgagcactcgagtacaccatggagaactactttcctgaactagacagacctgatgtgcctcagggtctacgcggacagagagcccatctctttggaaatttagagaagctgagggatttccactgtcatttctttttgagggaactcgaggcatgtacacgtcacccccctagagtggcatatgctttcctccggcaccgagtccagttcggcatgtatgccctctattcaaagaacaaaccccggtcagacgctctcatgtcttcatatggacacacgtttttcaaagataagcagcaggccctcggggatcatctggacttggctagttacctgctgaagccgatccagcggatgggcaaatatgcactcttgctgcaggagctggcgcgtgcttgtgggggcccaactcaggagctcagcgccctccgtgaggctcagtctctggtgcatttccagctgagacatggcaacgatttgctggccatggacgctatccaagggtgcgacgtgaatcttaaagagcagggtcagttggtgcgccaagacgaattcgtggttcgaaccggcaggcataagagtgtgcgtcggatatttctgtttgaggagctcttactattttccaaaccacgtcacggcccgactggcgtcgatacttttgcctacaaacgtagcttcaagatggctgatctagggctcacagagtgttgcgggaactcgaatctgaggtttgaaatttggttccgccgccgtaaggctcgcgacacatttgtcttgcaggcaagtagtcttgccataaaacaggcttggactgcggacatctctcacctgttgtggcggcaggccgtccataacaaggaagtaagaatggccgagatggtctctatgggtgtcgggaacaaggcattccgggacatcgcaccgtccgaggaagccattaacgacaggacagtcaattatgtcttaaaatgccgcgaggtccgctcccgagcgagtatcgcagttgccccattcgaccatgacagcctctacctgggggcctccaactcattacctggcgaccctgcctcatgctctgttctaggatcacttaaccttcacttgtaccgcgaccctgcgcttcttggacttcgctgtccactttacccctcattccctgaagaagccgcgctcgaagccgaagctgagctgggcggtcaaccgagtctgaccgctgaagattccgagatcagctcacagtgccccagcgcaagtggatcctcaggttctgactcatcctgcgttagcggccaggccctcgggcgtggcctggaggatttaccgtgcgtctag

SEQ ID NO: 46833 - DNA, 4480 bp, Artificial Sequence
  derived and/or modified sequence
gtccgacttcacggttccccgcggctcggcccgggggcgtgagtgtcgccagcgggcgacgggggggcgcgcggtaggccctgcaacaaggccagggcctgggggggccggcaggagagcgaacccgaggcatcgtggtgccatggcggggccgcccccacgggcatgggcctgcagagcgtggccgtgaggacgctgagggtgggcgcgcacggagcagaggcccacgggcgtccgacgggggacctggacagagggacacccttaacgttattccctcttcccaggcctgaattgcagttcctgtgccctggcactaagactggcacctcctgcggcccatgcccttcgcctgcattgcccactgagtcccactcgactgtcttcagcgcggttcacactgagacccagccctctcccgctggccccgagcaggcccacctttaggagggcgtgatggaaaggcccctggagaatggggatgagtccccagactctcagggccatgccaccgactggagatttgctgtgtgcagtttcagggatgcctgggaagaggaggaacctgcttcccagatgcacgttaaggacccaggtcctccaagaccaccagccggggccacccaggatgaggagctacagggcagccccttgtccaggaaattccagttacccccagctgcagatgagtcgggggatgcccagaggggcacagtagaaagctcctcagtcctgtcagaagggccaggcccctctggagtggagagtctcctatgccccatgtcctcccacctcagcttggcacaggggactcgggatgtccaaggccgggcagtgctgcttctgtgtgcccacagcccagcctggcttcagtctgagtgcagcagccaggaactcatccgcctcctgctgtacctgcgaagcatccccaggcccgaagtacaggcactgggactgacagtgctagttgatgcccgaatttgtgctccaagttcttccctcttctctgggctcagccaactacaagaagcagccccaggggccgtgtaccaggtgctgctagtgggaagcacgctgctgaaggaagtgccttccgggctgcagctggagcagttgccttctcagagcctgctgacccacatcccaacggcggggctgcccacttcgctaggaggaggcctgccttactgccaccaggcctggctggatttccgaaggcggctggaagctctactacagaactgccaggcagcttgtgccctgctccagggggccatcgaaagtgtgaaggctgtgccccagcccatggagcctggggaggtcggtcagctgctacagcagacagaggtcctgatgcagcaggtgctagactcgccatggctggcatggctacaatgccaggggggccgggagctgacatggctgaagcaagaggtcccagaggtgaccctgagcccagactacaggacggcaatggacaaggctgacgagctatatgaccgggtggatggattgctgcaccaactgaccctgcagagcaaccagcgaatacaggccctagagttggtccaaacactggaggcccgggaaagcggactgcaccagattgaagtgtggctgcagcaggtgggctggccagcactggaggaggctggggagccctcgctggacatgctgctccaggcccaaggctcttttcaggagctgtaccaggttgcccaggagcaggtcaggcaaggggagaagtttctgcagccgctgactggctgggaggcggctgaactggacccccctggggcacgctttctggccctgcgagcccagctgactgaattctctagggctttggcccagcggtgccagcggctggcggatgctgagaggctgtttcagctcttcagggaggccttgacgtgggctgaggaggggcagcgagtgttggcagagctggagcaggaacgcccgggggttgtgttgcagcagctgcagctgcactggaccaggcaccctgacttgcctcctgcccacttccgaaagatgtgggctctggccacggggctgggctcagaggccatccgccaggagtgccgctgggcctgggcgcggtgccaggacacctggctggccctggaccaaaagcttgaggcttcactgaagctaccaccggtgggcagcacagctagcctgtgtgtcagccaggtccccgctgcacctgcccaccctcccctgaggaaggcctacagcttcgatcggaatctggggcagagtctcagtgaacctgcctgccactgccaccatgcggccactattgctgcctgccgcagaccagaggctggaggaggtgccctgccccaggcatcccctactgtgcctccaccaggcagctctgaccccaggagcctcaacaggctacagctggtgctggcagagatggtggccacggagcgggagtatgtccgggctctagagtacactatggagaactatttccccgagctggatcgccccgatgtgccccagggcctccgcggtcagcgtgcccacctctttggcaacctggagaagctgcgggacttccactgccacttcttcctgcgtgagctggaggcttgcacccggcacccaccacgagtggcctatgccttcctgcgccatagggtgcagtttgggatgtacgcgctctacagcaagaataagcctcgctccgatgccctgatgtcaagctatgggcacaccttcttcaaggacaagcagcaagcactgggggaccacctggacctggcctcctacctgctaaagcccatccagcgcatgggcaagtacgcactgctgctgcaggagctggcacgggcctgcgggggccccacgcaggagctcagtgcgctgcgggaggcccagagccttgtgcacttccagctgcggcacggaaacgacctgctggccatggacgccatccagggctgtgatgttaacctcaaggaacaggggcagctggtgcgacaggatgagtttgtggtgcgcactgggcgccacaagtccgtgcgccgcatcttcctttttgaggagctgctgctcttcagcaagcctcgccatgggcccacaggggttgacacatttgcctacaagcgctccttcaagatggcagaccttggtctcactgagtgctgtgggaacagcaacctgcgcttcgagatctggttccgccgccgcaaggccagggacacctttgtgctgcaggcctccagcctggctatcaagcaggcctggacagctgacatctcccacctgctttggaggcaggccgtccacaacaaggaggtgcgcatggctgagatggtgtccatgggtgtggggaacaaggccttccgagacattgctcccagcgaggaagccatcaacgaccgcaccgtcaactatgtcctgaagtgccgagaagttcgctctcgggcgtccattgccgtagccccgtttgaccatgacagcctctacctgggggcctcgaactcccttcctggagaccctgcctcttgctctgttctggggtccctcaacctgcacctgtacagagacccagctcttctgggtctccgctgtcccctgtatcccagcttcccagaggaagcagcactggaggctgaggcagagctgggcggccagccctctttgactgctgaggactcagagatctcgtcccaatgcccatcagccagtggctccagtggctctgacagcagctgtgtgtcagggcaggccctgggtaggggcctggaggacttaccctgtgtctgagcccgggactggacgagcagtagatccagcagcctgcagctccaaggaacattgcctctctggatctgctgtgaccagggtgtggctgacacctgggctacctccaacctacatgtgcaacgctgttgactaccctttctgatgtgtgtggccattggactaactggcacggggcctctctagggaagtctggttgtagagcctgaataggctcctggccccatgaccccttctcctgtccccagctcccatcccagttgtgggttaagaataggctagagcagacattgggtgtttccatgctgtaggctggtgggggaccatgtgcctctaggcagtgactagggtgcccccacccctcaggaagaacacaggtgggctcctagcagctgatccccaatgcctggccttaaagccgagctcagttaccatagggacaggtccacctctactgggccctcatgcttgcctttcctggcccccaggcccagcccctttttactggggcagtttcgttattttgacttgatgccttttgaataactttcaatagaattgtctaaaattatcttactggttgttaggcctttggtgtctcagagaaggagtctaggtctttgatgtgtgatttaatcttttatttgtttataataaaaaatagactgatatgtaccctctgatgggcacatgc

SEQ ID NO: 46834 - DNA, 3333 bp, Artificial Sequence
  derived and/or modified sequence
atggagcggcctctggagaatggggatgaatccccagatagccagggtcatgctaccgactggcgattcgcagtgtgctccttccgtgacgcatgggaggaagaggagccggcatcccagatgcacgtgaaggaccctggtcctccgaggccgcctgccggagcaacccaggatgaggaacttcagggcagccctttatcacgcaaattccagctgcctccggcagcagatgagtcgggggacgcacagcgcggtactgtggaatcatccagcgtgctcagtgaggggcctggcccttcaggcgtggagtcactgctgtgtcctatgagtagtcacctcagtttggcacaaggcactcgggacgtccaaggacgggctgtactgctgctctgcgctcatagccctgcttggctgcagtcagagtgttcctctcaagaactgattcgtctgctcctgtacctgcgcagtatacctaggccagaggtgcaggcgctgggtctgactgtgctggtcgatgcaaggatttgcgctccatcctcctctctgtttagcgggctgtcccaattgcaagaggccgcacccggagcagtttaccaggtgttactcgtgggcagtacactgctcaaggaggtgcccagtggattacagttagaacagctgccctcacaatctctgttgacgcatattcccaccgcaggacttcctacaagcctgggaggaggactcccctattgtcatcaggcctggctcgacttccggaggaggctagaagcgttgctgcagaactgccaggcagcctgcgccctactccagggcgcaatcgaatcagtaaaggccgtgcctcaaccaatggagcccggtgaggtgggccagttgctgcaacagacagaggttctaatgcaacaagtcctcgacagcccttggctcgcctggttacaatgccaggggggaagagagctcacttggctgaaacaggaggttccggaggtgaccctttccccggactacagaaccgctatggataaagccgacgagctctatgatcgcgtggacgggttgctccaccagctgaccctgcagagcaaccaaagaattcaggctttggagcttgtgcaaactctggaagcacgggagtctggcctgcatcagatcgaggtgtggctccagcaagtcggatggccggctttggaggaggccggtgagccaagcctagacatgctgctgcaggcacagggaagttttcaggaactgtaccaggtggcacaggagcaggtaaggcagggcgaaaagttcctccagccgctgaccggttgggaggctgcagagctggacccccctggcgctcggttcctggctttgagggcgcagttaacagagtttagtcgagccctcgcacagaggtgccagagactggcagatgccgagagactattccaactgtttagggaggcgctgacttgggctgaggaaggccagagggtcctggcagagctcgagcaagagcgaccaggggttgtcctccagcagctgcagttacactggacccgccatcccgacctgcctccggcacactttcgcaagatgtgggctttggccacagggctcggtagcgaagccattcggcaggaatgccgctgggcttgggccaggtgtcaggatacctggcttgctcttgaccagaagctcgaagcttccctgaaactgcctccggttggtagcaccgctagcttatgtgtcagccaggtccccgctgctccagcgcacccaccactgcgcaaagcgtactccttcgaccggaatttgggacagagcctgagtgagcccgcatgtcactgccatcacgctgcgaccatagcagcctgtcgacggccagaagcgggtggaggcgctctgccacaggctagccctaccgtgcctccacccggttcatccgaccctagatcactgaatcgcctgcagttggtactcgcagagatggttgccactgaaagagaatacgtgagggccctagagtacaccatggaaaattatttccccgagctagatcgccctgacgttccccaagggctccgcggacagcgggctcacctctttggcaatctggagaaattgagagactttcactgccatttctttctgcgggagctggaggcctgtacaaggcaccctccacgcgtggcctatgctttcttacggcacagggtccagttcggcatgtatgcactatactcaaaaaataagcctaggtctgatgcattaatgagtagctacggccatacattctttaaggataaacagcaggcgctcggtgatcacctcgatctggcctcctacctgctcaagcccattcagaggatgggcaaatatgcacttctgctccaggagcttgctcgtgcctgcggcggaccgacacaggaactgtccgcgttgagagaagctcagtccctcgttcactttcagctgcgtcatggcaacgacctgctggctatggatgcaattcagggctgtgacgtaaatttgaaggaacagggacagctcgtacgccaggatgaatttgtcgtgcggacggggaggcataagagcgtgagacgtatctttttgtttgaagagctgctcctgtttagtaagccccgtcacggccctacgggggtggatacctttgcttataaaaggtcattcaagatggctgacctcggcttgaccgagtgttgcggaaactccaatctgcgctttgagatatggttcagaaggaggaaagccagggataccttcgtcctgcaggccagttctcttgccataaagcaagcatggaccgctgatatcagccaccttctctggcggcaggccgtgcacaacaaggaggtccggatggccgagatggtctcaatgggggtcggaaacaaggcattccgagatatcgccccatcagaggaggccataaacgaccggaccgtgaattatgttctgaaatgtcgcgaagtgcgaagcagagcttctatcgcggtggctccttttgaccatgattcactttatctgggagcttccaattctctcccaggagatcccgctagttgtagtgtcctcggatccctgaatttacatctctatcgcgacccggctctcctgggactacggtgtccgttatatccatctttccctgaagaagctgctttggaggccgaagcagagctcgggggacagccctcactaaccgccgaggactccgaaatatcctcccagtgtcccagcgctagcggctcttccgggtcagatagctcctgtgtgagcggacaggcacttggccgaggtctggaagatctgccctgcgtgtag

SEQ ID NO: 46835 - DNA, 3333 bp, Artificial Sequence
  derived and/or modified sequence
atggagagacccctggagaacggcgacgagagccccgacagccagggccacgccaccgactggagattcgccgtgtgcagcttcagagacgcctgggaggaggaggagcccgccagccagatgcacgtgaaggaccccggcccccccagaccccccgccggcgccacccaggacgaggagctgcagggcagccccctgagcagaaagttccagctgccccccgccgccgacgagagcggcgacgcccagagaggcaccgtggagagcagcagcgtgctgagcgagggccccggccccagcggcgtggagagcctgctgtgccccatgagcagccacctgagcctggcccagggcaccagagacgtgcagggcagagccgtgctgctgctgtgcgcccacagccccgcctggctgcagagcgagtgcagcagccaggagctgatcagactgctgctgtacctgagaagcatccccagacccgaggtgcaggccctgggcctgaccgtgctggtggacgccagaatctgcgcccccagcagcagcctgttcagcggcctgagccagctgcaggaggccgcccccggcgccgtgtaccaggtgctgctggtgggcagcaccctgctgaaggaggtgcccagcggcctgcagctggagcagctgcccagccagagcctgctgacccacatccccaccgccggcctgcccaccagcctgggcggcggcctgccctactgccaccaggcctggctggacttcagaagaagactggaggccctgctgcagaactgccaggccgcctgcgccctgctgcagggcgccatcgagagcgtgaaggccgtgccccagcccatggagcccggcgaggtgggccagctgctgcagcagaccgaggtgctgatgcagcaggtgctggacagcccctggctggcctggctgcagtgccagggcggcagagagctgacctggctgaagcaggaggtgcccgaggtgaccctgagccccgactacagaaccgccatggacaaggccgacgagctgtacgacagagtggacggcctgctgcaccagctgaccctgcagagcaaccagagaatccaggccctggagctggtgcagaccctggaggccagagagagcggcctgcaccagatcgaggtgtggctgcagcaggtgggctggcccgccctggaggaggccggcgagcccagcctggacatgctgctgcaggcccagggcagcttccaggagctgtaccaggtggcccaggagcaggtgagacagggcgagaagttcctgcagcccctgaccggctgggaggccgccgagctggacccccccggcgccagattcctggccctgagagcccagctgaccgagttcagcagagccctggcccagagatgccagagactggccgacgccgagagactgttccagctgttcagagaggccctgacctgggccgaggagggccagagagtgctggccgagctggagcaggagagacccggcgtggtgctgcagcagctgcagctgcactggaccagacaccccgacctgccccccgcccacttcagaaagatgtgggccctggccaccggcctgggcagcgaggccatcagacaggagtgcagatgggcctgggccagatgccaggacacctggctggccctggaccagaagctggaggccagcctgaagctgccccccgtgggcagcaccgccagcctgtgcgtgagccaggtgcccgccgcccccgcccacccccccctgagaaaggcctacagcttcgacagaaacctgggccagagcctgagcgagcccgcctgccactgccaccacgccgccaccatcgccgcctgcagaagacccgaggccggcggcggcgccctgccccaggccagccccaccgtgcccccccccggcagcagcgaccccagaagcctgaacagactgcagctggtgctggccgagatggtggccaccgagagagagtacgtgagagccctggagtacaccatggagaactacttccccgagctggacagacccgacgtgccccagggcctgagaggccagagagcccacctgttcggcaacctggagaagctgagagacttccactgccacttcttcctgagagagctggaggcctgcaccagacacccccccagagtggcctacgccttcctgagacacagagtgcagttcggcatgtacgccctgtacagcaagaacaagcccagaagcgacgccctgatgagcagctacggccacaccttcttcaaggacaagcagcaggccctgggcgaccacctggacctggccagctacctgctgaagcccatccagagaatgggcaagtacgccctgctgctgcaggagctggccagagcctgcggcggccccacccaggagctgagcgccctgagagaggcccagagcctggtgcacttccagctgagacacggcaacgacctgctggccatggacgccatccagggctgcgacgtgaacctgaaggagcagggccagctggtgagacaggacgagttcgtggtgagaaccggcagacacaagagcgtgagaagaatcttcctgttcgaggagctgctgctgttcagcaagcccagacacggccccaccggcgtggacaccttcgcctacaagagaagcttcaagatggccgacctgggcctgaccgagtgctgcggcaacagcaacctgagattcgagatctggttcagaagaagaaaggccagagacaccttcgtgctgcaggccagcagcctggccatcaagcaggcctggaccgccgacatcagccacctgctgtggagacaggccgtgcacaacaaggaggtgagaatggccgagatggtgagcatgggcgtgggcaacaaggccttcagagacatcgcccccagcgaggaggccatcaacgacagaaccgtgaactacgtgctgaagtgcagagaggtgagaagcagagccagcatcgccgtggcccccttcgaccacgacagcctgtacctgggcgccagcaacagcctgcccggcgaccccgccagctgcagcgtgctgggcagcctgaacctgcacctgtacagagaccccgccctgctgggcctgagatgccccctgtaccccagcttccccgaggaggccgccctggaggccgaggccgagctgggcggccagcccagcctgaccgccgaggacagcgagatcagcagccagtgccccagcgccagcggcagcagcggcagcgacagcagctgcgtgagcggccaggccctgggcagaggcctggaggacctgccctgcgtgtag

SEQ ID NO: 46836 - protein, 344 aa, Artificial Sequence
  derived and/or modified sequence
MDKFRMLFQHFQSSSESVMNGICLLLAAVTVKLYSSFDFNCPCLVHYNALYGLGLLLTPPLALFLCGLLANRQSVVMVEEWRRPAGHRRKDPGIIRYMCSSVLQRALAAPLVWILLALLDGKCFVCAFSSSVDPEKFLDFANMTPSQVQLFLAKVPCKEDELVRDSPARKAVSRYLRCLSQAIGWSVTLLLIIAAFLARCLRPCFDQTVFLQRRYWSNYVDLEQKLFDETCCEHARDFAHRCVLHFFASMRSELQARGLRRGNAGRRLELPAVPEPPEGLDSGSGKAHLRAISSREQVDRLLSTWYSSKPPLDLAASPGLCGGGLSHRAPTLALGTRLSQHTDV

SEQ ID NO: 46837 - DNA, 1035 bp, Artificial Sequence
  derived and/or modified sequence
atggacaagttcagaatgctgttccagcacttccagagcagcagcgagagcgtgatgaacggcatctgcctgctgctggccgccgtgaccgtgaagctgtacagcagcttcgacttcaactgcccctgcctggtgcactacaacgccctgtacggcctgggcctgctgctgaccccccccctggccctgttcctgtgcggcctgctggccaacagacagagcgtggtgatggtggaggagtggagaagacccgccggccacagaagaaaggaccccggcatcatcagatacatgtgcagcagcgtgctgcagagagccctggccgcccccctggtgtggatcctgctggccctgctggacggcaagtgcttcgtgtgcgccttcagcagcagcgtggaccccgagaagttcctggacttcgccaacatgacccccagccaggtgcagctgttcctggccaaggtgccctgcaaggaggacgagctggtgagagacagccccgccagaaaggccgtgagcagatacctgagatgcctgagccaggccatcggctggagcgtgaccctgctgctgatcatcgccgccttcctggccagatgcctgagaccctgcttcgaccagaccgtgttcctgcagagaagatactggagcaactacgtggacctggagcagaagctgttcgacgagacctgctgcgagcacgccagagacttcgcccacagatgcgtgctgcacttcttcgccagcatgagaagcgagctgcaggccagaggcctgagaagaggcaacgccggcagaagactggagctgcccgccgtgcccgagccccccgagggcctggacagcggcagcggcaaggcccacctgagagccatcagcagcagagagcaggtggacagactgctgagcacctggtacagcagcaagccccccctggacctggccgccagccccggcctgtgcggcggcggcctgagccacagagcccccaccctggccctgggcaccagactgagccagcacaccgacgtgtag

SEQ ID NO: 46838 - DNA, 1035 bp, Artificial Sequence
  derived and/or modified sequence
atggacaagttcaggatgctctttcagcatttccaaagcagctcagagtcagtgatgaacggtatctgcttgctcttggcggccgtgactgtcaagctatacagctcattcgatttcaattgcccctgtctcgtgcattataacgctttatatgggctcggcctgcttctgaccccaccactcgcgctgtttttgtgcggcttattggccaatcggcagtctgtggtgatggtcgaagaatggaggaggcccgcagggcaccgaaggaaagatcctgggattatccgttatatgtgcagctcagtgttgcagagggcccttgcggcgcctctggtttggatcctgctggcactgttggacggtaagtgctttgtttgtgccttttcctcctctgtggatcctgaaaagttcctggactttgctaatatgaccccatcccaggtgcaactgtttttagccaaggtcccctgtaaggaggacgagctggtcagggactctccggctcgtaaggcagtctcaagatatctgcgctgcctgagtcaagccattggctggtcagttacacttcttctgatcattgcggcattcctggcaagatgtttgcgcccctgtttcgaccaaacggtgttcctgcagcggaggtactggtctaattacgtggacctcgagcagaaactgttcgatgaaacatgttgtgaacacgcccgtgatttcgctcacagatgtgttcttcacttctttgccagtatgcgaagcgagctgcaggccagagggctgcgccgggggaatgctggtagacggttagagctgccagcggttcccgaacccccagaaggacttgattcaggcagcggaaaagcacacctgcgggccatctcctcccgtgaacaggtagaccggcttctatccacttggtacagttcaaaacctccactagacctcgctgctagcccagggctttgcggaggagggctttcccaccgggcgcccacactggctctgggcactcgcttgtcacaacacactgatgtgtag

SEQ ID NO: 46839 - DNA, 1035 bp, Artificial Sequence
  derived and/or modified sequence
atggacaagttcaggatgctgttccagcacttccagagcagcagcgagagcgtgatgaatggcatctgcctgctgctggccgctgtgacagtgaagctgtacagcagctttgacttcaactgcccctgcctggtgcactacaatgccctgtatggcctgggcctgctgctgaccccacccctggccctcttcctgtgtggcctgctggccaaccggcagagcgtggtgatggtggaggagtggaggaggcctgctggccacaggaggaaggaccccggcatcatccgctacatgtgcagctctgtgctgcagagggccctggccgcccccctggtgtggatcctgctggccctgctggatggcaagtgctttgtgtgtgccttcagcagctctgtggaccctgagaagttcctggactttgccaacatgacccccagccaggtgcagctgttcctggccaaggtgccctgcaaggaggatgagctggtgcgggacagccctgccaggaaggctgtgagccgctacctgcgctgcctgagccaggccatcggctggagcgtgaccctgctgctgatcatcgccgccttcctggcccgctgcctgcggccctgctttgaccagaccgtcttcctgcagaggcgctactggagcaactacgtggacctggagcagaagctgtttgatgagacctgctgtgagcacgcccgggactttgcccaccgctgtgtgctgcacttctttgcctccatgaggtctgagctgcaggcccggggcctgcggagaggaaatgccggccggcggctggagctgcctgctgtgcctgagcccccagagggcctggacagcggcagcggcaaggcccacctgcgggccatcagcagccgggagcaggtggaccggctgctgagcacctggtacagcagcaagccacccctggacctggccgccagccctggcctgtgtggcggcggcctgagccaccgggcccccaccctggccctgggcacccggctgagccagcacacagatgtgtag

SEQ ID NO: 46840 - DNA, 1035 bp, Artificial Sequence
  derived and/or modified sequence
atggacaagttccggatgctgttccagcacttccagagcagcagcgagtccgtgatgaacggcatttgtttgcttctcgccgccgtaacagtgaagttgtattccagcttcgattttaattgcccttgcctggtacattataacgcgctttatggcctggggctcctgctcactcctccgttggcgctgttcctgtgtgggctgctggctaaccgccaaagcgtggttatggtggaggaatggcggcgcccagctgggcacagaagaaaggacccaggaatcattcgctatatgtgctcctctgtgttacaacgtgccctcgcagcccccctcgtgtggatcttgctagcactcctggacggcaagtgttttgtgtgcgcgttcagctccagtgtggatcccgagaaattcctagattttgcgaatatgacaccctcccaggtccagcttttcctcgctaaggttccctgcaaagaggatgaattagtccgagactctcctgcccgcaaagcagtgtctaggtatctgaggtgtctgtcccaggcgatcggctggtcagtgacgctgctgctgatcattgccgccttcctggctagatgtcttcggccgtgttttgaccagaccgtattccttcagagacgatactggtcaaattacgtcgacctagagcagaaactgtttgatgaaacatgctgtgaacatgctagggactttgcgcacaggtgcgttttgcacttctttgcgtctatgcgcagtgagttacaggcgagaggtctgagacggggaaacgccgggcgtagactcgagctcccagcggtgcctgaaccacctgagggcctggattctgggtcaggtaaggctcatctccgcgccatatcatctagagagcaggtggacaggttactgtccacctggtattcctccaaaccccccctggatttggccgccagtccagggctgtgcggcggtggcctcagccaccgagctccaaccctcgctttgggaaccagactatcacaacacaccgatgtgtag

SEQ ID NO: 46841 - DNA, 1035 bp, Artificial Sequence
  derived and/or modified sequence
atggataagttccgaatgctgttccagcatttccagtcatctagtgaaagcgtgatgaacgggatctgtctgcttcttgccgctgtgactgtgaagctgtacagttctttcgactttaactgcccttgcctcgtgcactacaacgcgctttatgggctcggattactgctgacaccccctctggccctctttctttgtggcctcctcgctaaccgccagagtgtggtgatggttgaggaatggcggaggcctgctggacaccggcgtaaggacccaggtatcatccgctacatgtgtagcagcgtcctgcagagagcattggcagcacccctggtctggattctgcttgctctcttagacggtaagtgtttcgtatgcgcattttcttcttccgtcgatcccgaaaagtttttagatttcgccaatatgactccctcacaagttcagttgttcctggccaaagtaccttgtaaggaagatgagttagtccgggactcccctgctcggaaagccgtcagtaggtatctgagatgcctttcccaggccatagggtggtccgtcacgctgctgttaattatcgctgctttcttggcgcgatgcctaagaccatgtttcgaccagactgtgttcctgcaaaggagatattggtctaattacgttgacctggagcagaagttatttgatgagacctgctgtgaacacgcgcgtgacttcgcccacaggtgtgttctacactttttcgcctccatgcgctctgaactgcaggcaagaggactgcgacgtggcaacgccggtaggaggctggaactgccggctgttcccgaacctcctgagggcctggactctggatctggaaaagcccatctcagggccatttcaagccgcgaacaggtcgacaggctcttgagcacatggtactcttctaaaccacccctggacctggcagcttctccgggtctgtgtggtgggggtttaagccacagggcccctaccctcgctctgggtaccagattatcgcagcacaccgacgtttag

SEQ ID NO: 46842 - DNA, 1652 bp, Artificial Sequence
  derived and/or modified sequence
gcctgtccctgccttaagtgcctactggatcccgggagcctgggctggggcctgggcactgcttcctccttggcccctcaggcccttggaagcagagagagaacctcttgcagatcccaggctcgtccccagcacagcagacaccaggaaggtggccagagcctcactgagccgaaccgacggccgcccacccacccaggctggagccatggataaattccgcatgctcttccagcacttccagtcaagctcggagtcggtgatgaatggcatctgcctgctgctggctgcggtcaccgtcaagctgtactcctcctttgacttcaactgtccctgcctggtgcactacaatgcactctacggcctgggcctgctgctgacgcccccgctcgccctgtttctctgcggcctcctcgccaaccggcagtctgtggtgatggtcgaggagtggcgccggcccgcagggcaccggaggaaggacccaggcatcatcaggtacatgtgctcctctgtgctgcagagggcgctggccgcccccctggtctggatcctgctggccctccttgacgggaagtgcttcgtgtgtgccttcagcagctctgtggaccctgagaagtttctggactttgccaacatgacccccagccaggtacagctcttcctggccaaggttccctgcaaggaggatgagctggtcagggatagccctgctcggaaggcagtgtctcgctacctgcggtgcctgtcacaggccatcggctggagcgtcaccctgctgctgatcatcgcggccttcctggcccgctgcctgaggccctgcttcgaccagacagtcttcctgcagcgcagatactggagcaactacgtggacctggagcagaagctcttcgacgagacctgctgtgagcatgcgcgggacttcgcgcaccgctgcgtgctgcacttctttgccagcatgcggagtgagctgcaggcgcgggggctgcgccggggcaatgcaggcaggagactcgagctccccgcagtgcctgagcccccagaaggcctggatagtggaagtgggaaggcccacctgcgcgcaatctccagccgggagcaggtggaccgcctcctaagcacgtggtactccagcaagccgccgctggacctggctgcatcccccgggctctgcgggggtggccttagccaccgcgcccctaccttggcactgggcacgaggctgtcacaacacaccgacgtgtagggtcctggccaggcttgaagcggcagtgttcgcaggtgaaatgccgcgctgacaaagttctggagtctttccaggccgtggggaccccacggcaggcaccctaagtcttgttagcctcctttttaaagtagcccaatctctgcctagtttctgggtgtggcctccagcgcgcttcacaaactttaatgtggactcggttcaccgagggccttgttaaatacaggttcagacagtgtagccaggaccgagtctgagattctgcattttaaacaagctcctggaggctgatgtgcttttggtcagtgaaccaaactttgagtagcaagaatctaagtaaatctgccatgggttctgggttctagatgtcaattctaaataataataatgaccttagtctgctgcctcgata

SEQ ID NO: 46843 - DNA, 837 bp, Artificial Sequence
  derived and/or modified sequence
atgaaactttttcagcggtctacacccgcaataaccttggaatccccagacattaagtatcctttaagactcatagatcgggaaataatctcccacgatacaaggaggttcagatttgctctgccatctcctcagcacattctgggcttacccgtgggtcagcacatctacctctctgccaggatcgatggtaacctggtcgttagaccttataccccaatatcaagcgacgatgacaaaggattcgtggatctggtgataaaagtgtacttcaaagacacgcatcctaaattccccgccggcggaaaaatgagccagtatcttgaatccatgcagataggagacacaattgagttcagagggccatctggcctgcttgtgtaccagggtaaagggaagttcgccattcggccagacaagaaatctaacccgataatccgcaccgtcaagagtgtaggtatgatcgccggggggacgggcattacacccatgcttcaagtgatcagagccattatgaaggatcccgacgaccatactgtgtgccatcttctcttcgctaatcaaaccgagaaggacatcctgctccgccccgaactggaagagttaaggaacaagcattctgctcggttcaagttgtggtacacattggaccgggctcccgaagcctgggattatgggcaggggtttgtgaatgaggaaatgattcgagaccatctgcctccaccggaggaggaacctttagtcctgatgtgcggcccacctcctatgatccaatatgcctgtttgccaaatctggatcatgtagggcatccaaccgaaagatgtttcgtcttttag

SEQ ID NO: 46844 - DNA, 837 bp, Artificial Sequence
  derived and/or modified sequence
atgaaactcttccagagaagcacgccagcaatcacgctggagagtcctgatatcaagtaccccttacgccttattgatagggaaataatttcccacgacacccgacgcttcagattcgccctccccagcccacaacacatcctcggcctcccggtaggacagcacatctacctgtctgccaggatagatggaaacttagtggttcggccctacactcccatctcctctgatgatgacaagggctttgtagaccttgtgatcaaagtatacttcaaggacacgcatccaaaatttcccgccggcggtaagatgtcacaatacctcgagagcatgcagattggggacacaattgaattccgaggtcccagtggattattggtataccagggcaaagggaaattcgccataaggccggacaaaaagtccaatcccattatcaggactgtgaagtccgtaggaatgattgcaggcggcactggcatcaccccaatgttacaggttattcgagccataatgaaggatccagacgaccacactgtgtgccatctcctgttcgcaaatcagaccgagaaagacatactcctgcgtcccgaactcgaagaactgcgtaacaagcacagcgcccgttttaaactgtggtacacacttgaccgggctcctgaggcttgggactatggccaggggtttgtgaatgaagagatgattagggaccatctccccccgcctgaggaagagcccctggtgctcatgtgcggtccaccccctatgatacagtatgcctgcctgcctaatcttgaccatgtaggccacccaactgagcgctgcttcgtcttttag

SEQ ID NO: 46845 - DNA, 837 bp, Artificial Sequence
  derived and/or modified sequence
atgaaactcttccagaggtctacaccagcgatcaccctagaatcaccagatataaagtatccactgagactgattgaccgggagataatctcccacgacacccggagattccgttttgccctgcctagccctcagcacatactgggcctgccagtcgggcaacatatttatctgagtgcgagaatagatggcaacctggtggtgcggccttacaccccgatctcatcagatgacgataaaggcttcgtggatcttgtcattaaggtttattttaaggacactcacccgaagttcccggctggaggcaaaatgtcacagtacctagagtcaatgcaaattggggacaccatcgaattccgagggccatccggattactggtctatcagggcaaggggaaattcgcgatccgacccgacaaaaaatctaatccaattatacggaccgttaagtcagtgggtatgattgctggcgggacagggattaccccaatgctccaggtcatcagggctattatgaaggatccagatgaccacactgtctgccacctactgtttgccaatcagacagagaaggatatccttctgcggcccgagctggaagagctgcgaaataagcacagcgcacggttcaaactttggtataccttggatagggctcccgaagcttgggactacggacagggatttgtgaacgaggagatgatccgagatcatctcccaccgcccgaggaggagcctcttgtgctgatgtgtggtcctcctcccatgattcaatacgcttgcctccccaacctcgaccacgttggtcatccaaccgaaaggtgctttgtgttttag

SEQ ID NO: 46846 - DNA, 837 bp, Artificial Sequence
  derived and/or modified sequence
atgaagctgtttcagcgctccactccagccattacactggaaagccccgatatcaagtacccattgagacttattgaccgggagataatctcacacgacacacggcggttcagatttgccctcccgtcaccacagcacattttggggttacctgtagggcaacatatctatctctcagcaagaattgacggaaacttagtggtacgcccctatacccccatcagtagtgacgacgacaaaggattcgttgatctcgtcatcaaggtctacttcaaggacacacaccctaaatttcccgccggcggcaaaatgtcgcagtacttggaatccatgcagatcggagataccatcgagttcagaggtccaagcggactgctggtctaccaaggtaagggtaaattcgcaattcgccccgacaaaaaatcaaatccaattatcaggacagtgaagtcagtggggatgatcgccggcggaaccggcataacccctatgttgcaggttatacgcgctatcatgaaagacccagatgaccatacagtttgtcatctgctctttgctaaccagactgaaaaagacatcctgttacgcccagaactggaggaactgaggaacaagcattcagcccggttcaagctatggtacacactggaccgcgcacccgaggcctgggattatggacaggggtttgtcaatgaggagatgattcgggatcatctgccaccgccagaagaggaacccttggtactgatgtgcggacccccccccatgattcagtacgcctgtctgcctaatctggatcacgttggccacccaacggaacggtgcttcgtcttctag

SEQ ID NO: 46847 - DNA, 444 bp, Artificial Sequence
  derived and/or modified sequence
atgaaactctttcagagatccacccccgccatcactttggagagcccggacattaagtaccccctgcgactgattgacagagagataatcagtcacgacacgaggcgatttcgtttcgccttaccgtcaccgcagcacatcctgggcctgccagtgggccagcatatttatctgtcagccagaatagatggaaacctggtggtccgtccttatacacccatctcgagcgatgacgacaaaggattcgtggacctggtgataaaggtctactttaaggatacgcacccaaaattccctgccggcggcaagatgagccagtacctcgaatcaatgcagattggagacacaatagaattcagggggccctctggattgctggtgtatcaggggaagggcaagtttgccataagacctgataagaagtccaaccccataatacgatag

SEQ ID NO: 46848 - DNA, 837 bp, Artificial Sequence
  derived and/or modified sequence
atgaagctgttccagaggagcaccccagccatcaccctggagagcccagacatcaagtaccccctgcggctgattgaccgggagatcatcagccatgacacccggcgcttccgctttgccctgcccagcccccagcacatcctgggcctgcctgtgggccagcacatctacctgagcgccagaattgatggcaacctggtggtgcggccctacacccccatcagcagtgatgatgacaagggctttgtggacctggtgatcaaggtgtacttcaaggacacccaccccaagtttcctgctgggggcaagatgagccagtacctggagagcatgcagattggagacaccatcgagttccggggccccagcggcctgctggtgtaccagggcaagggcaagtttgccatccggccagacaagaagagcaaccccatcatcagaacagtgaagtctgtgggcatgattgctgggggcaccggcatcacccccatgctgcaggtgatccgggccatcatgaaggaccctgatgaccacacagtgtgccacctgctgtttgccaaccagacagagaaggacatcctgctgcggcctgagctggaggagctgaggaacaagcacagcgcccgcttcaagctgtggtacaccctggaccgggcccctgaggcctgggactatggccagggctttgtgaatgaggagatgatccgggaccacctgcccccacctgaggaggagcccctggtgctgatgtgtggccccccacccatgatccagtatgcctgcctgcccaacctggaccacgtgggccaccccacagagcgctgctttgtgttctag

SEQ ID NO: 46849 - DNA, 444 bp, Artificial Sequence
  derived and/or modified sequence
atgaagctgttccagaggagcaccccagccatcaccctggagagcccagacatcaagtaccccctgcggctgattgaccgggagatcatcagccatgacacccggcgcttccgctttgccctgcccagcccccagcacatcctgggcctgcctgtgggccagcacatctacctgagcgccagaattgatggcaacctggtggtgcggccctacacccccatcagcagtgatgatgacaagggctttgtggacctggtgatcaaggtgtacttcaaggacacccaccccaagtttcctgctgggggcaagatgagccagtacctggagagcatgcagattggagacaccatcgagttccggggccccagcggcctgctggtgtaccagggcaagggcaagtttgccatccggccagacaagaagagcaaccccatcatcagatag

SEQ ID NO: 46850 - DNA, 837 bp, Artificial Sequence
  derived and/or modified sequence
atgaagctgttccagcggagcacccccgccatcaccctggagagcccggatatcaaatatcctctacgattaatagatagagaaatcatcagccatgacacccgccgattccgctttgccctaccatccccacaacatatcctgggcctgcccgtggggcagcacatctatctgagtgcccggatagatgggaatttggtagtgagaccttataccccaataagttcagatgatgacaaagggtttgtggatctggttattaaagtgtatttcaaggacacgcatcctaaattccccgccggaggcaagatgtcgcagtatctggaatctatgcaaataggagacaccatagagtttcgcggtccctccggcctgttagtctaccaggggaaaggcaagtttgccattagacccgataaaaaatcgaatcctatcatcagaacggtaaagtccgtgggaatgatagcgggtggcactggaattacgcccatgctgcaggtgatcagagcgatcatgaaggatcctgacgatcacaccgtatgccatctgctgttcgcgaaccagacagagaaagacatcctgttaaggcctgaattggaagaactgcgcaataagcacagcgctcgcttcaaactttggtacacccttgacagagccccagaagcatgggactatggacaaggcttcgtgaatgaggagatgattcgtgaccacctccctccgccagaggaagaacccttggtcctgatgtgtgggccgccgcctatgatccagtatgcttgtctgccgaatctagatcacgtggggcatcctacagagcgatgttttgtgttctag

SEQ ID NO: 46851 - DNA, 837 bp, Artificial Sequence
  derived and/or modified sequence
atgaagctgttccagcggagcacccccgccatcaccctggagagccccgacattaaataccccttgcggctgattgatcgagagataataagccacgacacccgccggtttagattcgcactgccgtcccctcagcatattctgggactgcccgtcggccagcacatctacctgagtgctcggatcgatgggaatctcgtcgtgagaccgtacacacctatctcaagcgacgacgacaaaggcttcgtggacctggtcattaaagtgtacttcaaagacacccatcctaaattccccgctgggggcaaaatgagccaatatttagagtctatgcagattggagacaccatagaattcaggggccctagcggcctcctggtgtaccagggtaaagggaaattcgccatccgacctgataagaaatccaacccgatcattcgaactgtgaaatcagtgggtatgatcgcgggcggaacaggaatcacgcccatgcttcaagtcatcagagctatcatgaaagatcccgacgaccatacggtatgccatttgctctttgctaaccagacagagaaggatattctcctacgtcccgagctggaggaattgcgcaataaacactctgcccgattcaagctctggtataccctggacagagcccctgaggcctgggactacggacaaggttttgtgaatgaggagatgattagggaccatctccccccgccagaagaagaaccgctggtgctgatgtgcgggcccccgcccatgattcagtatgcatgtctgcctaacttggatcatgtgggacacccaactgagcggtgctttgtgttctag

SEQ ID NO: 46852 - DNA, 837 bp, Artificial Sequence
  derived and/or modified sequence
atgaagctgttccagcggagcacccccgccatcaccctggagagccctgacatcaagtacccgctgcggctgattgaccgggagatcatcagtcacgacacccgtcggtttcggttcgcactcccttccccacagcatatcctgggcctgcctgtcgggcagcatatttacctgagtgctagaattgatggaaacttagttgtaaggccatacacccccatatcaagcgacgatgacaaggggttcgttgatctggtgatcaaggtgtacttcaaagatacacatcctaaattcccagcaggaggtaaaatgtcccaatacttggaaagcatgcagattggagacacgattgaattcagagggccctccggcctcctagtttatcaaggcaagggcaagtttgcgattagacctgataaaaagtccaacccgattatacggaccgttaaatcagtgggcatgattgccggcggtaccgggatcaccccaatgctgcaggtgattagggccatcatgaaagaccccgatgatcacactgtctgtcacctactctttgctaaccagacggaaaaagacatcctccttaggccagaactggaagagctccgtaacaaacatagtgcacgctttaagctctggtacacacttgatagagcgccggaggcctgggactacggccagggctttgtcaacgaagaaatgatccgcgatcatctaccaccaccggaggaagaacccttggtcctgatgtgtggacctcctcccatgatccagtacgcttgccttccgaatctggaccatgtgggccatccaacagagaggtgttttgtcttttag

SEQ ID NO: 46853 - DNA, 837 bp, Artificial Sequence
  derived and/or modified sequence
atgaagctgttccagcggagcacccccgccatcaccctggagagcccagacataaagtaccctcttcgacttattgatagagagattatctcccatgacactcggcggttccggttcgctttgccaagcccacagcacattctcggcctcccagttggtcaacacatctatctgtcagcacgcatcgacggcaatctcgtggtaaggccttacactccaatctcctccgatgatgacaaaggctttgtcgatctggtgattaaagtgtatttcaaagacactcacccaaagttccccgccggaggaaagatgtcacagtatctggagtctatgcagataggggacaccatagagtttagggggccctccgggctgctggtgtaccaaggcaaagggaagttcgccatcaggcctgataaaaaaagtaatcccatcataaggacagtgaagtccgttgggatgatcgccggcggcaccggcatcacacctatgctgcaggtcattcgcgccatcatgaaagacccagatgaccacacggtgtgtcacctgctcttcgcaaaccagaccgagaaggacattctgctgcgccccgagctggaggaactgcgtaataaacacagtgctcgtttcaaattgtggtatacactggaccgcgcgccagaggcctgggactatggacaggggttcgtgaacgaggagatgatcagagaccatctccctcccccagaggaggaaccgctcgtgctcatgtgtggacctccccccatgattcagtatgcttgcttgccgaatctagatcatgtggggcacccaactgaaagatgttttgtcttttag

SEQ ID NO: 46854 - DNA, 444 bp, Artificial Sequence
  derived and/or modified sequence
atgaagctgttccagcggagcacccccgccatcaccctggagagcccagatattaagtatcccctgagattgatcgatcgcgaaatcatcagccatgatacaagacgtttccggtttgcattgccctcaccccagcatatactggggctgcctgtgggtcagcatatctacctgagcgcccgcatcgacggtaatctagttgtgcggccatacaccccaataagttccgacgatgacaaaggattcgtggacctggtgatcaaggtgtatttcaaggatacccacccaaagtttcctgccggtggcaagatgtcccagtacctggaaagtatgcagatcggggacaccatagagttccggggccctagcggcctgctggtctaccaaggtaagggcaagtttgccattcggccagacaagaagtccaacccaatcatccgttag

SEQ ID NO: 46855 - DNA, 837 bp, Artificial Sequence
  derived and/or modified sequence
atgaagctttttcaacgctccacccctgcgattacgctggaatctcccgacattaagtacccattacgcctgattgacagggagatcatttcgcacgataccaggcggttcagattcgcgctccccagtccccagcatattttgggccttccagttggtcagcacatctatctgtcggctaggattgatggtaacctggtagtgcgtccctacacaccgatcagcagcgatgatgataaaggtttcgtggacttggtcatcaaagtgtactttaaagatacccaccctaagtttcctgccggtggaaaaatgagccagtatctggaaagcatgcagataggggataccattgagttcagaggcccatctgggcttctagtgtatcagggcaagggaaagttcgccattaggccagataaaaagagcaatcccataatccggactgtgaagagcgtaggcatgattgccggaggcacggggattacccctatgctgcaagtgattagagcaattatgaaagaccctgacgatcacacagtgtgtcatctgctttttgctaatcaaaccgagaaggacattcttctcaggccagaactggaggagctaaggaataagcacagcgctcgcttcaaattgtggtacactctggacagagcccctgaagcctgggattatgggcaaggatttgtcaacgaagagatgattcgcgaccaccttcccccacccgaagaggagcccttagtcctaatgtgcggcccaccacccatgattcagtatgcctgcctgcctaacctcgatcatgtgggccatcccaccgagcggtgctttgtgttctag

SEQ ID NO: 46856 - DNA, 837 bp, Artificial Sequence
  derived and/or modified sequence
atgaagttgttccagcggtctactcctgccatcaccttggagtcacctgacattaaatatccacttcggcttattgatcgtgaaattattagccacgatactagaagatttcgatttgctctgccctcacctcagcacatccttggcctgcctgttggccagcatatctatctcagtgcaagaatcgacggaaatctagtggtcagaccctacacacccattagttctgatgatgacaaaggtttcgtggacttagtaatcaaggtgtatttcaaagacacacatccgaaatttcccgctgggggaaaaatgtcacagtatcttgagtctatgcaaattggcgacacaattgagttccgtggcccttctggcctcctggtgtatcagggcaagggaaagttcgcgatcagacccgataaaaaaagtaaccccatcattaggacagtgaagagtgtcggcatgatcgcaggaggcacaggaatcacgcctatgctccaggttatcagggcaatcatgaaggaccccgatgatcatacagtttgccacctgctgtttgctaaccagacggaaaaggatatcctgctgcgccctgagctagaagaactgcggaataagcattccgccagatttaaactgtggtatactcttgatagagcgccagaagcctgggattatggtcaaggatttgtgaatgaagagatgatcagggatcaccttcctcccccagaagaggagccacttgtgctaatgtgtggccctcctcccatgatacaatacgcttgtctgcctaatctggatcacgttggccaccccaccgagaggtgcttcgtattctag

SEQ ID NO: 46857 - DNA, 837 bp, Artificial Sequence
  derived and/or modified sequence
atgaaactgttccagcggtccacccctgctattactcttgagagcccagatatcaaataccccctcaggctgatagatcgcgagatcatatcccatgacactcggagattcagatttgcactccctagtccacagcacatcctagggcttccagtaggccagcatatctatctttcagctagaattgatggcaatctggtggtgcgaccatacaccccaatttcctctgatgacgataaagggttcgtggacttagttataaaagtctactttaaggacactcatccgaagttccccgcagggggaaaaatgtctcaatatctcgagtcaatgcagattggggatacgatcgaattccggggaccgagtgggttactggtatatcaggggaaggggaaatttgctatccggccagacaagaagtctaacccaattattcgaaccgtgaagagcgtgggaatgatcgctggtgggacgggaattacccccatgctacaggtgatcagggccattatgaaagatcccgacgatcatacggtttgtcacctgctgttcgcaaatcaaaccgagaaagacatcctgctacgacccgagctggaagagctccgcaacaagcactccgcgcgtttcaaattgtggtacacacttgacagagccccagaggcttgggactatggccaagggttcgtgaacgaggaaatgatccgagaccacttacctcccccagaggaggaaccgctcgtgctgatgtgcggcccaccaccaatgattcagtacgcctgtctgccaaatctcgatcacgtgggacacccaaccgagaggtgtttcgtattctag

SEQ ID NO: 46858 - DNA, 837 bp, Artificial Sequence
  derived and/or modified sequence
atgaagctgttccaacgctctaccccggctataacgctcgaatcaccggatattaagtaccctctgcgtctgatcgaccgcgagatcatatcacacgacacaaggcggtttcgattcgccctgccttccccccagcacatcttgggtctgccagtggggcagcacatctacctgtccgccagaatcgatggaaatctggttgttagaccgtatacgcctatcagttccgacgacgacaaagggttcgtcgatctggtgatcaaggtgtatttcaaagacactcaccccaagtttccagctgggggaaagatgtctcaatatcttgagtccatgcagattggcgataccattgagttcaggggcccaagcgggctcctcgtgtaccaaggcaaaggaaagttcgccatacggcctgacaagaagtccaatccaatcatcaggacagttaaatccgtgggcatgattgctggcggaaccgggatcacaccaatgctgcaggtaattcgggctatcatgaaagatcccgacgaccatactgtgtgtcacttgctgtttgcaaaccaaactgagaaggatatcttgctgcgaccagagctggaggaactcagaaataagcattcagcccgtttcaagctgtggtatacccttgaccgagctcctgaagcatgggattacggccagggttttgtgaatgaagaaatgattagagatcatctgccgcctcctgaagaagaacctctggtgttaatgtgcggtccccctccaatgatccagtatgcctgcttaccgaatctggatcatgtgggacaccccactgagaggtgctttgtgttttag

SEQ ID NO: 46859 - DNA, 444 bp, Artificial Sequence
  derived and/or modified sequence
atgaaattgtttcaacggagtacccccgctatcacgctggagtcacctgacattaagtacccactgagactcatcgaccgggaaatcatcagccacgacacccggaggttcaggtttgccctgccttcacctcagcatattctcggacttccggtcgggcagcacatatatttaagcgccagaatcgacggaaatctggtcgtgagaccttatacccccattagcagtgacgatgacaaaggctttgttgacctggtgataaaggtgtatttcaaggatactcatccaaagtttcctgctggaggcaaaatgtctcagtacttagaaagcatgcagatcggggacaccatcgaatttagagggcctagtgggctcttggtgtatcaggggaagggtaaattcgcaatacgtcccgataaaaaaagcaatccaattattcggtag

SEQ ID NO: 46860 - DNA, 837 bp, Artificial Sequence
  derived and/or modified sequence
atgaagctgttccagagaagcacccccgccatcaccctggagagccccgacatcaagtaccccctgagactgatcgacagagagatcatcagccacgacaccagaagattcagattcgccctgcccagcccccagcacatcctgggcctgcccgtgggccagcacatctacctgagcgccagaatcgacggcaacctggtggtgagaccctacacccccatcagcagcgacgacgacaagggcttcgtggacctggtgatcaaggtgtacttcaaggacacccaccccaagttccccgccggcggcaagatgagccagtacctggagagcatgcagatcggcgacaccatcgagttcagaggccccagcggcctgctggtgtaccagggcaagggcaagttcgccatcagacccgacaagaagagcaaccccatcatcagaaccgtgaagagcgtgggcatgatcgccggcggcaccggcatcacccccatgctgcaggtgatcagagccatcatgaaggaccccgacgaccacaccgtgtgccacctgctgttcgccaaccagaccgagaaggacatcctgctgagacccgagctggaggagctgagaaacaagcacagcgccagattcaagctgtggtacaccctggacagagcccccgaggcctgggactacggccagggcttcgtgaacgaggagatgatcagagaccacctgcccccccccgaggaggagcccctggtgctgatgtgcggccccccccccatgatccagtacgcctgcctgcccaacctggaccacgtgggccaccccaccgagagatgcttcgtgttctag

SEQ ID NO: 46861 - DNA, 444 bp, Artificial Sequence
  derived and/or modified sequence
atgaagctgttccagagaagcacccccgccatcaccctggagagccccgacatcaagtaccccctgagactgatcgacagagagatcatcagccacgacaccagaagattcagattcgccctgcccagcccccagcacatcctgggcctgcccgtgggccagcacatctacctgagcgccagaatcgacggcaacctggtggtgagaccctacacccccatcagcagcgacgacgacaagggcttcgtggacctggtgatcaaggtgtacttcaaggacacccaccccaagttccccgccggcggcaagatgagccagtacctggagagcatgcagatcggcgacaccatcgagttcagaggccccagcggcctgctggtgtaccagggcaagggcaagttcgccatcagacccgacaagaagagcaaccccatcatcagatag

SEQ ID NO: 46862 - protein, 912 aa, Artificial Sequence
  derived and/or modified sequence
MESLKTDTEMPYPEVIVDVGRVIFGEENRKKMTNSCLKRSENSRIIRAICALLNSGGGVIKAEIDDKTYSYQCHGLGQDLETSFQKLLPSGSQKYLDYMQQGHNLLIFVKSWSPDVFSLPLRICSLRSNLYRRDVTSAINLSASSALELLREKGFRAQRGRPRVKKLHPQQVLNRCIQEEEDMRILASEFFKKDKLMYKEKLNFTESTHVEFKRFTTKKVIPRIKEMLPHYVSAFANTQGGYVLIGVDDKSKEVVGCKWEKVNPDLLKKEIENCIEKLPTFHFCCEKPKVNFTTKILNVYQKDVLDGYVCVIQVEPFCCVVFAEAPDSWIMKDNSVTRLTAEQWVVMMLDTQSAPPSLVTDYNSCLISSASSARKSPGYPIKVHKFKEALQRHLFPVTQEEVQFKPESLCKKLFSDHKELEGLMKTLIHPCSQGIVIFSRSWAGDVGFRKEQNVLCDALLIAVNSPVVLYTILIDPNWPGGLEYARNTAHQLKQKLQTVGGYTGKVCIIPRLIHLSSTQSRPGEIPLRYPRSYRLADEEEMEDLLQALVVVSLSSRSLLSDQMGCEFFNLLIMEQSQLLSESLQKTRELFIYCFPGVRKTALAIKIMEKIKDLFHCKPKEILYVCESDSLKDFVTQQTTCQAVTRKTFMQGEFLKIKHIVMDETENFCSKYGNWYMKAKNITHPKAKGTGSENLHHGILWLFLDPFQIHHADVNGLPPPSAQFPRKTITSGIHCALEIAKVMKEEMKRIKENPPSNMSPDTLALFSETAYEEATCAQALPGVCETKTNLTTEQIANYVARKCHSLFQCGYLPKDIAILCRRGEDRGRYRLALLKAMELIETHRPSEVVFSPATGVWGSHIVLDSIQQFSGLERTVVFGLSPECDQSEEFHKLCFASRAIKHLYLLYEKRAAY

SEQ ID NO: 46863 - DNA, 2739 bp, Artificial Sequence
  derived and/or modified sequence
atggagagcctgaagaccgacaccgagatgccctaccccgaggtgatcgtggacgtgggcagagtgatcttcggcgaggagaacagaaagaagatgaccaacagctgcctgaagagaagcgagaacagcagaatcatcagagccatctgcgccctgctgaacagcggcggcggcgtgatcaaggccgagatcgacgacaagacctacagctaccagtgccacggcctgggccaggacctggagaccagcttccagaagctgctgcccagcggcagccagaagtacctggactacatgcagcagggccacaacctgctgatcttcgtgaagagctggagccccgacgtgttcagcctgcccctgagaatctgcagcctgagaagcaacctgtacagaagagacgtgaccagcgccatcaacctgagcgccagcagcgccctggagctgctgagagagaagggcttcagagcccagagaggcagacccagagtgaagaagctgcacccccagcaggtgctgaacagatgcatccaggaggaggaggacatgagaatcctggccagcgagttcttcaagaaggacaagctgatgtacaaggagaagctgaacttcaccgagagcacccacgtggagttcaagagattcaccaccaagaaggtgatccccagaatcaaggagatgctgccccactacgtgagcgccttcgccaacacccagggcggctacgtgctgatcggcgtggacgacaagagcaaggaggtggtgggctgcaagtgggagaaggtgaaccccgacctgctgaagaaggagatcgagaactgcatcgagaagctgcccaccttccacttctgctgcgagaagcccaaggtgaacttcaccaccaagatcctgaacgtgtaccagaaggacgtgctggacggctacgtgtgcgtgatccaggtggagcccttctgctgcgtggtgttcgccgaggcccccgacagctggatcatgaaggacaacagcgtgaccagactgaccgccgagcagtgggtggtgatgatgctggacacccagagcgccccccccagcctggtgaccgactacaacagctgcctgatcagcagcgccagcagcgccagaaagagccccggctaccccatcaaggtgcacaagttcaaggaggccctgcagagacacctgttccccgtgacccaggaggaggtgcagttcaagcccgagagcctgtgcaagaagctgttcagcgaccacaaggagctggagggcctgatgaagaccctgatccacccctgcagccagggcatcgtgatcttcagcagaagctgggccggcgacgtgggcttcagaaaggagcagaacgtgctgtgcgacgccctgctgatcgccgtgaacagccccgtggtgctgtacaccatcctgatcgaccccaactggcccggcggcctggagtacgccagaaacaccgcccaccagctgaagcagaagctgcagaccgtgggcggctacaccggcaaggtgtgcatcatccccagactgatccacctgagcagcacccagagcagacccggcgagatccccctgagataccccagaagctacagactggccgacgaggaggagatggaggacctgctgcaggccctggtggtggtgagcctgagcagcagaagcctgctgagcgaccagatgggctgcgagttcttcaacctgctgatcatggagcagagccagctgctgagcgagagcctgcagaagaccagagagctgttcatctactgcttccccggcgtgagaaagaccgccctggccatcaagatcatggagaagatcaaggacctgttccactgcaagcccaaggagatcctgtacgtgtgcgagagcgacagcctgaaggacttcgtgacccagcagaccacctgccaggccgtgaccagaaagaccttcatgcagggcgagttcctgaagatcaagcacatcgtgatggacgagaccgagaacttctgcagcaagtacggcaactggtacatgaaggccaagaacatcacccaccccaaggccaagggcaccggcagcgagaacctgcaccacggcatcctgtggctgttcctggaccccttccagatccaccacgccgacgtgaacggcctgcccccccccagcgcccagttccccagaaagaccatcaccagcggcatccactgcgccctggagatcgccaaggtgatgaaggaggagatgaagagaatcaaggagaacccccccagcaacatgagccccgacaccctggccctgttcagcgagaccgcctacgaggaggccacctgcgcccaggccctgcccggcgtgtgcgagaccaagaccaacctgaccaccgagcagatcgccaactacgtggccagaaagtgccacagcctgttccagtgcggctacctgcccaaggacatcgccatcctgtgcagaagaggcgaggacagaggcagatacagactggccctgctgaaggccatggagctgatcgagacccacagacccagcgaggtggtgttcagccccgccaccggcgtgtggggcagccacatcgtgctggacagcatccagcagttcagcggcctggagagaaccgtggtgttcggcctgagccccgagtgcgaccagagcgaggagttccacaagctgtgcttcgccagcagagccatcaagcacctgtacctgctgtacgagaagagagccgcctactag

SEQ ID NO: 46864 - DNA, 2739 bp, Artificial Sequence
  derived and/or modified sequence
atggaatcactgaaaactgacacagaaatgccatacccagaggtcattgtcgatgttgggcgcgtaattttcggcgaagaaaatagaaagaagatgaccaacagctgtctgaagcgttctgagaactcccgaattatcagggccatatgcgcactcctgaactccggtgggggcgtgataaaggctgagattgacgacaagacatattcatatcaatgtcatgggctcggacaggaccttgaaacgtcatttcagaaacttcttcccagtggttctcagaaatatttagactatatgcagcagggtcacaatctccttatctttgtcaagtcatggtctcccgacgtgttcagtctgcctctgcgcatttgttctctccgcagcaacctgtacagacgggatgttaccagcgccatcaacctcagcgcgagctcagctctggaactgctccgcgagaagggctttagggcccagcggggacggccccgtgtcaaaaagctgcatcctcagcaggtgctgaatagatgtatccaagaggaggaagacatgcgcatcctggcctcagaattcttcaaaaaggataagcttatgtacaaggagaagcttaattttaccgagagcactcacgtcgagtttaagcggtttacgactaagaaagtgattccccgaattaaggaaatgctgccgcattacgtgtccgcctttgcgaacactcaaggcggctacgtattgataggcgtggatgataagtctaaagaggtagtcgggtgcaagtgggagaaagtgaatcccgatttgttgaagaaggagattgagaactgtatcgaaaagctgcccactttccatttctgttgtgagaaacccaaagtcaatttcaccacaaagatcctgaacgtttatcagaaagacgtcctggacggctacgtatgtgttatccaagtcgaaccattctgctgcgtggtgtttgccgaggcaccagatagctggataatgaaggacaacagtgtaactagacttaccgcagagcaatgggtggtcatgatgctcgatacccagtccgcaccacccagccttgtcaccgattacaattcctgcctgatatcctccgcctccagcgccaggaagtcaccggggtacccaattaaagtgcataaatttaaggaggccttgcaaaggcaccttttccctgtgacgcaggaagaggtgcagttcaagccagagtccctgtgcaagaagctgttttccgaccataaggagcttgagggcctgatgaagacgctcattcacccatgcagccagggtattgtgatctttagtcgttcctgggccggggacgtaggcttccgtaaggagcagaacgtgctgtgcgacgctcttttgatcgctgttaacagtcctgtggtgctgtatactattctgatcgatcctaactggcccggtggcctggaatatgctcggaacaccgctcaccagctgaagcagaagctccagaccgtgggaggctacaccggcaaagtgtgcattattccccgcctcatccatctgagttcaactcagtccagacccggtgaaatccccctccgctacccccgcagctatcgactggctgatgaggaagagatggaggatctcctccaagctttagtggtggtgtccctgtcaagtaggagcctcctgagcgaccagatggggtgcgaattttttaacctgctcatcatggaacaaagtcagctcctttcagaatccctgcagaagactcgagaactctttatttattgctttcccggagtgcgcaaaactgcccttgcaatcaaaattatggagaagattaaagacctgtttcattgcaagcccaaggagatcctctatgtgtgtgaatcggactccttgaaggacttcgttacacagcaaactacgtgccaggccgtcactcgtaagaccttcatgcagggggagtttctgaagattaaacatatcgtcatggatgaaaccgagaatttttgttcaaagtacgggaattggtatatgaaggccaaaaatatcacacacccaaaagccaagggtacaggatcggagaatcttcaccacggtatcctctggttgtttctcgaccccttccagattcaccatgcagatgtgaacggacttccccctcccagtgcacaattcccacggaaaaccatcacatccgggatccactgtgcgctcgagatcgccaaagtcatgaaggaagagatgaagagaatcaaagagaacccaccttcaaacatgtcacccgatacacttgcactgttttctgagacagcgtacgaagaggccacgtgcgcacaggcactgccaggcgtgtgtgagacaaagactaacctcactactgagcagatcgctaactacgtcgcgagaaaatgtcatagtctgtttcagtgcggatacctgcccaaggacatagccatcctgtgtaggcgtggtgaagaccgcggaaggtaccgcttggcactgctcaaggccatggagcttattgaaacccaccgcccttccgaggtggtctttagcccagcgactggagtttggggatcccacatcgtgcttgacagcatccagcagttctcggggcttgaaagaaccgtggttttcggcctgtcccccgagtgcgaccagagcgaggaattccataaactgtgctttgcctcaagagccattaagcacctgtacttgctctatgagaagcgggccgcctactag

SEQ ID NO: 46865 - DNA, 2739 bp, Artificial Sequence
  derived and/or modified sequence
atggagagcctgaagacagacacagagatgccctacccagaggtgattgtggatgtgggccgggtcatctttggagaagaaaataggaagaagatgaccaacagctgcctgaagagaagtgagaacagccgcatcatccgggccatctgtgccctgctgaacagcggcggcggcgtcatcaaggccgagattgatgacaagacctacagctaccagtgccacggcctgggccaggacctggagaccagcttccagaagctgctgcccagcggcagccagaagtacctggactacatgcagcagggccacaacctgctgatctttgtgaagtcctggagcccagatgtgttcagcctgcccctgcgcatctgcagcctgcggagcaacctgtacagaagagatgtgaccagcgccatcaacctgagcgccagcagcgccctggagctgctgcgggagaagggcttccgggcccagaggggccggccccgggtgaagaagctgcacccccagcaggtgctgaaccgctgcatccaggaggaggaggacatgaggatcctggccagcgagttcttcaagaaggacaagctgatgtacaaggagaagctgaacttcacagagagcacccacgtggagttcaagcgcttcaccaccaagaaggtgatcccccgcatcaaggagatgctgccccactacgtgtctgcctttgccaacacccagggcggctacgtgctgattggagtggatgacaagagcaaggaggtggtgggctgcaagtgggagaaggtgaacccagacctgctgaagaaggagattgagaactgcatcgagaagctgcccaccttccacttctgctgtgagaagcccaaggtgaacttcaccaccaagatcctgaatgtgtaccagaaggatgtgctggatggctacgtgtgtgtgatccaggtggagcccttctgctgcgtggtgtttgctgaggccccagacagctggatcatgaaggacaacagcgtgacccggctgacagctgagcagtgggtggtgatgatgctggacacccagagcgccccacccagcctggtgacagactacaacagctgcctgatcagcagcgccagcagcgccaggaagagccctggctaccccatcaaggtgcacaagttcaaggaggccctgcagaggcacctgtttcctgtgacccaggaggaggtgcagttcaagccagagagcctgtgcaagaagctgttcagtgaccacaaggagctggagggcctgatgaagaccctcatccacccctgcagccagggcatcgtcatcttcagccgctcctgggccggagatgtgggcttcaggaaggagcagaatgtgctgtgtgatgccctgctgattgctgtgaacagccctgtggtgctgtacaccatcctgattgaccccaactggccaggcggcctggagtatgccaggaacacagcccaccagctgaagcagaagctgcagacagtgggcggctacacaggcaaggtgtgcatcatccccaggctcatccacctgagcagcacccagagcaggcctggagagatccccctgcgctaccccaggagctaccgcctggctgatgaggaggagatggaggacctgctgcaggccctggtggtggtgtccctgagcagccgcagcctgctgagtgaccagatgggctgtgagttcttcaacctgctgatcatggagcagagccagctgctgtctgagagcctgcagaagacccgggagctgttcatctactgcttccctggggtgaggaagacagccctggccatcaagatcatggagaagatcaaggacctcttccactgcaagcccaaggagatcctgtatgtgtgtgagagtgacagcctgaaggactttgtgacccagcagaccacctgccaggccgtgaccaggaagaccttcatgcagggcgagttcctgaagatcaagcacatcgtgatggatgaaacagagaacttctgcagcaaatatggcaactggtacatgaaggccaagaacatcacccaccccaaggccaagggcactggaagtgagaacctgcaccacggcatcctgtggctgttcctggaccccttccagatccaccacgcagatgtgaatggcctgcccccacccagcgcccagttccccaggaagaccatcaccagcggcatccactgtgccctggagatcgccaaggtgatgaaggaggagatgaagaggatcaaggaaaatccacccagcaacatgagcccagacaccctggccctcttcagcgagacagcctatgaggaggccacctgtgcccaggccctgcccggggtgtgtgagaccaagaccaacctgaccacagagcagatcgccaactacgtggccaggaagtgccacagcctcttccagtgtggctacctgcccaaggacatcgccatcctgtgcagaagaggagaagatcggggccgctaccgcctggccctgctgaaggccatggagctgattgagacccaccggcccagcgaggtggtgttctccccagccactggagtgtggggcagccacatcgtgctggacagcatccagcagttcagcggcctggagaggacagtggtgtttggcctgagcccagaatgtgaccagagcgaggagttccacaagctgtgctttgccagccgggccatcaagcacctgtacctgctgtatgagaagagagctgcctactag

SEQ ID NO: 46866 - DNA, 2739 bp, Artificial Sequence
  derived and/or modified sequence
atggagagcctgaagaccgacaccgagatgccctaccccgaggtgattgtcgacgtaggtcgcgtcatctttggagaagaaaatcgcaagaagatgactaactcttgcctgaagcgttctgagaattcccgtataatcagggcaatctgcgccctgctcaacagcggcgggggtgtgattaaagcagagatagacgataagacatactcctatcaatgtcatggcctgggacaggacctcgaaacttccttccagaaactgttgccatccggaagccagaaatacttagactacatgcagcagggacataacctactcattttcgtgaaaagctggtcacccgatgttttctccctgccgctgaggatttgctccctgagatccaacctgtaccgacgtgacgtgaccagtgcaatcaatctctccgcatcatccgcactggagctgctgagagaaaagggttttagagcacaaagaggacggcctagagtgaagaagctgcacccccagcaggtgttaaatagatgtatccaggaagaagaggacatgagaatactggcttccgaattcttcaagaaagataagctcatgtacaaagaaaagttaaatttcaccgagagcactcatgtggaattcaaaagattcaccaccaagaaagttattcccagaatcaaagaaatgctgcctcactacgtgagcgcttttgcaaacacacaggggggctatgtcctgatcggagtcgacgacaaaagcaaggaggttgtaggctgtaaatgggaaaaagttaatcctgatctgctgaagaaagagatcgagaactgcatcgaaaagttgcctacctttcacttttgctgcgagaaacctaaagtgaatttcacgacaaaaatactaaacgtgtatcagaaggatgttctggacgggtacgtttgtgtgattcaggttgaaccattttgttgtgtggtgttcgcagaggctccagactcttggattatgaaggataactctgtcactcggcttacagccgagcagtgggtcgtcatgatgctggatacacaatctgcccccccgtctctggtcaccgactacaactcttgcctcattagcagcgcatcttccgcccgaaaatcaccagggtaccctattaaagttcacaagttcaaggaagctcttcaacgccacttgtttcccgttacgcaagaggaagtgcagttcaaacccgagagcctctgcaagaaattattctcagaccacaaagagcttgaaggactgatgaagactctgatacacccttgctctcagggcattgtcatttttagccgcagctgggctggcgatgtaggctttagaaaggaacagaacgtcctgtgcgacgccctgctcatcgccgtgaattccccagtggtgttatataccatcttgattgaccctaactggccaggtgggctggaatacgcaaggaatacggcccaccagctgaaacagaaattgcagaccgttggtggttataccgggaaagtgtgtatcattcctagattaattcacctgagctccacacagtctcgtcctggggagatcccgctccgatacccacgcagttaccgcctggcagacgaagaagagatggaggatcttctgcaggcacttgtggtagtgagtctcagttcacggagcttgctctcggatcaaatgggctgtgaatttttcaatctcctgatcatggaacagagtcagctgcttagcgagagtctccagaaaacccgggagctgttcatctattgctttcctggtgtccggaagactgctctagccattaagattatggagaagatcaaggacctgttccactgcaaacccaaagaaattctgtatgtgtgtgaatctgactcattgaaagacttcgtcactcaacagaccacatgtcaggctgtgacccgcaaaacgtttatgcagggggagtttctaaaaataaaacacatcgtgatggacgaaactgaaaatttctgttctaaatacggcaactggtatatgaaggctaagaatattacccatcctaaggccaagggcaccggaagtgagaacctgcatcatgggatcctgtggctgttcctcgatccctttcagatccatcacgccgacgtaaacggcttgccccctcccagcgcccagttcccgaggaagactatcacctctggcatccactgcgcgctagagattgcaaaggtgatgaaggaggagatgaagcgcatcaaggaaaatcccccaagcaacatgtcccccgacacccttgccctcttcagcgaaaccgcatatgaggaagctacatgcgcccaggcactccccggagtgtgtgagactaaaactaatcttacaaccgagcagatcgccaactacgtggcccgcaagtgccactcgctctttcagtgcggttatctaccaaaggatatagctatcctctgtagaagaggggaagatcggggtcgataccggctagctctcctcaaggcgatggagctgatagagactcaccggcccagtgaggtggtcttctctcccgccaccggagtgtgggggagccacatcgtcctcgatagcatccagcagttctcaggattggagcgcaccgttgtgtttgggttgagccctgaatgtgaccagtcggaggagtttcataaactgtgctttgccagccgcgccatcaagcacctgtatctgctgtacgaaaaacgcgcagcgtactag

SEQ ID NO: 46867 - DNA, 2739 bp, Artificial Sequence
  derived and/or modified sequence
atggagagtctcaaaacagatactgaaatgccttatcccgaagtgatagtcgatgtggggagagtgatctttggggaagagaaccgtaagaagatgactaactcttgtctgaagcggtcagagaattctaggatcatacgcgctatatgcgccctcctcaacagcgggggtggcgttataaaagcggagatcgatgacaaaacttatagttatcagtgccatggcttaggacaggacctcgaaacctccttccagaagttacttccgtctggatcccagaaatacctggattatatgcagcagggacacaacctccttatcttcgtcaaatcttggtctcccgatgttttttctttgccactcagaatctgttccttgcggtctaatctgtataggagggatgttaccagtgcaatcaacctgagcgcttcctccgcccttgaacttctccgcgaaaagggttttcgagcacaacggggtcggccaagggtgaaaaagctccatccccagcaggtcctgaatcggtgtatccaggaggaggaagacatgcggatcctcgcctctgagtttttcaagaaggataagctgatgtacaaggaaaagctcaactttactgagagtactcacgtcgaattcaagaggtttaccaccaaaaaggtgattcctcgtatcaaggaaatgctgccgcactatgtttcagcttttgctaatacccagggaggctatgtgctcatcggcgttgacgacaaatcaaaggaggttgtgggatgcaagtgggaaaaggtgaatccagatttgctgaagaaagaaatagaaaactgcattgaaaaactgcctacattccatttctgctgcgaaaaacccaaggtgaacttcactacaaagatacttaacgtgtaccaaaaggatgtgcttgacggctatgtgtgcgttatacaggtggaacccttctgctgcgtcgtgtttgctgaggcccctgacagttggatcatgaaagataacagtgtcacaaggttgacagctgagcagtgggttgtgatgatgcttgatactcagtcggcacctccttcattggtgaccgattacaattcttgtctgatctcttccgccagttccgcaagaaagagtcccggttacccaataaaggtgcataaattcaaggaggctctgcagcggcatctcttccccgtgacacaagaggaggtccagtttaaacctgagagtctctgcaagaagttgttttctgatcataaggagctcgagggactgatgaagaccctcatccacccatgtagccagggaatcgtgattttttccaggagctgggctggtgacgtggggttcagaaaggaacagaatgtgctatgcgatgcactacttattgcggtgaactctcccgtagttctctacaccattttgatcgacccaaactggccgggtggtctagagtatgccagaaacacagcccaccagcttaagcaaaagctgcagacagtcggcggatatactggaaaagtgtgtatcattcctcgcctgatccatcttagtagcactcaaagccgccctggcgagatccctctccgctatccacgctcataccgcctagccgacgaggaggaaatggaagacctcctgcaggccttagtggtggtctccttgagctcacggtccttgctcagtgaccagatgggctgtgagttttttaatctccttataatggagcagagccagttgctatctgaatctctgcaaaagaccagagaattattcatctattgctttccaggtgtgaggaagacggcgctggccatcaagatcatggagaaaataaaagatctgttccactgtaagccgaaagagatactttacgtgtgcgaaagcgattctctgaaggacttcgtgactcaacaaactacgtgtcaggcagttactcgaaaaacgttcatgcaaggcgaattcctcaagataaagcacattgtaatggatgagactgagaacttttgttccaagtacggaaattggtacatgaaagccaaaaacatcacccacccgaaggccaaaggcacaggatctgagaaccttcaccatgggatcctctggctgttcctggacccatttcagattcaccatgcggacgttaacgggctgccgcctccatccgcacagtttccgagaaagaccataactagtggcatccattgcgctctcgagattgccaaagttatgaaggaggagatgaaaagaataaaagagaacccaccaagcaatatgtcacccgatactctggcactctttagcgagaccgcctacgaggaagccacatgtgctcaggcactccctggcgtttgcgagacaaagacaaatctgaccaccgagcaaattgccaactacgtggcgcgtaagtgtcactcactctttcagtgcggctatctgccaaaggacatcgctattctgtgcaggcgtggcgaagatcgcggtaggtatcgattggcgcttctgaaagctatggaattgatcgagacacataggccatccgaagtagttttttcccccgcaacgggggtgtggggttcacatatagtgcttgactctattcaacagttcagcggcctcgagcgcacagtggtctttggcttgagtcccgagtgtgaccaatctgaggaatttcataagctttgtttcgcctcccgcgcaataaagcacttgtaccttctctacgagaagagggccgcatactag

SEQ ID NO: 46868 - DNA, 2882 bp, Artificial Sequence
  derived and/or modified sequence
attgtttggagcacagaggggctgctgaaatggagagtctcaagactgatactgaaatgccgtatcctgaggtaatagtagatgtgggcagagtgatttttggagaagaaaacaggaagaagatgaccaacagctgtttgaaaagatctgagaattctagaattatccgggctatatgtgcactgttaaattctggaggtggtgtgatcaaagcagagattgatgataaaacctatagttaccaatgccatgggctgggacaggatttggaaacttcttttcaaaagctccttccttcaggttcacagaaataccttgactacatgcagcaggggcacaatctcctgatttttgtgaagtcatggagcccagatgttttcagccttccactaaggatttgcagcttgcgctccaatttgtatcggagagatgtgacttctgctatcaacttgagtgctagcagtgccctggagcttctcagagagaaggggtttagagcccaaagaggaagaccaagggtgaagaagttgcatcctcagcaggttctcaatagatgcattcaggaagaggaagatatgaggatattggcctcagaattttttaaaaaggacaaactcatgtataaggagaaactcaactttactgagtcaacacatgttgaatttaaaaggttcaccaccaaaaaagtcatacctcggattaaggaaatgctgcctcattatgtttctgcatttgccaacactcaagggggatatgtcctcattggggtggatgataagagcaaagaagtggttggatgtaagtgggaaaaagtgaatcctgacttactaaaaaaagaaatcgaaaactgcatagaaaaattgcctacattccacttctgctgtgagaagccaaaggtaaatttcactacaaaaatcctgaatgtgtaccaaaaagatgtcctggatggttatgtctgtgtgattcaagtggagcccttctgttgcgtggtgtttgcagaggccccagattcctggatcatgaaagacaattctgtcacacggctgacagctgagcagtgggtggtcatgatgctggatactcagtcagctcctcccagtttggtcacagactacaactcttgcctgatttcatcagcttcatctgcacgaaaaagtcccggatatcccataaaagtccacaaatttaaggaggctctgcaacgacatttgtttccagtgacacaggaagaggtacaatttaaaccagaatccctctgtaagaagctgttctcagatcataaagaactggagggtttaatgaagaccctgatacatccttgttctcaggggattgtgatattttctagaagctgggctggtgatgttggcttcaggaaagaacagaatgtcctgtgtgatgctctcctgatagcagttaacagccccgtggtactctatacaatcttaatagaccccaattggcctggaggacttgaatatgcccgaaacacagctcatcagttaaagcagaaactgcaaactgttggtggttacacagggaaagtgtgcatcattccaaggctgatacacctgagcagcacacagagtagacctggtgagatccccctgcgttaccccaggtcctacaggcttgctgatgaggaggaaatggaagacttgctgcaggctctggtggtggtctccctgtcctccagatctcttctgagtgaccagatgggctgtgaatttttcaacttgctcataatggagcagagccagttgctttctgagagtcttcagaagacacgtgaattattcatctactgctttccaggagtcaggaagacagccctagccataaagatcatggagaaaattaaggacttgtttcactgcaaaccaaaagagatcctctatgtttgtgaaagcgactccctaaaggattttgtgacccaacaaaccacctgccaagctgtgaccaggaaaactttcatgcaaggggagtttctaaagattaaacacatagtgatggatgagactgagaatttctgcagcaaatatggcaattggtacatgaaggctaagaacatcacccatccaaaggcgaaggggactggaagtgaaaaccttcaccatgggattctctggctttttcttgacccttttcaaatccatcacgcagatgtcaatggccttccccctccatctgctcagtttcctcgaaaaacaatcaccagtgggatccactgtgctctggaaatagcgaaggttatgaaagaagaaatgaagaggatcaaagaaaatcctccctccaacatgtctccagacacattagcattgttcagcgagactgcctatgaggaagcaacgtgtgcccaggctctgcctggggtgtgtgagacaaagactaatctgacaacagaacaaatagctaactatgtggcaagaaaatgtcacagcctgttccagtgtggctatctgcccaaagatatagcaattctgtgcaggagaggggaggacagaggacgctataggcttgcactactcaaagcaatggaattaattgagacccacagaccatcagaggttgtgtttagcccggccaccggtgtttggggaagtcacattgttttagacagtattcagcaattttcaggcctggagaggactgtcgtgtttgggcttagtccagaatgtgaccagtcagaggaatttcataagctctgctttgcttcaagagccattaaacacctctacctgctttatgaaaagagggcagcctactgaaaattattacaaataatagaggaagacaggaagagcagagtcctttctcctagacaggtagcagtgactccattttaatattacaagtgaggaaatcaaggcacatcagtatgg

SEQ ID NO: 46869 - protein, 2186 aa, Artificial Sequence
  derived and/or modified sequence
MVNENTRMYIPEENHQGSNYGSPRPAHANMNANAAAGLAPEHIPTPGAALSWQAAIDAARQAKLMGSAGNATISTVSSTQRKRQQYGKPKKQGSTTATRPPRALLCLTLKNPIRRACISIVEWKPFEIIILLTIFANCVALAIYIPFPEDDSNATNSNLERVEYLFLIIFTVEAFLKVIAYGLLFHPNAYLRNGWNLLDFIIVVVGLFSAILEQATKADGANALGGKGAGFDVKALRAFRVLRPLRLVSGVPSLQVVLNSIIKAMVPLLHIALLVLFVIIIYAIIGLELFMGKMHKTCYNQEGIADVPAEDDPSPCALETGHGRQCQNGTVCKPGWDGPKHGITNFDNFAFAMLTVFQCITMEGWTDVLYWVNDAVGRDWPWIYFVTLIIIGSFFVLNLVLGVLSGEFSKEREKAKARGDFQKLREKQQLEEDLKGYLDWITQAEDIDPENEDEGMDEEKPRNMSMPTSETESVNTENVAGGDIEGENCGARLAHRISKSKFSRYWRRWNRFCRRKCRAAVKSNVFYWLVIFLVFLNTLTIASEHYNQPNWLTEVQDTANKALLALFTAEMLLKMYSLGLQAYFVSLFNRFDCFVVCGGILETILVETKIMSPLGISVLRCVRLLRIFKITRYWNSLSNLVASLLNSVRSIASLLLLLFLFIIIFSLLGMQLFGGKFNFDEMQTRRSTFDNFPQSLLTVFQILTGEDWNSVMYDGIMAYGGPSFPGMLVCIYFIILFICGNYILLNVFLAIAVDNLADAESLTSAQKEEEEEKERKKLARTASPEKKQELVEKPAVGESKEEKIELKSITADGESPPATKINMDDLQPNENEDKSPYPNPETTGEEDEEEPEMPVGPRPRPLSELHLKEKAVPMPEASAFFIFSSNNRFRLQCHRIVNDTIFTNLILFFILLSSISLAAEDPVQHTSFRNHILFYFDIVFTTIFTIEIALKILGNADYVFTSIFTLEIILKMTAYGAFLHKGSFCRNYFNILDLLVVSVSLISFGIQSSAINVVKILRVLRVLRPLRAINRAKGLKHVVQCVFVAIRTIGNIVIVTTLLQFMFACIGVQLFKGKLYTCSDSSKQTEAECKGNYITYKDGEVDHPIIQPRSWENSKFDFDNVLAAMMALFTVSTFEGWPELLYRSIDSHTEDKGPIYNYRVEISIFFIIYIIIIAFFMMNIFVGFVIVTFQEQGEQEYKNCELDKNQRQCVEYALKARPLRRYIPKNQHQYKVWYVVNSTYFEYLMFVLILLNTICLAMQHYGQSCLFKIAMNILNMLFTGLFTVEMILKLIAFKPKGYFSDPWNVFDFLIVIGSIIDVILSETNHYFCDAWNTFDALIVVGSIVDIAITEVNPAEHTQCSPSMNAEENSRISITFFRLFRVMRLVKLLSRGEGIRTLLWTFIKSFQALPYVALLIVMLFFIYAVIGMQVFGKIALNDTTEINRNNNFQTFPQAVLLLFRCATGEAWQDIMLACMPGKKCAPESEPSNSTEGETPCGSSFAVFYFISFYMLCAFLIINLFVAVIMDNFDYLTRDWSILGPHHLDEFKRIWAEYDPEAKGRIKHLDVVTLLRRIQPPLGFGKLCPHRVACKRLVSMNMPLNSDGTVMFNATLFALVRTALRIKTEGNLEQANEELRAIIKKIWKRTSMKLLDQVVPPAGDDEVTVGKFYATFLIQEYFRKFKKRKEQGLVGKPSQRNALSLQAGLRTLHDIGPEIRRAISGDLTAEEELDKAMKEAVSAASEDDIFRRAGGLFGNHVSYYQSDGRSAFPQTFTTQRPLHINKAGSSQGDTESPSHEKLVDSTFTPSSYSSTGSNANINNANNTALGRLPRPAGYPSTVSTVEGHGPPLSPAIRVQEVAWKLSSNRCHSRESQAAMAGQEETSQDETYEVKMNHDTEACSEPSLLSTEMLSYQDDENRQLTLPEEDKRDIRQSPKRGFLRSASLGRRASFHLECLKRQKDRGGDISQKTVLPLHLVHHQALAVAGLSPLLQRSHSPASFPRPFATPPATPGSRGWPPQPVPTLRLEGVESSEKLNSSFPSIHCGSWAETTPGGGGSSAARRVRPVSLMVPSQAGAPGRQFHGSASSLVEAVLISEGLGQFAQDPKFIEVTTQELADACDMTIEEMESAADNILSGGAPQSPNGALLPFVNCRDAGQDRAGGEEDAGCVRARGRPSEEELQDSRVYVSSL

SEQ ID NO: 46870 - DNA, 13624 bp, Artificial Sequence
  derived and/or modified sequence
ttattttttcaaatggtgtagccgccggaggtgcggtgctcagttcttggaaggggcccggatgtactgaggatgcgttacagtttcactcgaggaggcagtagtggaaaggagcagtttttggggtttgatgccataatgggaatcaggtaatcgtcggcggggaagaagaaacgctgcagaccacggcttcctcgaatcttgcgcgaaagccgccggcctcggaggagggattaatccagacccgccggggggtgttttcacatttcttcctcttcgtggctgctcctcctattaaaaccatttttggtccatggtcaatgagaatacgaggatgtacattccagaggaaaaccaccaaggttccaactatgggagcccacgccccgcccatgccaacatgaatgccaatgcggcagcggggctggcccctgagcacatccccaccccgggggctgccctgtcgtggcaggcggccatcgacgcagcccggcaggctaagctgatgggcagcgctggcaatgcgaccatctccacagtcagctccacgcagcggaagcggcagcaatatgggaaacccaagaagcagggcagcaccacggccacacgcccgccccgagccctgctctgcctgaccctgaagaaccccatccggagggcctgcatcagcattgtcgaatggaaaccatttgaaataattattttactgactatttttgccaattgtgtggccttagcgatctatattccctttccagaagatgattccaacgccaccaattccaacctggaacgagtggaatatctctttctcataatttttacggtggaagcgtttttaaaagtaatcgcctatggactcctctttcaccccaatgcctacctccgcaacggctggaacctactagattttataattgtggttgtggggctttttagtgcaattttagaacaagcaaccaaagcagatggggcaaacgctctcggagggaaaggggccggatttgatgtgaaggcgctgagggccttccgcgtgctgcgccccctgcggctggtgtccggagtcccaagtctccaggtggtcctgaattccatcatcaaggccatggtccccctgctgcacatcgccctgcttgtgctgtttgtcatcatcatctacgccatcatcggcttggagctcttcatggggaagatgcacaagacctgctacaaccaggagggcatagcagatgttccagcagaagatgacccttccccttgtgcgctggaaacgggccacgggcggcagtgccagaacggcacggtgtgcaagcccggctgggatggtcccaagcacggcatcaccaactttgacaactttgccttcgccatgctcacggtgttccagtgcatcaccatggagggctggacggacgtgctgtactgggtcaatgatgccgtaggaagggactggccctggatctattttgttacactaatcatcatagggtcattttttgtacttaacttggttctcggtgtgcttagcggagagttttccaaagagagggagaaggccaaggcccggggagatttccagaagctgcgggagaagcagcagctagaagaggatctcaaaggctacctggattggatcactcaggccgaagacatcgatcctgagaatgaggacgaaggcatggatgaggagaagccccgaaacatgagcatgcccaccagtgagaccgagtccgtcaacaccgaaaacgtggctggaggtgacatcgagggagaaaactgcggggccaggctggcccaccggatctccaagtcaaagttcagccgctactggcgccggtggaatcggttctgcagaaggaagtgccgcgccgcagtcaagtctaatgtcttctactggctggtgattttcctggtgttcctcaacacgctcaccattgcctctgagcactacaaccagcccaactggctcacagaagtccaagacacggcaaacaaggccctgctggccctgttcacggcagagatgctcctgaagatgtacagcctgggcctgcaggcctacttcgtgtccctcttcaaccgctttgactgcttcgtcgtgtgtggcggcatcctggagaccatcctggtggagaccaagatcatgtccccactgggcatctccgtgctcagatgcgtccggctgctgaggattttcaagatcacgaggtactggaactccttgagcaacctggtggcatccttgctgaactctgtgcgctccatcgcctccctgctccttctcctcttcctcttcatcatcatcttctccctcctggggatgcagctctttggaggaaagttcaactttgatgagatgcagacccggaggagcacattcgataacttcccccagtccctcctcactgtgtttcagatcctgaccggggaggactggaattcggtgatgtatgatgggatcatggcttatggcggcccctcttttccagggatgttagtctgtatttacttcatcatcctcttcatctgtggaaactatatcctactgaatgtgttcttggccattgctgtggacaacctggctgatgctgagagcctcacatctgcccaaaaggaggaggaagaggagaaggagagaaagaagctggccaggactgccagcccagagaagaaacaagagttggtggagaagccggcagtgggggaatccaaggaggagaagattgagctgaaatccatcacggctgacggagagtctccacccgccaccaagatcaacatggatgacctccagcccaatgaaaatgaggataagagcccctaccccaacccagaaactacaggagaagaggatgaggaggagccagagatgcctgtcggccctcgcccacgaccactctctgagcttcaccttaaggaaaaggcagtgcccatgccagaagccagcgcgtttttcatcttcagctctaacaacaggtttcgcctccagtgccaccgcattgtcaatgacacgatcttcaccaacctgatcctcttcttcattctgctcagcagcatttccctggctgctgaggacccggtccagcacacctccttcaggaaccatattctgttttattttgatattgtttttaccaccattttcaccattgaaattgctctgaagatcctaggcaatgcagactatgtcttcactagtatctttacattagaaattatccttaagatgactgcttatggggctttcttgcacaagggttctttctgccggaactacttcaacatcctggacctgctggtggtcagcgtgtccctcatctcctttggcatccagtccagtgcaatcaatgtcgtgaagatcttgcgagtcctgcgagtactcaggcccctgagggccatcaacagggccaaggggctaaagcatgtggttcagtgtgtgtttgtcgccatccggaccatcgggaacatcgtgattgtcaccaccctgctgcagttcatgtttgcctgcatcggggtccagctcttcaagggaaagctgtacacctgttcagacagttccaagcagacagaggcggaatgcaagggcaactacatcacgtacaaagacggggaggttgaccaccccatcatccaaccccgcagctgggagaacagcaagtttgactttgacaatgttctggcagccatgatggccctcttcaccgtctccaccttcgaagggtggccagagctgctgtaccgctccatcgactcccacacggaagacaagggccccatctacaactaccgtgtggagatctccatcttcttcatcatctacatcatcatcatcgccttcttcatgatgaacatcttcgtgggcttcgtcatcgtcacctttcaggagcagggggagcaggagtacaagaactgtgagctggacaagaaccagcgacagtgcgtggaatacgccctcaaggcccggcccctgcggaggtacatccccaagaaccagcaccagtacaaagtgtggtacgtggtcaactccacctacttcgagtacctgatgttcgtcctcatcctgctcaacaccatctgcctggccatgcagcactacggccagagctgcctgttcaaaatcgccatgaacatcctcaacatgctcttcactggcctcttcaccgtggagatgatcctgaagctcattgccttcaaacccaagggttactttagtgatccctggaatgtttttgacttcctcatcgtaattggcagcataattgacgtcattctcagtgagactaatcactatttctgtgatgcatggaatacatttgacgccttgattgttgtgggtagcattgttgatatagcaatcaccgaggtaaacccagctgaacatacccaatgctctccctctatgaacgcagaggaaaactcccgcatctccatcaccttcttccgcctgttccgggtcatgcgtctggtgaagctgctgagccgtggggagggcatccggacgctgctgtggaccttcatcaagtccttccaggccctgccctatgtggccctcctgatcgtgatgctgttcttcatctacgcggtgatcgggatgcaggtgtttgggaaaattgccctgaatgataccacagagatcaaccggaacaacaactttcagaccttcccccaggccgtgctgctcctcttcaggtgtgccaccggggaggcctggcaggacatcatgctggcctgcatgccaggcaagaagtgtgccccagagtccgagcccagcaacagcacggagggtgaaacaccctgtggtagcagctttgctgtcttctacttcatcagcttctacatgctctgtgccttcctgatcatcaacctctttgtagctgtcatcatggacaactttgactacctgacaagggactggtccatccttggtccccaccacctggatgagtttaaaagaatctgggcagagtatgaccctgaagccaagggtcgtatcaaacacctggatgtggtgaccctcctccggcggattcagccgccactaggttttgggaagctgtgccctcaccgcgtggcttgcaaacgcctggtctccatgaacatgcctctgaacagcgacgggacagtcatgttcaatgccaccctgtttgccctggtcaggacggccctgaggatcaaaacagaagggaacctagaacaagccaatgaggagctgcgggcgatcatcaagaagatctggaagcggaccagcatgaagctgctggaccaggtggtgccccctgcaggtgatgatgaggtcaccgttggcaagttctacgccacgttcctgatccaggagtacttccggaagttcaagaagcgcaaagagcagggccttgtgggcaagccctcccagaggaacgcgctgtctctgcaggctggcttgcgcacactgcatgacatcgggcctgagatccgacgggccatctctggagatctcaccgctgaggaggagctggacaaggccatgaaggaggctgtgtccgctgcttctgaagatgacatcttcaggagggccggtggcctgttcggcaaccacgtcagctactaccaaagcgacggccggagcgccttcccccagaccttcaccactcagcgcccgctgcacatcaacaaggcgggcagcagccagggcgacactgagtcgccatcccacgagaagctggtggactccaccttcaccccgagcagctactcgtccaccggctccaacgccaacatcaacaacgccaacaacaccgccctgggtcgcctccctcgccccgccggctaccccagcacggtcagcactgtggagggccacgggccccccttgtcccctgccatccgggtgcaggaggtggcgtggaagctcagctccaacaggtgccactcccgggagagccaggcagccatggcgggtcaggaggagacgtctcaggatgagacctatgaagtgaagatgaaccatgacacggaggcctgcagtgagcccagcctgctctccacagagatgctctcctaccaggatgacgaaaatcggcaactgacgctcccagaggaggacaagagggacatccggcaatctccgaagaggggtttcctccgctctgcctcactaggtcgaagggcctccttccacctggaatgtctgaagcgacagaaggaccgagggggagacatctctcagaagacagtcctgcccttgcatctggttcatcatcaggcattggcagtggcaggcctgagccccctcctccagagaagccattcccctgcctcattccctaggccttttgccaccccaccagccacacctggcagccgaggctggcccccacagcccgtccccaccctgcggcttgagggggtcgagtccagtgagaaactcaacagcagcttcccatccatccactgcggctcctgggctgagaccacccccggtggcgggggcagcagcgccgcccggagagtccggcccgtctccctcatggtgcccagccaggctggggccccagggaggcagttccacggcagtgccagcagcctggtggaagcggtcttgatttcagaaggactggggcagtttgctcaagatcccaagttcatcgaggtcaccacccaggagctggccgacgcctgcgacatgaccatagaggagatggagagcgcggccgacaacatcctcagcgggggcgccccacagagccccaatggcgccctcttaccctttgtgaactgcagggacgcggggcaggaccgagccgggggcgaagaggacgcgggctgtgtgcgcgcgcggggtcgaccgagtgaggaggagctccaggacagcagggtctacgtcagcagcctgtagtgggcgctgccagatgcgggcttttttttatttgtttcaatgttcctaatgggttcgtttcagaagtgcctcactgttctcgtgacctggagttaaccggaacagcgtcttcattcatttctgttgggaccagacgcggagcctgggtgcgcgagccgccctccgggaggaaggcgcccggctgcgtctgcagaggcggggagaggaggcggcgagggtcccggggcgcgaggaaggcgcctgccctctcccagctcgcaggccccgggcccggccgcgcctccgcggggagagcaccccggcttcccgcgcgccctcaccaaaaggaccctacagcaaacgggtgtctttcgactctgcttgtagaaaccatttgcacatattctgtacgagcctcgctgtctccctagagccagggccctgcggatttggagaagggagcggggcaggacttccaggaggaccccaacccggcccggagagggaggaggaggcctccaggggcgcggagctctggggatgggcgtcgggccggcagtggtgcggctcactccgtccctgcccacctgcgacgggatcccccgaccggcacgggccacgccgagctcccggccagccgccggcccgcaggcagcgcgagggaggagctgcgccgccggctccgcccaaccaggtggtgctgagcttccgctgagcgctcttttgttttgtggtttgacacttttcttgacagcatgttgcagtttcttttcggttttggttttttttaaatgttttattttgctttcccagcgggaggggaggaagaagagtgtttacaaagtcctgtagccccctcacctttctgttttcacttttgccaatgtacatcgggtttggttttcttgtattatttaaacggttgtggtttcctttttccacggaggttcaatagaagccgctgcaggagagttttaccaaccattgtgtatgcccaataatttgttatcatttccttaggtagtaacctatttttgttctggtttggttcggttatctaatggaaaggtaactggcaatgcacttgatgtggtcttgcacatgtgggtgatagagttgggttcctttttatgctgggtgtacaggtgggtttgggagagaggagcatgcgcgagagagtctccgagtgtgtgcgacgcgtgtgtgtgtggtgggttgtctgtgtgcatatgtcctgcccgtgtatatgcacccacaccatgtgcccgtgcacaccagtgactacgcagtcccccctttctggtttagctgtgggaagatctgaatctggggccgtttgaaagcaaaaacaaaccactgtctctgcttctgaaacgggaatcagtaactctttgcattttctgtcccacaagatatgcaaaaacaatgcaataatattcatttaaaaatacaattgtgagttgtgttggcattaaaactgtattttaaaaaaagacagaaatttaagggaaaaacacaagaaggcattttgcttcaatatattccgtgtaatgttttattgcattgataatgtttctgttgaagaaaccgttatacttgaattcaggtcagtttcagtatttttcaaatatttttttaaaactgaattgcaattgtgccaagcgaatataatgaattgaattaagttggttttcggattcacttcttgtatattttgctgcatgtaaagtaaatcattttgtatttggagtgtgacaagctttacctttgaactcaagtgcttttctatatgtggttgggggaaagggaacaagttttctttagtttgcacaatgagcaaaggtatcaccagtgtagtcattattctgctctccacaaacaggtttggacattactgttttgcatatcttgtgtttgcttacatttccctcaatttttccaaaatcgtttgctgggtatgtttgtaccgcctcttgctgtgagagaccaggacctattttattccagtcttcactctgtccactctgctctggtcatctgatttggtacttctccaagaacagcccttcactgtgaggtgcagggaggcgttctgatgagccctcagtcactgggccgtcatccgcatcccccatggaagaggtagctggctttcccttcccttccaccacacggaattttctctttggcttccttaggaaagtgtacactaaccgggaggataaaattaaagtcaggctgcttggagggaggggcatcctcacttccggattcttgttgctctacccaacaaggacagcaggggctcgagaaaggaactggtgaaaccctgatccatctgaaagtcaactctgcgtgctcctttctccatcccttcctcactctggagcagcctttccttcaggcttgccctaatgtttgggctgccggggagggggccaggacaagggaagaggcatccggagctcacagtgggggtgggaacagatttttgtgggggcatctctaatgctcacttatatctccctagaacatcactcttttggtgctgtgtccttcaaatgtatgtcaacagtggtggctgaaaagggactgctttggggaaaacaggacccaaccattcacccagaattgacccattaaatctcttccagtcctagtgttccctgagcccctcttggcacatatataagtaagctagaaattacaataagggacagtccattcctctatgacagcttgctggactgattcatgacaaagtggagaaatgtactcaatactccccggttaacacagtctagaaacagagtttctttatggatatccacacccaagtcatccaaactttcttgattccttttcactgccatcaaggtcctctagaaattgagtttaggtatcatcctttgaaaagttcccaagatttctaccaggaggtacacacaggcgttccctgtctagggcaggaggactatcctagcttgaccttctgatccactagaataagactggcgtatgatgcctgtcatcagaacagactggcacaagtagtgacatcaatgaaccacagcacaatcttccaagtgatgtctactctccacctaaaatggaattttccccatgaccttgtaaaacataattgtcacatcttccatacccctcctgacagcccccaagtgtcaggagaaaacagtcaggggctaagggcccaagggacttgaagaaacaacagtttaaggtctgcagtttggtcaacttaattcttgtcctccgaccagccctgcctctttcatttccagaccttggagaatttttcccagctttgattcagaaggtactagttataacccctttccttcttcttaatccaataggcctcactctcactgggaaatccactcaaaggaacaaggcaatgtctctcattctatttcccagttccaaattccaggtgcttgtctggagtgaagctacccgttactttctcccagcttttctccacccagcatgtctcctgcccatgcagctgaagacagtggggcaacctcaggagaagcagacctttccatgcccaagttcatctcctgagcaacagtgacacctagaaaatgaggactttggaagtcacccaaaagatggtggctactttatggagtcctgaagatacacagccaccactcctaaaggcaaagaaagaaaacacgaatgtaggtcagggatagagtggaaccctggtcatcggggtttttagcctcatcgtgggaaaggtggtaaaggaggatgatggcatctccatccctagaggccaagaattgaaatatcattgtcaaggattagaaacaattcagcaaagaggccacaaaaagggcctgctgactcccagaagacctctttaaaccccaggggaggcaaatacttgctgatggagtctgggccgtttccatattttaaagaagacctgcctctggggcaaatgtcagcacagagaggactgggaggagaatggaggcaagaaaagggcatattttgactccctctgtgcctcttcccagttcatggaaggatgtgttcagcttacccacccacagtgaccagtgtggtggagccgctgacatctcaaggatctatttgggaaggtgagaagagtactcattccatctgggggtgttgttccagccacatcagcctacctggtgggatgtgggggtgtctgccaccctgtcccccctctgctgatgtccctcccctcaggctgtccaggtgccacctgacacaggctgctgtgcaaagacaggcggggaagcccaaacctcactcccagggaggccctcagccgccagagtccaggttctccagaggctacgatttgaggaggttgagggggaagacaggagggaaagaaaagtcctacaactgtcaggaatggggcacctttccctgtccctaagcaaagctccctcttcccactgccctccccagccccagctccctgtcctccccaacacctagtgagaaagacggtgcgtggaagggagtcccatgggcagatgcttacacgacctctttgtgaagcctcttctgggtttaacttcattcatcaatttattcttatgtcaaagcaatgaaacttttctttctggagccagataccaatacaacaggtgaacgggtttctgccacatctctacattgacgggggatgcttgaacaacccccctcactacacagacacacaccgttaaggcacaagggctggggttgagctctagatgagggactttcctgctcctgcaagggtgagcactgtatacacagacaaggagggtgcagtagagtgactcccttggatggaagtagtaccatcagaacctactattattatgacataaattctatttacatacattgagagaatactacaatcaacactttttcctgggatgactttaagaggtttgagccacagcacctgaagtggcaaagatccatggtctttgtagggtattagagaactcttccagtcacctctgaaagcactctagatcttgcagctgagtggatgaagtgtaacaaatctgttgcacgctgagaggagtcagaattagcatttttcatgaaagttccccacgtctctactaagaatgaggaagaaaagactaagactaggtaattacacagaggcttgaaatgttacatcaccagagccaagtcctctcccttcagatcagttactggctgctacacagggacacccccaccttttcagggcatcccatgcactccacttctcaggatctaaggaatttgactttgtagggatcccagaaagggcactgtgccacttcccctggtgtgaatcagacatacattgtacattcatttctaaaattcactcatgcacctcaaaccaaggtcattatccaaaaaaaaaaaaaaaaagctctgggtggaagagtttgtaagttttaagagagggtcatttctatgtgaggaaatgcagaaatggacagaatgattcttattcactgtttgggtctggagaattcccattgtggaaatcttagagatctcaagtttattaccaagggaataaggaaaaaaaggtgagcaggcaccaggccaagcagtggctcccttgccaaggaacctgaggctgcaggtttcagggacccccttgaagaaacctctcctggccattggccaggagaaaagagaagtctctcctgtagagtcacaagagaagcaaaagagggtgggtcactgggtcctggacatagcccccaaccccaagacttcccaatatggagaaactacaccaatgtttaaaaggggaaaaggaaagaacttgtacatcaagggaagatgatttgtaaacacacagtcctgtgcagaaagatccccttcaggaggtgtctccagcatcccaaagctgtgcgcaccttctcttttcctgcctcaggccacctatgcatccagctgcagcccatacccacacctgaaatccatctcttgaatcccagccaggttatataccaccccattgccatgtcctgtcctggccagaatgcatgctgttcccccaagcctcgtgggagtgaggccatgggaaacagagatgagcatgtctggacaagtctgtgatggtagtggatgagaataacccatggcaaaacacgcacattcattaagaaatagggcgacagattccccgttggtgaagcactgaaaggtctattactctcataatattgctgttttattttaatccaccagagctaccatgcaaaactttcctcctgtgaaacgctccagataaagctcctctaatctccccttccctcatgtcctccagctcaaacccaccttcatcccccaaaccaatctgtatcatgcctgttatcagagaggcacagaaagatgggcagtgcctccgttgtcaccattccccacacccctacacacccccacaccctcccctccaggctccacgacttcacagtcttactgttgtaaatatcattgtacagtttgtaatcctcaaataatcccattgtcagaggcctcgcctgatgggccttctcaccctcgagaaaggccagggaatctagaaggggcaacccttcaaggagagcttcagggtcatctctgtgtgagacactattgtatattcctgtaagattgcatttttatctaaggaatgatgttatttaaaaaacaaacaaaaaacacaaaaaataagaattgcaaataaatttcttaacaatgtct

SEQ ID NO: 46871 - DNA, 6561 bp, Artificial Sequence
  derived and/or modified sequence
atggtcaacgagaacacacgcatgtatattcccgaggagaaccaccaaggttctaactatgggtcacccaggccagctcatgcaaacatgaatgccaacgccgcggcggggctggccccggaacatatccctacccctggggccgccttgtcctggcaggcagcaatcgacgctgcccgccaggccaaactgatgggcagcgcgggaaacgcaactattagcacagtgagcagcacccagcgcaagcggcagcaatatgggaagcctaagaagcagggatccacaaccgccactaggcctccccgcgcgttgctgtgcctaaccctgaagaatcccatccgacgggcctgtataagtattgtggaatggaaaccttttgaaattattattttactaacaatcttcgcaaactgtgtggctcttgctatctatattcccttccccgaggatgattccaacgccaccaattcgaatttagagcgggtcgagtatttattcctgattattttcaccgttgaagcctttctcaaagtcattgcatacgggctcctgttccaccctaatgcctatctgaggaacggttggaacctcttggatttcataattgtggtggtggggctgttcagcgccattctggaacaggccactaaagctgacggcgccaacgcactggggggaaaaggtgcgggctttgacgtaaaggccctgcgggccttcagggtacttaggccattgcgccttgtcagtggagtgccatcactccaggttgtgttgaactccataattaaggcaatggtgccactcctgcatatagcgttgcttgtcctgtttgtaattattatctacgctataatcggactggagttattcatgggaaaaatgcataagacgtgttacaatcaggaaggaatcgccgatgtaccagccgaagacgacccttccccttgcgcgcttgagaccggccatgggcggcagtgtcagaatggaacggtctgcaagcccggctgggacgggcccaaacacggtattacaaacttcgataatttcgcttttgccatgttgactgtattccagtgtatcacgatggaaggttggaccgatgtcttatactgggttaacgacgctgtgggacgcgactggccctggatctacttcgttacgctcatcataatcggttctttttttgttctgaaccttgtcctcggtgttttgtccggtgagttctcaaaagagagagaaaaagcaaaggcccggggggacttccagaagctacgggaaaaacaacagctcgaagaagacctgaaagggtacctagattggatcacccaggccgaggacatcgaccccgaaaacgaagatgaaggcatggacgaggagaaaccacgtaatatgagcatgcccaccagtgagacagaatcggtgaacaccgaaaacgtcgccggcggcgatatcgagggtgaaaattgcggagcccgtcttgctcatcgcataagcaagtctaagttttcacggtactggcgtcgctggaaccgtttctgccgacgcaaatgtcgagcggctgtcaaatcaaatgtgttctactggctcgtaatctttctcgtgttcctcaacaccctcaccatagcctcagaacattacaatcagccaaattggctcacggaagttcaggacactgctaacaaggcgttgctagcattgttcaccgctgagatgctactgaaaatgtatagtctagggctacaggcttatttcgtatctctgtttaacagattcgattgctttgttgtttgcggagggatcttggagactatcctggtcgaaactaaaattatgtcccctttaggaatatccgtcctaagatgtgtgcgactcctgcgtattttcaagatcacccggtactggaatagtttgagcaacctggtggctagcctcctaaattcggtgcgcagtatcgcctctctcctactcttgctgtttctcttcataattatatttagcttactgggtatgcagctgtttggcgggaaatttaatttcgatgaaatgcagacacgccggagtaccttcgataattttccacagtccctgctcacagttttccaaatccttacaggcgaagattggaactccgtgatgtacgatggcattatggcgtatggtgggccctcgttccctggcatgttagtttgtatctactttattattttgtttatatgtgggaactacatcctcttgaatgtgttcctcgctatcgccgttgacaacctggccgacgcagagagtttgacgtccgctcagaaagaggaagaagaagaaaaagagcgcaagaaacttgcaagaaccgcctctcctgaaaaaaagcaggagctcgtcgagaaacctgcagtgggcgagtctaaggaagagaagattgaactcaagtccataaccgccgatggcgaatctccccccgccaccaagatcaatatggacgacctccaacccaatgaaaatgaggataagtccccgtatcccaaccccgagaccaccggagaggaggacgaggaggagccagagatgcccgtgggaccccgaccgaggcccctatctgaattacatttgaaggaaaaggccgtacccatgcctgaggcgagcgcattctttatcttcagctccaataatcgcttccggctccagtgccacaggatcgttaatgacactatctttaccaatttgattcttttctttattctcctgagtagtatcagtttagccgcagaggaccctgtgcagcatacctctttcaggaatcacatacttttctattttgacattgtctttaccactatttttacaatcgagattgcactgaagattctgggaaacgcagattatgtctttacttctattttcaccttggaaatcattctgaagatgaccgcctatggcgcgtttttacataaaggctccttctgtagaaactatttcaatatcctggatctcctggtcgtttccgtctcattgatctctttcggaattcagagctccgctattaacgttgttaagatcctcagagttctaagggtgcttcggcctctcagagccatcaatcgggctaagggtctgaagcacgtggtgcagtgcgtgttcgtagctatccggacaatcgggaacatcgtgatcgtgactaccctactccaatttatgttcgcatgtataggcgtccagcttttcaagggcaagctgtacacttgctcagattctagtaaacaaactgaagccgagtgcaaaggaaattatatcacctataaagatggcgaagtggatcatcccataatccagccaagatcttgggagaacagcaagttcgatttcgacaatgtcttggcagcgatgatggccctgttcacagtcagtacattcgaaggttggcccgagctgctttatagatccatcgactctcatacagaggataaaggcccaatctacaactacagagtggaaatcagcatcttttttataatatatattatcataattgccttttttatgatgaatattttcgtcggatttgtgattgtaacattccaagaacaaggcgaacaggaatacaaaaattgcgagctggataagaaccagaggcagtgcgtggagtatgctctgaaagcacgtcccctgcgtagatacattccaaaaaaccagcaccagtataaggtgtggtacgttgtgaactctacgtacttcgagtatctcatgtttgttcttatccttctgaatactatttgcttggccatgcagcattatggccagtcctgtttgttcaaaatagcaatgaacattctgaacatgctctttaccggcctgtttactgtggagatgatcctcaaactcatcgcattcaaacccaaagggtactttagcgacccatggaacgttttcgactttttaattgtgatcggctcaatcatagacgtgatcctgtctgagacaaaccattacttttgtgacgcgtggaacaccttcgatgcactcattgtcgtcggatcaatagttgacatcgcaattaccgaggtgaatcctgctgagcacacccagtgcagcccttcaatgaacgctgaagagaactctcgcattagcattaccttctttcggctttttcgcgttatgcgactggttaagctcctgtctcgtggcgaggggatcaggactctgctgtggaccttcataaaatcctttcaggccctgccctacgtggccttactgattgtaatgctgttcttcatctatgcggtcataggaatgcaggtgttcgggaagattgccctgaatgataccaccgagattaaccgcaataacaatttccagacatttccacaggcagttctcctgctgttccggtgcgctaccggtgaggcttggcaggacattatgctagcgtgtatgccaggtaagaagtgcgcgccagaatccgaaccatccaattcgacagagggcgaaactccgtgtggctcctccttcgccgttttctactttatcagcttttacatgctttgtgcctttctgattattaatttgtttgttgccgtgatcatggacaacttcgactacctgactcgggactggtccattctgggcccacatcatctggatgaattcaaaaggatctgggctgagtacgacccagaagcaaagggtcgaattaagcacctggatgttgtaactcttttgcggcggatccaacctcccttaggttttggaaagctgtgcccgcatcgggtcgcctgcaagcgccttgtaagcatgaacatgccactgaattcagacggaaccgttatgtttaacgccacactctttgcactcgttagaacagctctcagaatcaagaccgagggcaacctggagcaggcaaacgaggaattacgtgcaatcatcaagaagatttggaagcgcacatctatgaaacttctcgatcaggtggttccgccggctggggacgatgaagttacggttggcaagttctacgcaaccttcctcatccaagaatactttcgcaagtttaaaaagaggaaggagcagggtttggttggtaaaccgtcacagcgcaatgctcttagcttgcaagctgggctccgcactcttcatgatattgggccagaaattcggagggccatttcaggcgatctgaccgccgaggaggaattggataaagcaatgaaggaggccgtgagcgccgcgagcgaagatgatattttcaggcgggctgggggcttattcgggaatcatgtgagctattatcagtcggacggccgctcagccttccctcagacattcactacccagcgccctctacacattaacaaagccggatcgtcccagggcgacaccgagtcacctagccacgagaaattggtcgattccaccttcacacccagcagttactcttcgacaggaagtaatgctaatatcaataatgccaacaataccgccctgggcagattacctcgccctgccgggtaccccagcacggtgtccaccgtggagggacacgggccccctctttctcccgccatcagagtccaagaggtcgcctggaagctcagctctaataggtgccactccagagagtcccaggctgccatggccggtcaagaggagacgtctcaggatgaaacatatgaggtaaagatgaaccatgatactgaagcatgttccgagcccagccttctcagcaccgaaatgttgagctatcaggatgatgagaataggcagctgactctgccggaagaagataaacgcgatattcggcagtctcccaagcgaggctttctacgatctgccagccttggcagaagagcctctttccacctggagtgtttgaaaagacagaaagaccggggaggggacatttcccagaaaaccgttctgccactgcatcttgttcatcaccaggccctggcggtcgccggactttctccgttactccagcgatcccattcaccagcatcgttcccccgtcccttcgcgacaccccccgctactccgggctctcgggggtggcccccgcagccggtacccacactgagactcgaaggggtggaaagcagcgagaagcttaactcgagcttccccagcattcactgtgggtcatgggccgagaccacaccgggaggcggaggcagtagcgctgcacggcgggtcaggcctgtgtccctgatggtcccatctcaggctggagcgccgggccggcagtttcacggtagtgcatcgtctctggtggaagcagtgctcatctcggagggcttaggacagttcgcgcaggatcccaaattcatcgaagtcactacccaggagctggcagacgcttgcgatatgacaatcgaggagatggaaagtgctgcggacaatattctgagtgggggcgccccccagagccccaacggcgcattgctgccgttcgtgaattgtagagacgctggacaagatagagctggcggggaagaagacgctggatgtgtccgcgccaggggtcgcccttccgaagaggaattgcaggatagtcgcgtttatgttagctccctatag

SEQ ID NO: 46872 - DNA, 6561 bp, Artificial Sequence
  derived and/or modified sequence
atggtgaatgaaaacaccaggatgtacatccctgaggagaaccaccagggcagcaactacggcagccccaggcctgcccacgccaacatgaatgccaatgctgctgctggcctggcccctgagcacatccccacccctggggccgccctgtcctggcaggccgccattgatgctgcccggcaggccaagctgatgggcagcgctggaaatgccaccatcagcacagtgagcagcacccagaggaagaggcagcagtatggcaagcccaagaagcagggcagcaccacagccacccggcccccccgggccctgctgtgcctgaccctgaagaaccccatccggcgggcctgcatcagcatcgtggagtggaagccctttgagatcatcatcctgctgaccatctttgccaactgtgtggccctggccatctacatccccttcccagaagatgacagcaatgccaccaacagcaacctggagcgggtggagtacctgttcctgatcatcttcaccgtggaggccttcctgaaggtgattgcctacggcctgctcttccaccccaatgcctacctgagaaatggctggaacctgctggacttcatcatcgtggtggtgggcctcttcagcgccatcctggagcaggccaccaaggcagatggagccaatgccctgggcggcaaaggagctggctttgatgtgaaggccctgcgggccttccgggtgctgcggcccctgcggctggtgtctggagtgcccagcctgcaggtggtgctgaacagcatcatcaaggccatggtgcccctgctgcacatcgccctgctggtgctgtttgtgatcatcatctatgccatcatcggcctggagctgttcatgggcaagatgcacaagacctgctacaaccaggagggcattgctgatgtgcctgcagaagatgaccccagcccctgtgccctggagaccggccacggccggcagtgccagaatggcaccgtgtgcaagccaggctgggatggccccaagcacggcatcaccaactttgacaactttgcctttgccatgctgactgtgttccagtgcatcaccatggagggctggacagatgtgctgtactgggtgaatgatgctgtgggccgggactggccctggatctactttgtgaccctcatcatcatcggcagcttctttgtgctgaacctggtgctgggcgtgctgtctggagagttcagcaaggagcgggagaaggccaaggcccggggggacttccagaagctgcgggagaagcagcagctggaggaggacctgaagggctacctggactggatcacccaggctgaagatattgatcctgaaaatgaagatgagggcatggatgaggagaagcccaggaacatgtccatgcccaccagcgagacagaatctgtgaacacagaaaatgtggccggcggggacatcgagggggagaactgtggggcccggctggcccaccgcatcagcaagagcaagttcagccgctactggaggcgctggaaccgcttctgcaggaggaagtgcagagctgctgtgaagagcaatgtgttctactggctggtgatcttcctggtgttcctgaacaccctgaccatcgccagcgagcactacaaccagcccaactggctgacagaggtgcaggacacagccaacaaggccctgctggccctcttcaccgctgagatgctgctgaagatgtacagcctgggcctgcaggcctactttgtgtccctcttcaacagatttgactgctttgtggtgtgtggcggcatcctggagaccatcctggtggagaccaagatcatgagccccctgggcatctctgtgctgcgctgtgtgcggctgctgcgcatcttcaagatcacccgctactggaacagcctgagcaacctggtggccagcctgctgaacagcgtgcgcagcatcgccagcctgctgctgctgctcttcctgttcatcatcatcttcagcctgctgggcatgcagctgtttggaggcaagttcaactttgatgagatgcagaccaggaggagcacctttgacaacttcccccagagcctgctgaccgtcttccagatcctgaccggggaggactggaacagcgtgatgtatgatggcatcatggcctatggaggccccagcttccctggcatgctggtgtgcatctacttcatcatcctcttcatctgtggcaactacatcctgctgaatgtgttcctggccatcgctgtggacaacctggctgatgctgagagcctgaccagcgcccagaaggaggaggaggaggagaaggagaggaagaagctggccaggacagccagccctgagaagaagcaggagctggtggagaagccagctgtgggggagagcaaggaggagaagattgagctgaagagcatcacagcagatggagagagccccccagccaccaagatcaacatggatgacctgcagcccaatgaaaatgaagacaagagcccctaccccaaccctgagaccactggagaggaggatgaggaggagcctgagatgcctgtgggcccccggccccggcccctgtctgagctgcacctgaaggagaaggctgtgcccatgcctgaggccagcgccttcttcatcttcagcagcaacaaccgcttccggctgcagtgccaccgcatcgtgaatgacaccatcttcaccaacctgatcctcttcttcatcctgctgagcagcatcagcctggccgctgaggaccctgtgcagcacaccagcttcaggaaccacatcctcttctactttgacatcgtgttcaccaccatcttcaccatcgagatcgccctgaagatcctgggcaatgctgactatgtgttcaccagcatcttcaccctggagatcatcctgaagatgacagcctatggagccttcctgcacaagggcagcttctgcaggaactacttcaacatcctggacctgctggtggtgtctgtgtccctcatcagctttggcatccagagcagcgccatcaacgtggtgaagatcctgcgggtgctgcgggtgctgcggcccctgcgggccatcaacagagccaagggcctgaagcacgtggtgcagtgtgtgtttgtggccatccgcaccatcggcaacatcgtcatcgtgaccaccctgctgcagttcatgtttgcctgcatcggcgtgcagctgttcaagggcaagctgtacacctgcagcgacagcagcaagcagacagaagctgagtgcaagggcaactacatcacctacaaggatggagaggtggaccaccccatcatccagcccaggtcctgggagaacagcaagtttgattttgacaacgtgctggccgccatgatggccctcttcaccgtgtccacctttgagggctggccagagctgctgtaccgcagcattgacagccacacagaggacaagggccccatctacaactacagagtggagatcagcatcttcttcatcatctacatcatcatcatcgccttcttcatgatgaacatctttgtgggcttcgtcatcgtgaccttccaggagcagggcgagcaggagtacaagaactgtgagctggacaagaaccagaggcagtgtgtggagtatgccctgaaggcccggcccctgcggcgctacatccccaagaaccagcaccagtacaaggtgtggtacgtggtgaacagcacctactttgagtacctgatgtttgtgctgatcctgctgaacaccatctgcctggccatgcagcactacggccagagctgcctcttcaagatcgccatgaacatcctgaacatgctgttcaccggcctcttcaccgtggagatgatcctgaagctgattgccttcaagcccaagggctacttcagtgacccctggaatgtgtttgacttcctgattgtcatcggcagcatcattgatgtgatcctgtctgagaccaaccactacttctgtgatgcctggaacacctttgatgccctgattgtggtgggcagcatcgtggacatcgccatcacagaggtgaacccagctgagcacacccagtgcagccccagcatgaatgctgaggagaacagccgcatcagcatcaccttcttccgcctcttccgggtgatgaggctggtgaagctgctgagcagaggagagggcatccgcaccctgctgtggaccttcatcaagagcttccaggccctgccctacgtggccctgctgattgtgatgctgttcttcatctatgctgtgattggcatgcaggtgtttgggaagatcgccctgaatgacaccacagagatcaacagaaacaacaacttccagaccttcccccaggccgtgctgctgctcttccgctgtgccaccggggaggcctggcaggacatcatgctggcctgcatgcctgggaagaagtgtgcccctgagagcgagcccagcaacagcacagaaggagagaccccctgtggcagcagctttgctgtgttctacttcatctccttctacatgctgtgtgccttcctgatcatcaacctgtttgtggccgtcatcatggacaactttgactacctgacccgggactggagcatcctgggcccccaccacctggatgagttcaagaggatctgggccgagtatgaccctgaggccaagggccgcatcaagcacctggatgtggtgaccctgctgcggcgcatccagccccccctgggctttgggaagctgtgcccccaccgggtggcctgcaagaggctggtgtccatgaacatgcccctgaacagtgatggcaccgtgatgtttaatgccaccctgtttgccctggtgaggacagccctgcgcatcaagacagagggcaacctggagcaggccaatgaggagctgcgggccatcatcaagaagatctggaagaggacctccatgaagctgctggaccaggtggtgcccccagctggagatgatgaggtgacagtgggcaagttctacgccaccttcctgatccaggagtacttcaggaagttcaagaagaggaaggagcagggcctggtgggcaagcccagccagagaaatgccctgagcctgcaggccggcctgcggaccctgcatgacatcggccctgagatccggcgggccatcagcggggacctgacagctgaggaggagctggacaaggccatgaaggaggccgtgtctgctgcctctgaagatgacatcttcagaagagctgggggcctgtttggaaaccacgtgtcctactaccagagtgatggccgcagcgccttcccccagaccttcaccacccagaggcccctgcacatcaacaaggccggcagcagccagggcgacacagagagccccagccatgagaagctggtggacagcaccttcacccccagcagctacagcagcacaggcagcaatgccaacatcaacaatgccaacaacacagccctgggccgcctgcccaggcctgctggctaccccagcacagtgtccacagtggagggccacggcccccccctgagccctgccatccgggtgcaggaggtggcctggaagctgagcagcaaccgctgccacagccgggagagccaggccgccatggccggccaggaggagaccagccaggatgagacctatgaggtgaagatgaaccacgacacagaggcctgcagcgagcccagcctgctgagcacagagatgctgagctaccaggatgatgaaaatcggcagctgaccctgcctgaggaggacaagagggacatccggcagagccccaagaggggcttcctgcggagcgccagcctgggcagaagagccagcttccacctggagtgcctgaagaggcagaaggacagaggaggagacatcagccagaagacagtgctgcccctgcacctggtgcaccaccaggccctggccgtggccggcctgagccccctgctgcagaggagccacagccctgccagcttcccccggccctttgccaccccaccagccaccccaggcagccggggctggccaccccagcctgtgcccaccctgcggctggagggcgtggagagcagcgagaagctgaacagcagcttccccagcatccactgcggctcctgggccgagaccacccctgggggcggcggcagcagcgctgccaggagagtgcggcctgtgtccctgatggtgcccagccaggccggggcccctggccggcagttccacggcagcgccagcagcctggtggaggccgtgctgatcagcgagggcctgggccagtttgcccaggaccccaagttcatcgaggtgaccacccaggagctggctgatgcctgtgacatgaccatcgaggagatggagagcgctgctgacaacatcctgtctggaggagccccccagagccccaatggagccctgctgccctttgtgaactgcagagatgctggccaggaccgggccggcggggaggaggatgctggctgtgtgcgggcccggggccggcccagcgaggaggagctgcaggacagccgggtgtatgtgagcagcctgtag

SEQ ID NO: 46873 - DNA, 6561 bp, Artificial Sequence
  derived and/or modified sequence
atggtgaacgagaacacccggatgtacatccccgaggagaaccaccagggatccaactacggatcacccagaccggctcatgccaatatgaacgcaaacgctgcggctgggctcgcccccgaacatatccctactccaggcgccgccctgagctggcaggctgccatcgacgccgctcggcaagccaaactcatgggctcagccggtaacgccacaattagtaccgtttcttctactcagcgcaagaggcaacaatatggtaagccgaaaaaacagggtagtactactgcaaccaggcccccccgagccttgctctgcttaactcttaaaaaccccatccgtcgagcctgcatcagcatcgttgagtggaagcccttcgaaatcatcatccttctgaccatctttgccaactgcgtggccctggctatatatatccccttcccagaggacgattccaatgcaaccaacagcaaccttgaacgggtggaatatttgttcctgattatctttaccgtagaagccttcctgaaagtgattgcctatggccttctttttcaccctaacgcatatctaaggaacggctggaatctgctggactttattattgtggtagtgggcctatttagcgctattctggaacaggcaacaaaagccgacggagccaatgccctcggcggcaagggagccggcttcgatgtgaaggcactgcgggcttttagggttctgagacctttgcgccttgtgtctggtgtgcccagtttacaggtggtactgaattccattataaaggcaatggtgccactcctccatatagctctcctcgttctattcgtgatcattatatacgccatcatagggctggagctgtttatgggcaagatgcacaagacgtgttataaccaagagggaattgccgacgtccccgcagaggacgaccccagcccgtgtgcactcgagacaggtcatggccgccagtgccaaaatggtactgtatgtaagccgggttgggatggccccaaacacggcatcacaaatttcgacaactttgcgttcgcaatgttaacggtcttccagtgtatcacgatggagggttggaccgacgtgctgtattgggtgaacgacgccgtgggaagggattggccctggatctactttgtcacccttattataattggatctttcttcgttctgaatctggtactgggtgttctctctggtgagttctctaaagagcgagagaaggccaaggccagaggcgattttcagaaactgagagaaaagcagcagctggaggaagacctcaaagggtacttggactggatcacccaggcagaggatatagaccctgagaacgaggacgaaggcatggatgaagaaaagccccgaaatatgagtatgccaacgagcgagaccgagtccgtcaacacagagaatgtcgctggtggtgacatagagggagagaattgtggggcgcgcctggctcatcggatcagcaaaagcaaattctcacggtattggcggagatggaatcggttctgcagacgcaagtgtcgagcagccgtgaagtcaaacgtcttctactggctagttatctttctggtgttcctcaacacattgacaattgcatccgaacattacaaccagcctaattggctcaccgaggtacaagataccgccaacaaggccctgctcgccctgtttacggccgaaatgcttctgaaaatgtatagcctgggactgcaggcgtattttgtgagcctgtttaaccgctttgactgtttcgtcgtgtgtggcgggattctagagacgatcttggtggagaccaagattatgtccccactcgggatctcagtgttgcgatgcgttcgcttactccgcattttcaaaataacaaggtattggaactcactaagcaacttggtggccagcttgctgaattccgtgcgaagcattgcctctttattgctgctcttgttcctgtttatcatcattttctctttgctgggaatgcagctttttggaggtaaattcaactttgatgaaatgcaaacgcgcagaagcactttcgataattttccacagtctctcctcacagtgttccagatcctgacaggcgaagactggaactctgtcatgtatgacggtattatggcctacggcggtccttcatttccgggaatgctggtatgcatttattttattatactgttcatatgtggcaactatatcctccttaatgttttccttgcaattgctgtggacaacctcgccgatgctgagagtttaaccagcgctcaaaaagaggaggaagaagagaaagaaagaaaaaagttggctaggaccgcttctccagagaagaagcaggagctggtggagaagccagctgtgggagaaagtaaagaggagaagatcgaacttaagtccattaccgcagacggcgagtcgccacctgccaccaagatcaacatggatgaccttcaacctaacgagaatgaggataagtcaccataccctaatcccgagactacgggcgaagaagacgaggaggagcccgagatgcctgtggggccccgtccgaggccactcagcgaactgcatctaaaagagaaagctgtgcccatgcctgaggcgtcagcgtttttcatcttctcctccaacaatagatttcgactgcagtgtcaccggatcgtgaatgatacaatattcactaatcttattttatttttcattctactgtccagcatttccctggccgccgaggacccagtgcagcacacgtcctttcgtaaccatatactgttttactttgatatcgtctttacaacaatatttactatcgaaattgctctgaagatactcgggaacgctgattacgtgtttaccagtatctttaccctcgagattattctgaaaatgactgcttacggcgctttcctgcataagggctcgttctgccgcaactattttaacattctagacctgctagttgtttccgtatctctgattagcttcggtatccagagtagcgccataaacgtagtgaaaattctgcgcgtgctcagagtgctgagaccactgcgggcaataaacagagcgaaaggattgaagcacgttgtgcaatgcgtgttcgtcgccatcaggacgatcggcaacatagtcatagtgaccacactgttgcaatttatgtttgcttgtatcggagttcaattgttcaagggcaagctgtatacttgctctgactccagcaaacagaccgaggccgagtgtaaggggaactacatcacctataaggatggcgaagtcgatcatcctatcattcaacctagatcatgggagaattccaagttcgacttcgataacgtgcttgccgctatgatggccttgtttacagtgagtacctttgagggctggcccgaactcctctaccgatctatcgattcccacacggaggacaaaggaccaatctataactatcgagtagaaatctccatcttttttattatttacattattattatagccttctttatgatgaacatcttcgtagggtttgtaatcgtcacatttcaggagcagggcgagcaggagtacaaaaattgtgaactggacaaaaatcagagacagtgtgtagaatacgcactgaaagctaggcccttacgacgttacatcccgaagaaccagcatcagtataaagtatggtacgtggtgaacagtacttatttcgaataccttatgttcgtccttattctactgaacaccatctgcctcgcaatgcagcattacgggcaaagctgtctttttaagatcgctatgaacatcttgaatatgctgttcactgggttgttcacagttgagatgatcctcaagctgatcgctttcaaaccgaagggctactttagcgatccctggaacgtgttcgactttctgatcgtgatcggaagcatcatcgatgtcatcctctcagagactaatcactacttttgcgacgcctggaacacctttgacgccctcattgtggttgggagtatcgtcgacatcgccatcacagaggtgaaccccgcggaacatacacaatgttcaccctccatgaacgccgaggaaaattcacgaatctccattacatttttcagactcttcagagtcatgcgccttgtgaagctgctgtctaggggggaaggcatcaggacactgctttggacctttataaagtctttccaggcgcttccgtatgtggcgctgctcatcgttatgttgttctttatctacgcagtgatcggaatgcaggtgttcggcaaaattgctctgaatgataccacagagatcaatcgcaacaacaactttcaaacgtttccgcaggccgtcctcctattgtttaggtgtgcaactggagaggcttggcaggacataatgctggcctgcatgcccggcaagaagtgtgctcctgagagcgaaccgtccaattccactgaaggggaaacaccatgcgggtcctcgtttgcagtgttctatttcatatcattctacatgctttgcgctttcctcatcatcaacctgttcgtggccgtgatcatggacaattttgactatctcactcgagactggagcattctggggccacaccacttggacgagttcaagaggatatgggccgagtacgaccctgaagccaaggggcgcataaagcatctggatgtcgtgacactcctgcgaaggatacagccacctctggggtttggcaaattatgtcctcacagagtggcctgtaagaggctcgtgagcatgaatatgccccttaactctgacgggaccgtcatgttcaatgcgactttgttcgctctggtgcgcacggccctgcgcataaagacagagggaaacctcgagcaagccaatgaagagttgagggccatcatcaaaaagatatggaaacgaacaagtatgaagctactggaccaggtggtacccccggccggggatgacgaggtgactgtgggcaagttttacgccaccttcctgatacaggaatactttagaaaatttaagaagcgaaaggaacaagggttagttgggaaaccaagccaaaggaacgctctcagcttgcaggctggccttcgaaccctgcatgacattgggcctgagatcaggcgtgcaatttcgggagacctgacggccgaagaggagttggataaggcgatgaaagaagctgtcagcgctgcgagtgaggacgatatattccggcgtgcaggtggtcttttcggcaaccacgtgtcatactaccagtctgacggccgttccgcgttccctcagacgttcaccacccagcggccgctgcacatcaataaagcggggtcatcccagggcgatacagagtcaccttcccatgaaaagctagtagattctaccttcactccctcgtcctatagctctacaggatctaacgccaacattaacaatgccaacaacaccgccctcggccggctgcctcggccagctgggtatccctccaccgtaagtactgtggagggtcatggtcccccgttgagcccggcaatcagagtccaggaggtggcctggaagctctcttctaacaggtgccactctcgcgagtcacaggccgccatggccggtcaagaagagacaagccaggatgaaacctacgaggtgaagatgaaccatgacacggaagcatgttcggagcccagccttctgtccacggagatgctgtcctaccaggacgacgagaaccggcagctgacgctgccggaagaggacaagcgggacatcaggcagtctcccaagagaggcttcttgcggtccgcctccctcggaagacgggcgtcattccacctcgaatgtctcaagcgccagaaggataggggcggggatatctcacagaagactgtcctgcccctccacctggtgcaccaccaggcactggccgtggctggactttcccctcttctccagcggagtcattccccggcaagctttccgagaccttttgccactccacccgctactcccggcagccggggatggccaccccagcccgtgcctactctgcggcttgagggcgtcgagagttctgagaagctgaatagcagcttcccttccattcattgcgggtcatgggctgagacaacaccagggggcggcggatcatctgcagcacgacgggtgcggccggtgtctctaatggtgccctcccaagcaggcgcccctggtcgccagttccacggatccgccagttctctagtagaagcagtcctcatcagcgagggacttggtcagttcgcccaggatcccaagttcattgaggtgaccacacaggaactggcagatgcttgcgacatgactattgaagaaatggaaagcgcagccgacaatatcttaagcggcggcgccccgcagtcgccaaacggggcactactgcctttcgtaaattgccgagacgcaggacaggaccgcgcaggcggtgaggaggatgccggctgcgttcgggccagggggcgcccctcagaagaggaattgcaagacagccgggtgtatgtgagctcattgtag

SEQ ID NO: 46874 - DNA, 6560 bp, Artificial Sequence
  derived and/or modified sequence
atggtaaatgagaacacacgcatgtatattcctgaggagaatcatcagggcagcaactacggaagcccgcgtccggcacacgccaatatgaatgcaaacgctgcagccggactcgcaccggagcatatcccaaccccaggagcagctttaagctggcaagccgctattgacgccgcacgccaggcaaagctgatgggctcagctggaaacgccactatttctacagttagtagtacccaaagaaaaagacaacagtacggcaaacctaaaaaacaagggtcgacgacagccactagacctccccgtgccctcctctgccttacactgaagaatccaatccgcagggcatgtatctccatcgtcgagtggaagcctttcgagataattattctgctcaccatctttgccaactgtgttgccctggctatttacattccctttcccgaggacgacagtaacgcaactaactctaacctggaacgggtggagtatttatttctgataatttttactgtagaggcctttctcaaagtgattgcttacggtctgctgttccacccgaatgcataccttcggaacgggtggaatctgcttgacttcattatcgtagtggttggccttttcagcgccatcttggaacaggctactaaagccgacggtgctaatgccttgggcggaaaaggggctggcttcgacgtcaaagccctgagagctttccgcgtcttgcgacctctgcgtttggttagcggcgtgccgagcctccaagtagttctgaattcgataatcaaggctatggtgcccttgctccatattgctctgctggtcttgttcgtgataatcatctatgcaattattggattggagctgtttatgggcaagatgcacaagacttgttacaaccaggaaggcattgccgacgtgccggctgaggacgatccttccccttgcgccttggagacgggtcatgggaggcagtgccaaaatgggacagtgtgcaagcccggttgggatggtcccaagcacgggatcacaaacttcgataacttcgcctttgctatgctgacagtatttcagtgcataacaatggaaggctggacagacgttctctactgggtcaacgacgcggttgggagggattggccctggatttatttcgtcacactgataattatcggctcattcttcgtgctgaatctggtgctgggagtgttgtcgggcgaattttccaaggaaagagaaaaagccaaagctcggggagatttccagaagctgagggagaaacagcagctggaagaggacttgaaaggatatctggattggattacccaggccgaggatatcgaccccgagaacgaggacgaggggatggatgaggagaaacccaggaacatgagtatgccaacgagcgagactgaaagcgtcaatacggagaacgtcgccggtggagatattgaaggcgagaattgcggggcacggctggcccataggatatccaagagcaagttcagtagatactggcgccgatggaatcgcttctgccgtaggaaatgccgagctgctgttaaatccaacgtattctattggctcgtgatattcttggtctttcttaacacccttactatcgctagcgagcactataatcagccgaactggctcacggaggtccaggacactgctaataaggcgctgctggctctgttcaccgctgagatgctgctcaaaatgtactccctgggactgcaggcttatttcgtatccctattcaacagattcgattgctttgtcgtgtgcgggggtatcttggagaccattctggtggagaccaaaataatgtcaccgctcggcatctcggtgctgcgctgcgtccggctgttacgcattttcaagattactcgctactggaactccctttccaacctggttgccagtctgctgaactcagtcagatctatcgcatctttacttctgttactcttcctgtttatcattattttcagtctgctcgggatgcagctgttcggcggaaagttcaactttgacgagatgcagacacggagaagtactttcgataacttcccacagagcttgctaacagttttccagattcttaccggagaagactggaactccgtcatgtacgacggtatcatggcctacgggggaccaagctttccaggcatgctggtgtgcatatatttcattatattgtttatctgtggcaactacatattactcaatgtgtttctcgccattgctgttgacaacctcgcggatgctgaatcacttacatcagcccagaaggaggaagaggaagaaaaggagagaaagaagcttgctagaaccgcaagccccgagaagaagcaagaattagtagaaaagcccgctgtgggagaaagcaaggaagagaagatcgagctcaaatcaatcaccgcggatggcgagtccccacccgcaaccaagataaacatggatgacctccagcctaatgagaacgaagataaaagtccataccccaacccggagaccacaggcgaagaggacgaggaggagccagaaatgcctgtgggtccgcgtcccaggcctctgtcagagcttcatctgaaggagaaggccgttccaatgcctgaagccagcgcattctttattttctccagtaataacaggttcagactgcagtgtcacaggatcgtgaatgacactattttcaccaacctcattctgttttttattctactgtctagtatttctttggccgcagaagatcctgtccagcatacttccttcagaaaccacattctgttttatttcgatatcgtattcaccactatcttcaccattgaaatcgctctgaagatccttggtaatgccgactacgtattcacctctatctttaccctggaaattatcctgaagatgaccgcatatggcgctttcctgcacaagggatctttttgccggaattattttaacatccttgacctactggtggtgtcggtgtcactgattagcttcggcattcagagctctgccatcaacgtggtgaagattctccgtgttctgcgggtacttagaccccttagggccattaatagggccaagggactcaagcatgtggtgcaatgtgtgtttgtggccatccgtaccatcggaaacatcgtgattgtcaccactttactgcagttcatgtttgcctgcataggcgtccagcttttcaaaggaaagctgtatacatgtagcgactcctccaaacagactgaggccgaatgcaagggaaattacattacctacaaggacggcgaggtagaccatcccataatccagcccagaagttgggagaattctaaatttgattttgataatgtgcttgcagccatgatggcgctcttcacagtatctactttcgagggctggccggaattgctgtaccgctccatcgatagtcacactgaagataagggccctatctataattacagggtcgagatttcaatcttctttatcatctacatcattatcattgcatttttcatgatgaacattttcgtggggttcgtgatagtgacctttcaggagcagggcgagcaggaatacaagaattgtgagctggacaaaaatcaacgtcagtgtgttgaatacgccttaaaggccaggccgcttagacgttatattcccaagaatcagcatcagtacaaagtctggtacgtggtgaactcaacttattttgaataccttatgttcgtcctaattctcctgaacaccatctgtctggctatgcaacattatggccagtcttgcctgttcaagatcgccatgaacattctgaacatgctgttcacgggtcttttcacggtcgagatgatcttgaaactgatagctttcaagcctaagggctatttcagtgatccctggaacgtattcgacttcttaatcgtcattggcagcattatagacgttattctgtccgagaccaatcactacttctgcgacgcatggaacacattcgatgccctcatcgtcgtaggttctattgtggacattgccattactgaagttaaccccgcagagcacacccagtgttccccatctatgaatgcagaggagaattcaaggatatcaattacattctttaggctgttccgcgtgatgcggctcgtcaagctgttatcacggggtgagggcattcggaccctgctgtggacctttattaagtccttccaggcgttgccatacgtggctctccttattgtcatgctcttcttcatctacgccgtgatcggaatgcaggtgtttggcaagattgccttaaatgatacgaccgagattaatcgcaataataacttccagactttccctcaggccgtgttgctgctctttaggtgcgccaccggggaggcatggcaggatatcatgttggcgtgtatgccaggaaagaaatgtgctcccgagtcagagccttccaacagcacagaaggtgagacaccttgtggatcttcctttgcagtcttttacttcatttcattttacatgctatgcgcgttcctgatcattaatctctttgtggccgtgatcatggacaactttgactatctgacccgggattggagcatccttgggcctcaccacctggatgagttcaagcgtatttgggctgaatacgaccctgaagcaaaggggaggatcaagcacctggacgtggtcacactgctgcgcaggattcaacccccactcggcttcggcaaactctgtccacaccgagtggcctgtaagaggctggtctctatgaatatgcccttaaatagcgatggtacagtaatgtttaacgctactctttttgcgttggtgagaactgccctgcggatcaagaccgaagggaatcttgaacaagcgaacgaggaattaagggcaataataaaaaagatttggaaaaggacttcaatgaagttgcttgatcaggttgttcctcccgctggcgatgacgaggttacagttggcaagttctacgcaacctttttgatccaagaatatttcagaaagttcaagaagaggaaagagcaggggctggtgggcaagcctagtcaacgaaatgctctgtccctgcaggcaggcctgcggacgctccacgatatcggccctgaaatccgaagagcaatctccggggatctcaccgctgaagaggaattggacaaggcgatgaaagaggctgtttcagccgcttcagaagatgacatctttaggagggcgggtggcctgtttggcaatcatgtgagttactatcagtccgacggccgttccgcctttccacagaccttcactacccaacggcctcttcatataaacaaggcgggtagctcccaaggtgacaccgagtcgcccagccatgagaagctggtagactccacattcacaccctcaagttacagctcaactggttccaacgcaaatattaacaacgccaacaacacagctctgggtcggcttcctagaccagcagggtacccatcaacggtatcaacggtggaggggcacggcccacctctgtcgcctgcgattagggtccaggaggtggcatggaagttgagctccaaccggtgccatagtagagagagccaggcagccatggctgggcaagaagagacgtcccaggatgaaacctatgaggtgaagatgaatcatgacaccgaagcttgtagcgagccgtcgcttctttccactgaaatgctttcttatcaggacgatgagaaccggcagctaactcttcctgaagaagataagcgcgacatccggcaaagtccaaagaggggttttttgaggtcagcatccctgggccgtagagcttcattccatttggagtgcctgaaacggcagaaggatcggggtggagacatctcccaaaaaactgtgttacccctgcatctcgtacatcaccaggcactggctgttgccggtctgtcacccttattgcagcgctcccactccccagcatccttcccacgcccatttgcgacccctccagcgacacctggcagcaggggttggccacctcaacctgttcctacacttcgcctggaaggcgttgagagcagcgaaaagcttaactcttcatttccctcaattcactgtggctcctgggctgagactacacctgggggtgggggatccagcgccgcacgcagagtccggccagtgagtctcatggttccctctcaggcaggcgctccaggccgtcagttccatggatccgcctcatccctagtcgaagccgtcctgatctctgaaggcctgggccagttcgcgcaggatcctaaatttattgaggtcacgacccaggaacttgcagatgcctgcgacatgaccatcgaagagatggaaagtgccgcagataatatactgagtggcggagcgccacagagcccaaatggcgcactcctgccctttgtgaattgccgtgatgctggtcaggatagagctggcggagaggaggatgcgggttgtgtccgcgcacgtggacgcccatcagaagaggaactgcaggattccagagtgtacgtgtccagcttata

SEQ ID NO: 46875 - DNA, 6655 bp, Artificial Sequence
  derived and/or modified sequence
atggtcaatgagaatacgaggatgtacattccagaggaaaaccaccaaggttccaactatgggagcccacgccccgcccatgccaacatgaatgccaatgcggcagcggggctggcccctgagcacatccccaccccgggggctgccctgtcgtggcaggcggccatcgacgcagcccggcaggctaagctgatgggcagcgctggcaatgcgaccatctccacagtcagctccacgcagcggaagcggcagcaatatgggaaacccaagaagcagggcagcaccacggccacacgcccgccccgagccctgctctgcctgaccctgaagaaccccatccggagggcctgcatcagcattgtcgaatggaaaccatttgaaataattattttactgactatttttgccaattgtgtggccttagcgatctatattccctttccagaagatgattccaacgccaccaattccaacctggaacgagtggaatatctctttctcataatttttacggtggaagcgtttttaaaagtaatcgcctatggactcctctttcaccccaatgcctacctccgcaacggctggaacctactagattttataattgtggttgtggggctttttagtgcaattttagaacaagcaaccaaagcagatggggcaaacgctctcggagggaaaggggccggatttgatgtgaaggcgctgagggccttccgcgtgctgcgccccctgcggctggtgtccggagtcccaagtctccaggtggtcctgaattccatcatcaaggccatggtccccctgctgcacatcgccctgcttgtgctgtttgtcatcatcatctacgccatcatcggcttggagctcttcatggggaagatgcacaagacctgctacaaccaggagggcatagcagatgttccagcagaagatgacccttccccttgtgcgctggaaacgggccacgggcggcagtgccagaacggcacggtgtgcaagcccggctgggatggtcccaagcacggcatcaccaactttgacaactttgccttcgccatgctcacggtgttccagtgcatcaccatggagggctggacggacgtgctgtactgggtcaatgatgccgtaggaagggactggccctggatctattttgttacactaatcatcatagggtcattttttgtacttaacttggttctcggtgtgcttagcggagagttttccaaagagagggagaaggccaaggcccggggagatttccagaagctgcgggagaagcagcagctagaagaggatctcaaaggctacctggattggatcactcaggccgaagacatcgatcctgagaatgaggacgaaggcatggatgaggagaagccccgaaacatgagcatgcccaccagtgagaccgagtccgtcaacaccgaaaacgtggctggaggtgacatcgagggagaaaactgcggggccaggctggcccaccggatctccaagtcaaagttcagccgctactggcgccggtggaatcggttctgcagaaggaagtgccgcgccgcagtcaagtctaatgtcttctactggctggtgattttcctggtgttcctcaacacgctcaccattgcctctgagcactacaaccagcccaactggctcacagaagtccaagacacggcaaacaaggccctgctggccctgttcacggcagagatgctcctgaagatgtacagcctgggcctgcaggcctacttcgtgtccctcttcaaccgctttgactgcttcgtcgtgtgtggcggcatcctggagaccatcctggtggagaccaagatcatgtccccactgggcatctccgtgctcagatgcgtccggctgctgaggattttcaagatcacgaggtactggaactccttgagcaacctggtggcatccttgctgaactctgtgcgctccatcgcctccctgctccttctcctcttcctcttcatcatcatcttctccctcctggggatgcagctctttggaggaaagttcaactttgatgagatgcagacccggaggagcacattcgataacttcccccagtccctcctcactgtgtttcagatcctgaccggggaggactggaattcggtgatgtatgatgggatcatggcttatggcggcccctcttttccagggatgttagtctgtatttacttcatcatcctcttcatctgtggaaactatatcctactgaatgtgttcttggccattgctgtggacaacctggctgatgctgagagcctcacatctgcccaaaaggaggaggaagaggagaaggagagaaagaagctggccaggactgccagcccagagaagaaacaagagttggtggagaagccggcagtgggggaatccaaggaggagaagattgagctgaaatccatcacggctgacggagagtctccacccgccaccaagatcaacatggatgacctccagcccaatgaaaatgaggataagagcccctaccccaacccagaaactacaggagaagaggatgaggaggagccagagatgcctgtcggccctcgcccacgaccactctctgagcttcaccttaaggaaaaggcagtgcccatgccagaagccagcgcgtttttcatcttcagctctaacaacaggtttcgcctccagtgccaccgcattgtcaatgacacgatcttcaccaacctgatcctcttcttcattctgctcagcagcatttccctggctgctgaggacccggtccagcacacctccttcaggaaccatattctgttttattttgatattgtttttaccaccattttcaccattgaaattgctctgaagatcctaggcaatgcagactatgtcttcactagtatctttacattagaaattatccttaagatgactgcttatggggctttcttgcacaagggttctttctgccggaactacttcaacatcctggacctgctggtggtcagcgtgtccctcatctcctttggcatccagtccagtgcaatcaatgtcgtgaagatcttgcgagtcctgcgagtactcaggcccctgagggccatcaacagggccaaggggctaaagcatgtggttcagtgtgtgtttgtcgccatccggaccatcgggaacatcgtgattgtcaccaccctgctgcagttcatgtttgcctgcatcggggtccagctcttcaagggaaagctgtacacctgttcagacagttccaagcagacagaggcggaatgcaagggcaactacatcacgtacaaagacggggaggttgaccaccccatcatccaaccccgcagctgggagaacagcaagtttgactttgacaatgttctggcagccatgatggccctcttcaccgtctccaccttcgaagggtggccagagctgctgtaccgctccatcgactcccacacggaagacaagggccccatctacaactaccgtgtggagatctccatcttcttcatcatctacatcatcatcatcgccttcttcatgatgaacatcttcgtgggcttcgtcatcgtcacctttcaggagcagggggagcaggagtacaagaactgtgagctggacaagaaccagcgacagtgcgtggaatacgccctcaaggcccggcccctgcggaggtacatccccaagaaccagcaccagtacaaagtgtggtacgtggtcaactccacctacttcgagtacctgatgttcgtcctcatcctgctcaacaccatctgcctggccatgcagcactacggccagagctgcctgttcaaaatcgccatgaacatcctcaacatgctcttcactggcctcttcaccgtggagatgatcctgaagctcattgccttcaaacccaagggttactttagtgatccctggaatgtttttgacttcctcatcgtaattggcagcataattgacgtcattctcagtgagactaatcactatttctgtgatgcatggaatacatttgacgccttgattgttgtgggtagcattgttgatatagcaatcaccgaggtaaacccagctgaacatacccaatgctctccctctatgaacgcagaggaaaactcccgcatctccatcaccttcttccgcctgttccgggtcatgcgtctggtgaagctgctgagccgtggggagggcatccggacgctgctgtggaccttcatcaagtccttccaggccctgccctatgtggccctcctgatcgtgatgctgttcttcatctacgcggtgatcgggatgcaggtgtttgggaaaattgccctgaatgataccacagagatcaaccggaacaacaactttcagaccttcccccaggccgtgctgctcctcttcaggtgtgccaccggggaggcctggcaggacatcatgctggcctgcatgccaggcaagaagtgtgccccagagtccgagcccagcaacagcacggagggtgaaacaccctgtggtagcagctttgctgtcttctacttcatcagcttctacatgctctgtgccttcctgatcatcaacctctttgtagctgtcatcatggacaactttgactacctgacaagggactggtccatccttggtccccaccacctggatgagtttaaaagaatctgggcagagtatgaccctgaagccaagggtcgtatcaaacacctggatgtggtgaccctcctccggcggattcagccgccactaggttttgggaagctgtgccctcaccgcgtggcttgcaaacgcctggtctccatgaacatgcctctgaacagcgacgggacagtcatgttcaatgccaccctgtttgccctggtcaggacggccctgaggatcaaaacagaagggaacctagaacaagccaatgaggagctgcgggcgatcatcaagaagatctggaagcggaccagcatgaagctgctggaccaggtggtgccccctgcaggtgatgatgaggtcaccgttggcaagttctacgccacgttcctgatccaggagtacttccggaagttcaagaagcgcaaagagcagggccttgtgggcaagccctcccagaggaacgcgctgtctctgcaggctggcttgcgcacactgcatgacatcgggcctgagatccgacgggccatctctggagatctcaccgctgaggaggagctggacaaggccatgaaggaggctgtgtccgctgcttctgaagatgacatcttcaggagggccggtggcctgttcggcaaccacgtcagctactaccaaagcgacggccggagcgccttcccccagaccttcaccactcagcgcccgctgcacatcaacaaggcgggcagcagccagggcgacactgagtcgccatcccacgagaagctggtggactccaccttcaccccgagcagctactcgtccaccggctccaacgccaacatcaacaacgccaacaacaccgccctgggtcgcctccctcgccccgccggctaccccagcacggtcagcactgtggagggccacgggccccccttgtcccctgccatccgggtgcaggaggtggcgtggaagctcagctccaacaggtgccactcccgggagagccaggcagccatggcgggtcaggaggagacgtctcaggatgagacctatgaagtgaagatgaaccatgacacggaggcctgcagtgagcccagcctgctctccacagagatgctctcctaccaggatgacgaaaatcggcaactgacgctcccagaggaggacaagagggacatccggcaatctccgaagaggggtttcctccgctctgcctcactaggtcgaagggcctccttccacctggaatgtctgaagcgacagaaggaccgagggggagacatctctcagaagacagtcctgcccttgcatctggttcatcatcaggcattggcagtggcaggcctgagccccctcctccagagaagccattcccctgcctcattccctaggccttttgccaccccaccagccacacctggcagccgaggctggcccccacagcccgtccccaccctgcggcttgagggggtcgagtccagtgagaaactcaacagcagcttcccatccatccactgcggctcctgggctgagaccacccccggtggcgggggcagcagcgccgcccggagagtccggcccgtctccctcatggtgcccagccaggctggggccccagggaggcagttccacggcagtgccagcagcctggtggaagcggtcttgatttcagaaggactggggcagtttgctcaagatcccaagttcatcgaggtcaccacccaggagctggccgacgcctgcgacatgaccatagaggagatggagagcgcggccgacaacatcctcagcgggggcgccccacagagccccaatggcgccctcttaccctttgtgaactgcagggacgcggggcaggaccgagccgggggcgaagaggacgcgggctgtgtgcgcgcgcggggtcgaccgagtgaggaggagctccaggacagcagggtctacgtcagcagcctgtagtgggcgctgccagatgcgggcttttttttatttgtttcaatgttcctaatgggttcgtttcagaagtgcctcactgttctcgtgacctggagtt

SEQ ID NO: 46876 - DNA, 6561 bp, Artificial Sequence
  derived and/or modified sequence
atggtgaacgagaacaccagaatgtacatccccgaggagaaccaccagggcagcaactacggcagccccagacccgcccacgccaacatgaacgccaacgccgccgccggcctggcccccgagcacatccccacccccggcgccgccctgagctggcaggccgccatcgacgccgccagacaggccaagctgatgggcagcgccggcaacgccaccatcagcaccgtgagcagcacccagagaaagagacagcagtacggcaagcccaagaagcagggcagcaccaccgccaccagaccccccagagccctgctgtgcctgaccctgaagaaccccatcagaagagcctgcatcagcatcgtggagtggaagcccttcgagatcatcatcctgctgaccatcttcgccaactgcgtggccctggccatctacatccccttccccgaggacgacagcaacgccaccaacagcaacctggagagagtggagtacctgttcctgatcatcttcaccgtggaggccttcctgaaggtgatcgcctacggcctgctgttccaccccaacgcctacctgagaaacggctggaacctgctggacttcatcatcgtggtggtgggcctgttcagcgccatcctggagcaggccaccaaggccgacggcgccaacgccctgggcggcaagggcgccggcttcgacgtgaaggccctgagagccttcagagtgctgagacccctgagactggtgagcggcgtgcccagcctgcaggtggtgctgaacagcatcatcaaggccatggtgcccctgctgcacatcgccctgctggtgctgttcgtgatcatcatctacgccatcatcggcctggagctgttcatgggcaagatgcacaagacctgctacaaccaggagggcatcgccgacgtgcccgccgaggacgaccccagcccctgcgccctggagaccggccacggcagacagtgccagaacggcaccgtgtgcaagcccggctgggacggccccaagcacggcatcaccaacttcgacaacttcgccttcgccatgctgaccgtgttccagtgcatcaccatggagggctggaccgacgtgctgtactgggtgaacgacgccgtgggcagagactggccctggatctacttcgtgaccctgatcatcatcggcagcttcttcgtgctgaacctggtgctgggcgtgctgagcggcgagttcagcaaggagagagagaaggccaaggccagaggcgacttccagaagctgagagagaagcagcagctggaggaggacctgaagggctacctggactggatcacccaggccgaggacatcgaccccgagaacgaggacgagggcatggacgaggagaagcccagaaacatgagcatgcccaccagcgagaccgagagcgtgaacaccgagaacgtggccggcggcgacatcgagggcgagaactgcggcgccagactggcccacagaatcagcaagagcaagttcagcagatactggagaagatggaacagattctgcagaagaaagtgcagagccgccgtgaagagcaacgtgttctactggctggtgatcttcctggtgttcctgaacaccctgaccatcgccagcgagcactacaaccagcccaactggctgaccgaggtgcaggacaccgccaacaaggccctgctggccctgttcaccgccgagatgctgctgaagatgtacagcctgggcctgcaggcctacttcgtgagcctgttcaacagattcgactgcttcgtggtgtgcggcggcatcctggagaccatcctggtggagaccaagatcatgagccccctgggcatcagcgtgctgagatgcgtgagactgctgagaatcttcaagatcaccagatactggaacagcctgagcaacctggtggccagcctgctgaacagcgtgagaagcatcgccagcctgctgctgctgctgttcctgttcatcatcatcttcagcctgctgggcatgcagctgttcggcggcaagttcaacttcgacgagatgcagaccagaagaagcaccttcgacaacttcccccagagcctgctgaccgtgttccagatcctgaccggcgaggactggaacagcgtgatgtacgacggcatcatggcctacggcggccccagcttccccggcatgctggtgtgcatctacttcatcatcctgttcatctgcggcaactacatcctgctgaacgtgttcctggccatcgccgtggacaacctggccgacgccgagagcctgaccagcgcccagaaggaggaggaggaggagaaggagagaaagaagctggccagaaccgccagccccgagaagaagcaggagctggtggagaagcccgccgtgggcgagagcaaggaggagaagatcgagctgaagagcatcaccgccgacggcgagagcccccccgccaccaagatcaacatggacgacctgcagcccaacgagaacgaggacaagagcccctaccccaaccccgagaccaccggcgaggaggacgaggaggagcccgagatgcccgtgggccccagacccagacccctgagcgagctgcacctgaaggagaaggccgtgcccatgcccgaggccagcgccttcttcatcttcagcagcaacaacagattcagactgcagtgccacagaatcgtgaacgacaccatcttcaccaacctgatcctgttcttcatcctgctgagcagcatcagcctggccgccgaggaccccgtgcagcacaccagcttcagaaaccacatcctgttctacttcgacatcgtgttcaccaccatcttcaccatcgagatcgccctgaagatcctgggcaacgccgactacgtgttcaccagcatcttcaccctggagatcatcctgaagatgaccgcctacggcgccttcctgcacaagggcagcttctgcagaaactacttcaacatcctggacctgctggtggtgagcgtgagcctgatcagcttcggcatccagagcagcgccatcaacgtggtgaagatcctgagagtgctgagagtgctgagacccctgagagccatcaacagagccaagggcctgaagcacgtggtgcagtgcgtgttcgtggccatcagaaccatcggcaacatcgtgatcgtgaccaccctgctgcagttcatgttcgcctgcatcggcgtgcagctgttcaagggcaagctgtacacctgcagcgacagcagcaagcagaccgaggccgagtgcaagggcaactacatcacctacaaggacggcgaggtggaccaccccatcatccagcccagaagctgggagaacagcaagttcgacttcgacaacgtgctggccgccatgatggccctgttcaccgtgagcaccttcgagggctggcccgagctgctgtacagaagcatcgacagccacaccgaggacaagggccccatctacaactacagagtggagatcagcatcttcttcatcatctacatcatcatcatcgccttcttcatgatgaacatcttcgtgggcttcgtgatcgtgaccttccaggagcagggcgagcaggagtacaagaactgcgagctggacaagaaccagagacagtgcgtggagtacgccctgaaggccagacccctgagaagatacatccccaagaaccagcaccagtacaaggtgtggtacgtggtgaacagcacctacttcgagtacctgatgttcgtgctgatcctgctgaacaccatctgcctggccatgcagcactacggccagagctgcctgttcaagatcgccatgaacatcctgaacatgctgttcaccggcctgttcaccgtggagatgatcctgaagctgatcgccttcaagcccaagggctacttcagcgacccctggaacgtgttcgacttcctgatcgtgatcggcagcatcatcgacgtgatcctgagcgagaccaaccactacttctgcgacgcctggaacaccttcgacgccctgatcgtggtgggcagcatcgtggacatcgccatcaccgaggtgaaccccgccgagcacacccagtgcagccccagcatgaacgccgaggagaacagcagaatcagcatcaccttcttcagactgttcagagtgatgagactggtgaagctgctgagcagaggcgagggcatcagaaccctgctgtggaccttcatcaagagcttccaggccctgccctacgtggccctgctgatcgtgatgctgttcttcatctacgccgtgatcggcatgcaggtgttcggcaagatcgccctgaacgacaccaccgagatcaacagaaacaacaacttccagaccttcccccaggccgtgctgctgctgttcagatgcgccaccggcgaggcctggcaggacatcatgctggcctgcatgcccggcaagaagtgcgcccccgagagcgagcccagcaacagcaccgagggcgagaccccctgcggcagcagcttcgccgtgttctacttcatcagcttctacatgctgtgcgccttcctgatcatcaacctgttcgtggccgtgatcatggacaacttcgactacctgaccagagactggagcatcctgggcccccaccacctggacgagttcaagagaatctgggccgagtacgaccccgaggccaagggcagaatcaagcacctggacgtggtgaccctgctgagaagaatccagccccccctgggcttcggcaagctgtgcccccacagagtggcctgcaagagactggtgagcatgaacatgcccctgaacagcgacggcaccgtgatgttcaacgccaccctgttcgccctggtgagaaccgccctgagaatcaagaccgagggcaacctggagcaggccaacgaggagctgagagccatcatcaagaagatctggaagagaaccagcatgaagctgctggaccaggtggtgccccccgccggcgacgacgaggtgaccgtgggcaagttctacgccaccttcctgatccaggagtacttcagaaagttcaagaagagaaaggagcagggcctggtgggcaagcccagccagagaaacgccctgagcctgcaggccggcctgagaaccctgcacgacatcggccccgagatcagaagagccatcagcggcgacctgaccgccgaggaggagctggacaaggccatgaaggaggccgtgagcgccgccagcgaggacgacatcttcagaagagccggcggcctgttcggcaaccacgtgagctactaccagagcgacggcagaagcgccttcccccagaccttcaccacccagagacccctgcacatcaacaaggccggcagcagccagggcgacaccgagagccccagccacgagaagctggtggacagcaccttcacccccagcagctacagcagcaccggcagcaacgccaacatcaacaacgccaacaacaccgccctgggcagactgcccagacccgccggctaccccagcaccgtgagcaccgtggagggccacggcccccccctgagccccgccatcagagtgcaggaggtggcctggaagctgagcagcaacagatgccacagcagagagagccaggccgccatggccggccaggaggagaccagccaggacgagacctacgaggtgaagatgaaccacgacaccgaggcctgcagcgagcccagcctgctgagcaccgagatgctgagctaccaggacgacgagaacagacagctgaccctgcccgaggaggacaagagagacatcagacagagccccaagagaggcttcctgagaagcgccagcctgggcagaagagccagcttccacctggagtgcctgaagagacagaaggacagaggcggcgacatcagccagaagaccgtgctgcccctgcacctggtgcaccaccaggccctggccgtggccggcctgagccccctgctgcagagaagccacagccccgccagcttccccagacccttcgccaccccccccgccacccccggcagcagaggctggcccccccagcccgtgcccaccctgagactggagggcgtggagagcagcgagaagctgaacagcagcttccccagcatccactgcggcagctgggccgagaccacccccggcggcggcggcagcagcgccgccagaagagtgagacccgtgagcctgatggtgcccagccaggccggcgcccccggcagacagttccacggcagcgccagcagcctggtggaggccgtgctgatcagcgagggcctgggccagttcgcccaggaccccaagttcatcgaggtgaccacccaggagctggccgacgcctgcgacatgaccatcgaggagatggagagcgccgccgacaacatcctgagcggcggcgccccccagagccccaacggcgccctgctgcccttcgtgaactgcagagacgccggccaggacagagccggcggcgaggaggacgccggctgcgtgagagccagaggcagacccagcgaggaggagctgcaggacagcagagtgtacgtgagcagcctgtag

SEQ ID NO: 46877 - protein, 110 aa, Artificial Sequence
  derived and/or modified sequence
MWMGLIQLVEGVKRKDQGFLEKEFYHKTNIKMRCEFLACWPAFTVLGEAWRDQVDWSRLLRDAGLVKMSRKPRASSPLSNNHPPTPKRFPRQPGREKGPIKEVPGTKGSP

SEQ ID NO: 46878 - DNA, 333 bp, Artificial Sequence
  derived and/or modified sequence
atgtggatgggcctgatccagctggtggagggcgtgaagagaaaggaccagggcttcctggagaaggagttctaccacaagaccaacatcaagatgagatgcgagttcctggcctgctggcccgccttcaccgtgctgggcgaggcctggagagaccaggtggactggagcagactgctgagagacgccggcctggtgaagatgagcagaaagcccagagccagcagccccctgagcaacaaccacccccccacccccaagagattccccagacagcccggcagagagaagggccccatcaaggaggtgcccggcaccaagggcagcccctag

SEQ ID NO: 46879 - DNA, 333 bp, Artificial Sequence
  derived and/or modified sequence
atgtggatgggcctcatccagctggtcgaaggcgtaaagagaaaggatcaaggcttcttggaaaaggaattttatcacaagactaacataaagatgcgctgcgaattcctggcctgctggcctgctttcacagttctaggagaggcctggcgggatcaagtcgattggtcacggcttctccgagatgcgggcctcgtaaagatgagccgcaaacccagggcctcctcaccacttagtaataatcatccaccaacgccaaaacgcttcccaagacagcccggccgagaaaaggggcccatcaaagaagtgccaggaacaaaaggctcaccttag

SEQ ID NO: 46880 - DNA, 333 bp, Artificial Sequence
  derived and/or modified sequence
atgtggatgggcctcatccagctggtggagggcgtgaagaggaaggaccagggcttcctggagaaggagttctaccacaagaccaacatcaagatgagatgtgagttcctggcctgctggccagccttcaccgtgctgggggaggcctggagggaccaggtggactggagccggctgctgagagatgctggcctggtgaagatgagcaggaagccccgggccagcagccccctgagcaacaaccacccccccacccccaagcgcttcccccggcagcccggccgggagaagggccccatcaaggaggtgcccggcaccaagggcagcccctag

SEQ ID NO: 46881 - DNA, 333 bp, Artificial Sequence
  derived and/or modified sequence
atgtggatgggcctgatccagctggtggagggcgtgaagcggaaggatcagggttttctggagaaagagttctatcataaaactaatatcaaaatgcggtgtgagttcctggcatgctggcccgctttcaccgttctcggcgaggcatggcgagaccaagtggactggtctcgactgctccgcgatgccgggttagtcaaaatgtcaaggaagccccgggcatcgtcccccttgagtaataatcatccccctacaccaaaacgctttccccggcaacccggcagggaaaaaggcccgattaaggaggttcctggtaccaaagggagcccttag

SEQ ID NO: 46882 - DNA, 333 bp, Artificial Sequence
  derived and/or modified sequence
atgtggatggggctgatccaactggtggagggcgtgaaacgcaaagaccagggctttttggagaaagagttttatcacaaaaccaacattaagatgaggtgcgagttccttgcctgttggcccgctttcaccgtgctgggggaagcgtggcgggaccaggtcgattggagccgactcctgagagacgcgggactggtgaagatgtctaggaagccaagggcttcaagcccactgtcaaacaaccaccctcctacccccaagcgattcccacggcaaccaggcagggagaaaggccctatcaaagaggtgcctggtaccaaaggatccccctag

SEQ ID NO: 46883 - DNA, 796 bp, Artificial Sequence
  derived and/or modified sequence
gtgcaatggctagtactatgtgtcaacttgtctaggctatactgctcagctgtgtggtcaaacagtagtctagatgttgctgtgaaggtattttgtagatgtgatcaacatttacaatcagttgattttaagtaaagcagtttaacttccataatgtggatgggcctcatccaattagttgaaggtgttaagagaaaagaccaaggtttcctggaaaaggaattctaccacaagactaacataaaaatgcgctgtgagtttctagcctgctggcctgccttcactgtcctgggggaggcttggagagaccaggtggactggagtagactgttgagagacgctggtctggtgaagatgtccaggaaaccacgagcctccagcccattgtccaacaaccacccaccaacaccaaagaggttcccaagacaacccggaagggaaaagggacccatcaaggaagttccaggaacaaaaggctctccctaaaagaccgccgcttcaaaaaaacctgaggaatggagtgggccaacactatccagccactctgaccagccgaacgaggaactcaatcaaaatgagccatagcgggaccacaagggcaaggagaccaccaccttctccagtctctcttcggacagccagtaattcccgggcaaggccagagacttcaagtctatctgaaaagtctccagaggtctaaccccagataaatagccaacagggtgtagagtacattttacaccccaaagagtgtgccccatggtgatgaaaataaagtgaacatgttgcaaaatga

SEQ ID NO: 46884 - protein, 2179 aa, Artificial Sequence
  derived and/or modified sequence
MVNENTRMYIPEENHQGSNYGSPRPAHANMNANAAAGLAPEHIPTPGAALSWQAAIDAARQAKLMGSAGNATISTVSSTQRKRQQYGKPKKQGSTTATRPPRALLCLTLKNPIRRACISIVEWKPFEIIILLTIFANCVALAIYIPFPEDDSNATNSNLERVEYLFLIIFTVEAFLKVIAYGLLFHPNAYLRNGWNLLDFIIVVVGLFSAILEQATKADGANALGGKGAGFDVKALRAFRVLRPLRLVSGVPSLQVVLNSIIKAMVPLLHIALLVLFVIIIYAIIGLELFMGKMHKTCYNQEGIADVPAEDDPSPCALETGHGRQCQNGTVCKPGWDGPKHGITNFDNFAFAMLTVFQCITMEGWTDVLYWVNDAVGRDWPWIYFVTLIIIGSFFVLNLVLGVLSGEFSKEREKAKARGDFQKLREKQQLEEDLKGYLDWITQAEDIDPENEDEGMDEEKPRNMSMPTSETESVNTENVAGGDIEGENCGARLAHRISKSKFSRYWRRWNRFCRRKCRAAVKSNVFYWLVIFLVFLNTLTIASEHYNQPNWLTEVQDTANKALLALFTAEMLLKMYSLGLQAYFVSLFNRFDCFVVCGGILETILVETKIMSPLGISVLRCVRLLRIFKITRYWNSLSNLVASLLNSVRSIASLLLLLFLFIIIFSLLGMQLFGGKFNFDEMQTRRSTFDNFPQSLLTVFQILTGEDWNSVMYDGIMAYGGPSFPGMLVCIYFIILFICGNYILLNVFLAIAVDNLADAESLTSAQKEEEEEKERKKLARTASPEKKQELVEKPAVGESKEEKIELKSITADGESPPATKINMDDLQPNENEDKSPYPNPETTGEEDEEEPEMPVGPRPRPLSELHLKEKAVPMPEASAFFIFSSNNRFRLQCHRIVNDTIFTNLILFFILLSSISLAAEDPVQHTSFRNHILFYFDIVFTTIFTIEIALKMTAYGAFLHKGSFCRNYFNILDLLVVSVSLISFGIQSSAINVVKILRVLRVLRPLRAINRAKGLKHVVQCVFVAIRTIGNIVIVTTLLQFMFACIGVQLFKGKLYTCSDSSKQTEAECKGNYITYKDGEVDHPIIQPRSWENSKFDFDNVLAAMMALFTVSTFEGWPELLYRSIDSHTEDKGPIYNYRVEISIFFIIYIIIIAFFMMNIFVGFVIVTFQEQGEQEYKNCELDKNQRQCVEYALKARPLRRYIPKNQHQYKVWYVVNSTYFEYLMFVLILLNTICLAMQHYGQSCLFKIAMNILNMLFTGLFTVEMILKLIAFKPKHYFCDAWNTFDALIVVGSIVDIAITEVNPAEHTQCSPSMGPSCSHPPLAVLTAPPVADGFQNAEENSRISITFFRLFRVMRLVKLLSRGEGIRTLLWTFIKSFQALPYVALLIVMLFFIYAVIGMQVFGKIALNDTTEINRNNNFQTFPQAVLLLFRCATGEAWQDIMLACMPGKKCAPESEPSNSTEGETPCGSSFAVFYFISFYMLCAFLIINLFVAVIMDNFDYLTRDWSILGPHHLDEFKRIWAEYDPEAKGRIKHLDVVTLLRRIQPPLGFGKLCPHRVACKRLVSMNMPLNSDGTVMFNATLFALVRTALRIKTEEGPSPSEAHQGAEDPFRPAGNLEQANEELRAIIKKIWKRTSMKLLDQVVPPAGDDEVTVGKFYATFLIQEYFRKFKKRKEQGLVGKPSQRNALSLQAGLRTLHDIGPEIRRAISGDLTAEEELDKAMKEAVSAASEDDIFRRAGGLFGNHVSYYQSDGRSAFPQTFTTQRPLHINKAGSSQGDTESPSHEKLVDSTFTPSSYSSTGSNANINNANNTALGRLPRPAGYPSTVSTVEGHGPPLSPAIRVQEVAWKLSSNRCHSRESQAAMAGQEETSQDETYEVKMNHDTEACSEPSLLSTEMLSYQDDENRQLTLPEEDKRDIRQSPKRGFLRSASLGRRASFHLECLKRQKDRGGDISQKTVLPLHLVHHQALAVAGLSPLLQRSHSPASFPRPFATPPATPGSRGWPPQPVPTLRLEGVESSEKLNSSFPSIHCGSWAETTPGGGGSSAARRVRPVSLMVPSQAGAPGRQFHGSASSLVEAVLISEGLGQFAQDPKFIEVTTQELADACDMTIEEMESAADNILSGGAPQSPNGALLPFVNCRDAGQDRAGGEEDAGCVRARGRPSEEELQDSRVYVSSL

SEQ ID NO: 46885 - DNA, 13603 bp, Artificial Sequence
  derived and/or modified sequence
ttattttttcaaatggtgtagccgccggaggtgcggtgctcagttcttggaaggggcccggatgtactgaggatgcgttacagtttcactcgaggaggcagtagtggaaaggagcagtttttggggtttgatgccataatgggaatcaggtaatcgtcggcggggaagaagaaacgctgcagaccacggcttcctcgaatcttgcgcgaaagccgccggcctcggaggagggattaatccagacccgccggggggtgttttcacatttcttcctcttcgtggctgctcctcctattaaaaccatttttggtccatggtcaatgagaatacgaggatgtacattccagaggaaaaccaccaaggttccaactatgggagcccacgccccgcccatgccaacatgaatgccaatgcggcagcggggctggcccctgagcacatccccaccccgggggctgccctgtcgtggcaggcggccatcgacgcagcccggcaggctaagctgatgggcagcgctggcaatgcgaccatctccacagtcagctccacgcagcggaagcggcagcaatatgggaaacccaagaagcagggcagcaccacggccacacgcccgccccgagccctgctctgcctgaccctgaagaaccccatccggagggcctgcatcagcattgtcgaatggaaaccatttgaaataattattttactgactatttttgccaattgtgtggccttagcgatctatattccctttccagaagatgattccaacgccaccaattccaacctggaacgagtggaatatctctttctcataatttttacggtggaagcgtttttaaaagtaatcgcctatggactcctctttcaccccaatgcctacctccgcaacggctggaacctactagattttataattgtggttgtggggctttttagtgcaattttagaacaagcaaccaaagcagatggggcaaacgctctcggagggaaaggggccggatttgatgtgaaggcgctgagggccttccgcgtgctgcgccccctgcggctggtgtccggagtcccaagtctccaggtggtcctgaattccatcatcaaggccatggtccccctgctgcacatcgccctgcttgtgctgtttgtcatcatcatctacgccatcatcggcttggagctcttcatggggaagatgcacaagacctgctacaaccaggagggcatagcagatgttccagcagaagatgacccttccccttgtgcgctggaaacgggccacgggcggcagtgccagaacggcacggtgtgcaagcccggctgggatggtcccaagcacggcatcaccaactttgacaactttgccttcgccatgctcacggtgttccagtgcatcaccatggagggctggacggacgtgctgtactgggtcaatgatgccgtaggaagggactggccctggatctattttgttacactaatcatcatagggtcattttttgtacttaacttggttctcggtgtgcttagcggagagttttccaaagagagggagaaggccaaggcccggggagatttccagaagctgcgggagaagcagcagctagaagaggatctcaaaggctacctggattggatcactcaggccgaagacatcgatcctgagaatgaggacgaaggcatggatgaggagaagccccgaaacatgagcatgcccaccagtgagaccgagtccgtcaacaccgaaaacgtggctggaggtgacatcgagggagaaaactgcggggccaggctggcccaccggatctccaagtcaaagttcagccgctactggcgccggtggaatcggttctgcagaaggaagtgccgcgccgcagtcaagtctaatgtcttctactggctggtgattttcctggtgttcctcaacacgctcaccattgcctctgagcactacaaccagcccaactggctcacagaagtccaagacacggcaaacaaggccctgctggccctgttcacggcagagatgctcctgaagatgtacagcctgggcctgcaggcctacttcgtgtccctcttcaaccgctttgactgcttcgtcgtgtgtggcggcatcctggagaccatcctggtggagaccaagatcatgtccccactgggcatctccgtgctcagatgcgtccggctgctgaggattttcaagatcacgaggtactggaactccttgagcaacctggtggcatccttgctgaactctgtgcgctccatcgcctccctgctccttctcctcttcctcttcatcatcatcttctccctcctggggatgcagctctttggaggaaagttcaactttgatgagatgcagacccggaggagcacattcgataacttcccccagtccctcctcactgtgtttcagatcctgaccggggaggactggaattcggtgatgtatgatgggatcatggcttatggcggcccctcttttccagggatgttagtctgtatttacttcatcatcctcttcatctgtggaaactatatcctactgaatgtgttcttggccattgctgtggacaacctggctgatgctgagagcctcacatctgcccaaaaggaggaggaagaggagaaggagagaaagaagctggccaggactgccagcccagagaagaaacaagagttggtggagaagccggcagtgggggaatccaaggaggagaagattgagctgaaatccatcacggctgacggagagtctccacccgccaccaagatcaacatggatgacctccagcccaatgaaaatgaggataagagcccctaccccaacccagaaactacaggagaagaggatgaggaggagccagagatgcctgtcggccctcgcccacgaccactctctgagcttcaccttaaggaaaaggcagtgcccatgccagaagccagcgcgtttttcatcttcagctctaacaacaggtttcgcctccagtgccaccgcattgtcaatgacacgatcttcaccaacctgatcctcttcttcattctgctcagcagcatttccctggctgctgaggacccggtccagcacacctccttcaggaaccatattctgttttattttgatattgtttttaccaccattttcaccattgaaattgctctgaagatgactgcttatggggctttcttgcacaagggttctttctgccggaactacttcaacatcctggacctgctggtggtcagcgtgtccctcatctcctttggcatccagtccagtgcaatcaatgtcgtgaagatcttgcgagtcctgcgagtactcaggcccctgagggccatcaacagggccaaggggctaaagcatgtggttcagtgtgtgtttgtcgccatccggaccatcgggaacatcgtgattgtcaccaccctgctgcagttcatgtttgcctgcatcggggtccagctcttcaagggaaagctgtacacctgttcagacagttccaagcagacagaggcggaatgcaagggcaactacatcacgtacaaagacggggaggttgaccaccccatcatccaaccccgcagctgggagaacagcaagtttgactttgacaatgttctggcagccatgatggccctcttcaccgtctccaccttcgaagggtggccagagctgctgtaccgctccatcgactcccacacggaagacaagggccccatctacaactaccgtgtggagatctccatcttcttcatcatctacatcatcatcatcgccttcttcatgatgaacatcttcgtgggcttcgtcatcgtcacctttcaggagcagggggagcaggagtacaagaactgtgagctggacaagaaccagcgacagtgcgtggaatacgccctcaaggcccggcccctgcggaggtacatccccaagaaccagcaccagtacaaagtgtggtacgtggtcaactccacctacttcgagtacctgatgttcgtcctcatcctgctcaacaccatctgcctggccatgcagcactacggccagagctgcctgttcaaaatcgccatgaacatcctcaacatgctcttcactggcctcttcaccgtggagatgatcctgaagctcattgccttcaaacccaagcactatttctgtgatgcatggaatacatttgacgccttgattgttgtgggtagcattgttgatatagcaatcaccgaggtaaacccagctgaacatacccaatgctctccctctatggggccctcctgttctcacccccctcttgctgtgctaactgcacctcctgttgccgacgggttccagaacgcagaggaaaactcccgcatctccatcaccttcttccgcctgttccgggtcatgcgtctggtgaagctgctgagccgtggggagggcatccggacgctgctgtggaccttcatcaagtccttccaggccctgccctatgtggccctcctgatcgtgatgctgttcttcatctacgcggtgatcgggatgcaggtgtttgggaaaattgccctgaatgataccacagagatcaaccggaacaacaactttcagaccttcccccaggccgtgctgctcctcttcaggtgtgccaccggggaggcctggcaggacatcatgctggcctgcatgccaggcaagaagtgtgccccagagtccgagcccagcaacagcacggagggtgaaacaccctgtggtagcagctttgctgtcttctacttcatcagcttctacatgctctgtgccttcctgatcatcaacctctttgtagctgtcatcatggacaactttgactacctgacaagggactggtccatccttggtccccaccacctggatgagtttaaaagaatctgggcagagtatgaccctgaagccaagggtcgtatcaaacacctggatgtggtgaccctcctccggcggattcagccgccactaggttttgggaagctgtgccctcaccgcgtggcttgcaaacgcctggtctccatgaacatgcctctgaacagcgacgggacagtcatgttcaatgccaccctgtttgccctggtcaggacggccctgaggatcaaaacagaagagggacccagcccatcagaggcccaccaaggggctgaggatcctttccgccctgcagggaacctagaacaagccaatgaggagctgcgggcgatcatcaagaagatctggaagcggaccagcatgaagctgctggaccaggtggtgccccctgcaggtgatgatgaggtcaccgttggcaagttctacgccacgttcctgatccaggagtacttccggaagttcaagaagcgcaaagagcagggccttgtgggcaagccctcccagaggaacgcgctgtctctgcaggctggcttgcgcacactgcatgacatcgggcctgagatccgacgggccatctctggagatctcaccgctgaggaggagctggacaaggccatgaaggaggctgtgtccgctgcttctgaagatgacatcttcaggagggccggtggcctgttcggcaaccacgtcagctactaccaaagcgacggccggagcgccttcccccagaccttcaccactcagcgcccgctgcacatcaacaaggcgggcagcagccagggcgacactgagtcgccatcccacgagaagctggtggactccaccttcaccccgagcagctactcgtccaccggctccaacgccaacatcaacaacgccaacaacaccgccctgggtcgcctccctcgccccgccggctaccccagcacggtcagcactgtggagggccacgggccccccttgtcccctgccatccgggtgcaggaggtggcgtggaagctcagctccaacaggtgccactcccgggagagccaggcagccatggcgggtcaggaggagacgtctcaggatgagacctatgaagtgaagatgaaccatgacacggaggcctgcagtgagcccagcctgctctccacagagatgctctcctaccaggatgacgaaaatcggcaactgacgctcccagaggaggacaagagggacatccggcaatctccgaagaggggtttcctccgctctgcctcactaggtcgaagggcctccttccacctggaatgtctgaagcgacagaaggaccgagggggagacatctctcagaagacagtcctgcccttgcatctggttcatcatcaggcattggcagtggcaggcctgagccccctcctccagagaagccattcccctgcctcattccctaggccttttgccaccccaccagccacacctggcagccgaggctggcccccacagcccgtccccaccctgcggcttgagggggtcgagtccagtgagaaactcaacagcagcttcccatccatccactgcggctcctgggctgagaccacccccggtggcgggggcagcagcgccgcccggagagtccggcccgtctccctcatggtgcccagccaggctggggccccagggaggcagttccacggcagtgccagcagcctggtggaagcggtcttgatttcagaaggactggggcagtttgctcaagatcccaagttcatcgaggtcaccacccaggagctggccgacgcctgcgacatgaccatagaggagatggagagcgcggccgacaacatcctcagcgggggcgccccacagagccccaatggcgccctcttaccctttgtgaactgcagggacgcggggcaggaccgagccgggggcgaagaggacgcgggctgtgtgcgcgcgcggggtcgaccgagtgaggaggagctccaggacagcagggtctacgtcagcagcctgtagtgggcgctgccagatgcgggcttttttttatttgtttcaatgttcctaatgggttcgtttcagaagtgcctcactgttctcgtgacctggagttaaccggaacagcgtcttcattcatttctgttgggaccagacgcggagcctgggtgcgcgagccgccctccgggaggaaggcgcccggctgcgtctgcagaggcggggagaggaggcggcgagggtcccggggcgcgaggaaggcgcctgccctctcccagctcgcaggccccgggcccggccgcgcctccgcggggagagcaccccggcttcccgcgcgccctcaccaaaaggaccctacagcaaacgggtgtctttcgactctgcttgtagaaaccatttgcacatattctgtacgagcctcgctgtctccctagagccagggccctgcggatttggagaagggagcggggcaggacttccaggaggaccccaacccggcccggagagggaggaggaggcctccaggggcgcggagctctggggatgggcgtcgggccggcagtggtgcggctcactccgtccctgcccacctgcgacgggatcccccgaccggcacgggccacgccgagctcccggccagccgccggcccgcaggcagcgcgagggaggagctgcgccgccggctccgcccaaccaggtggtgctgagcttccgctgagcgctcttttgttttgtggtttgacacttttcttgacagcatgttgcagtttcttttcggttttggttttttttaaatgttttattttgctttcccagcgggaggggaggaagaagagtgtttacaaagtcctgtagccccctcacctttctgttttcacttttgccaatgtacatcgggtttggttttcttgtattatttaaacggttgtggtttcctttttccacggaggttcaatagaagccgctgcaggagagttttaccaaccattgtgtatgcccaataatttgttatcatttccttaggtagtaacctatttttgttctggtttggttcggttatctaatggaaaggtaactggcaatgcacttgatgtggtcttgcacatgtgggtgatagagttgggttcctttttatgctgggtgtacaggtgggtttgggagagaggagcatgcgcgagagagtctccgagtgtgtgcgacgcgtgtgtgtgtggtgggttgtctgtgtgcatatgtcctgcccgtgtatatgcacccacaccatgtgcccgtgcacaccagtgactacgcagtcccccctttctggtttagctgtgggaagatctgaatctggggccgtttgaaagcaaaaacaaaccactgtctctgcttctgaaacgggaatcagtaactctttgcattttctgtcccacaagatatgcaaaaacaatgcaataatattcatttaaaaatacaattgtgagttgtgttggcattaaaactgtattttaaaaaaagacagaaatttaagggaaaaacacaagaaggcattttgcttcaatatattccgtgtaatgttttattgcattgataatgtttctgttgaagaaaccgttatacttgaattcaggtcagtttcagtatttttcaaatatttttttaaaactgaattgcaattgtgccaagcgaatataatgaattgaattaagttggttttcggattcacttcttgtatattttgctgcatgtaaagtaaatcattttgtatttggagtgtgacaagctttacctttgaactcaagtgcttttctatatgtggttgggggaaagggaacaagttttctttagtttgcacaatgagcaaaggtatcaccagtgtagtcattattctgctctccacaaacaggtttggacattactgttttgcatatcttgtgtttgcttacatttccctcaatttttccaaaatcgtttgctgggtatgtttgtaccgcctcttgctgtgagagaccaggacctattttattccagtcttcactctgtccactctgctctggtcatctgatttggtacttctccaagaacagcccttcactgtgaggtgcagggaggcgttctgatgagccctcagtcactgggccgtcatccgcatcccccatggaagaggtagctggctttcccttcccttccaccacacggaattttctctttggcttccttaggaaagtgtacactaaccgggaggataaaattaaagtcaggctgcttggagggaggggcatcctcacttccggattcttgttgctctacccaacaaggacagcaggggctcgagaaaggaactggtgaaaccctgatccatctgaaagtcaactctgcgtgctcctttctccatcccttcctcactctggagcagcctttccttcaggcttgccctaatgtttgggctgccggggagggggccaggacaagggaagaggcatccggagctcacagtgggggtgggaacagatttttgtgggggcatctctaatgctcacttatatctccctagaacatcactcttttggtgctgtgtccttcaaatgtatgtcaacagtggtggctgaaaagggactgctttggggaaaacaggacccaaccattcacccagaattgacccattaaatctcttccagtcctagtgttccctgagcccctcttggcacatatataagtaagctagaaattacaataagggacagtccattcctctatgacagcttgctggactgattcatgacaaagtggagaaatgtactcaatactccccggttaacacagtctagaaacagagtttctttatggatatccacacccaagtcatccaaactttcttgattccttttcactgccatcaaggtcctctagaaattgagtttaggtatcatcctttgaaaagttcccaagatttctaccaggaggtacacacaggcgttccctgtctagggcaggaggactatcctagcttgaccttctgatccactagaataagactggcgtatgatgcctgtcatcagaacagactggcacaagtagtgacatcaatgaaccacagcacaatcttccaagtgatgtctactctccacctaaaatggaattttccccatgaccttgtaaaacataattgtcacatcttccatacccctcctgacagcccccaagtgtcaggagaaaacagtcaggggctaagggcccaagggacttgaagaaacaacagtttaaggtctgcagtttggtcaacttaattcttgtcctccgaccagccctgcctctttcatttccagaccttggagaatttttcccagctttgattcagaaggtactagttataacccctttccttcttcttaatccaataggcctcactctcactgggaaatccactcaaaggaacaaggcaatgtctctcattctatttcccagttccaaattccaggtgcttgtctggagtgaagctacccgttactttctcccagcttttctccacccagcatgtctcctgcccatgcagctgaagacagtggggcaacctcaggagaagcagacctttccatgcccaagttcatctcctgagcaacagtgacacctagaaaatgaggactttggaagtcacccaaaagatggtggctactttatggagtcctgaagatacacagccaccactcctaaaggcaaagaaagaaaacacgaatgtaggtcagggatagagtggaaccctggtcatcggggtttttagcctcatcgtgggaaaggtggtaaaggaggatgatggcatctccatccctagaggccaagaattgaaatatcattgtcaaggattagaaacaattcagcaaagaggccacaaaaagggcctgctgactcccagaagacctctttaaaccccaggggaggcaaatacttgctgatggagtctgggccgtttccatattttaaagaagacctgcctctggggcaaatgtcagcacagagaggactgggaggagaatggaggcaagaaaagggcatattttgactccctctgtgcctcttcccagttcatggaaggatgtgttcagcttacccacccacagtgaccagtgtggtggagccgctgacatctcaaggatctatttgggaaggtgagaagagtactcattccatctgggggtgttgttccagccacatcagcctacctggtgggatgtgggggtgtctgccaccctgtcccccctctgctgatgtccctcccctcaggctgtccaggtgccacctgacacaggctgctgtgcaaagacaggcggggaagcccaaacctcactcccagggaggccctcagccgccagagtccaggttctccagaggctacgatttgaggaggttgagggggaagacaggagggaaagaaaagtcctacaactgtcaggaatggggcacctttccctgtccctaagcaaagctccctcttcccactgccctccccagccccagctccctgtcctccccaacacctagtgagaaagacggtgcgtggaagggagtcccatgggcagatgcttacacgacctctttgtgaagcctcttctgggtttaacttcattcatcaatttattcttatgtcaaagcaatgaaacttttctttctggagccagataccaatacaacaggtgaacgggtttctgccacatctctacattgacgggggatgcttgaacaacccccctcactacacagacacacaccgttaaggcacaagggctggggttgagctctagatgagggactttcctgctcctgcaagggtgagcactgtatacacagacaaggagggtgcagtagagtgactcccttggatggaagtagtaccatcagaacctactattattatgacataaattctatttacatacattgagagaatactacaatcaacactttttcctgggatgactttaagaggtttgagccacagcacctgaagtggcaaagatccatggtctttgtagggtattagagaactcttccagtcacctctgaaagcactctagatcttgcagctgagtggatgaagtgtaacaaatctgttgcacgctgagaggagtcagaattagcatttttcatgaaagttccccacgtctctactaagaatgaggaagaaaagactaagactaggtaattacacagaggcttgaaatgttacatcaccagagccaagtcctctcccttcagatcagttactggctgctacacagggacacccccaccttttcagggcatcccatgcactccacttctcaggatctaaggaatttgactttgtagggatcccagaaagggcactgtgccacttcccctggtgtgaatcagacatacattgtacattcatttctaaaattcactcatgcacctcaaaccaaggtcattatccaaaaaaaaaaaaaaaaagctctgggtggaagagtttgtaagttttaagagagggtcatttctatgtgaggaaatgcagaaatggacagaatgattcttattcactgtttgggtctggagaattcccattgtggaaatcttagagatctcaagtttattaccaagggaataaggaaaaaaaggtgagcaggcaccaggccaagcagtggctcccttgccaaggaacctgaggctgcaggtttcagggacccccttgaagaaacctctcctggccattggccaggagaaaagagaagtctctcctgtagagtcacaagagaagcaaaagagggtgggtcactgggtcctggacatagcccccaaccccaagacttcccaatatggagaaactacaccaatgtttaaaaggggaaaaggaaagaacttgtacatcaagggaagatgatttgtaaacacacagtcctgtgcagaaagatccccttcaggaggtgtctccagcatcccaaagctgtgcgcaccttctcttttcctgcctcaggccacctatgcatccagctgcagcccatacccacacctgaaatccatctcttgaatcccagccaggttatataccaccccattgccatgtcctgtcctggccagaatgcatgctgttcccccaagcctcgtgggagtgaggccatgggaaacagagatgagcatgtctggacaagtctgtgatggtagtggatgagaataacccatggcaaaacacgcacattcattaagaaatagggcgacagattccccgttggtgaagcactgaaaggtctattactctcataatattgctgttttattttaatccaccagagctaccatgcaaaactttcctcctgtgaaacgctccagataaagctcctctaatctccccttccctcatgtcctccagctcaaacccaccttcatcccccaaaccaatctgtatcatgcctgttatcagagaggcacagaaagatgggcagtgcctccgttgtcaccattccccacacccctacacacccccacaccctcccctccaggctccacgacttcacagtcttactgttgtaaatatcattgtacagtttgtaatcctcaaataatcccattgtcagaggcctcgcctgatgggccttctcaccctcgagaaaggccagggaatctagaaggggcaacccttcaaggagagcttcagggtcatctctgtgtgagacactattgtatattcctgtaagattgcatttttatctaaggaatgatgttatttaaaaaacaaacaaaaaacacaaaaaataagaattgcaaataaatttcttaacaatgtct

SEQ ID NO: 46886 - DNA, 6540 bp, Artificial Sequence
  derived and/or modified sequence
atggtgaatgaaaatacaagaatgtatattccagaagagaaccaccagggctccaactatggatccccacgtccagcacacgctaacatgaatgccaacgcagcggcaggcctggcccccgagcatattccgacaccgggagccgcactaagttggcaagccgctatagacgctgcccgtcaggccaagcttatgggttccgcaggaaacgccacaatttctactgtgagttccacacagagaaaacggcaacagtacgggaagcccaagaagcagggaagcactacggccaccagacccccacgagccctgctgtgtctgacgctgaagaacccgatacggagggcttgtatcagcatcgtcgaatggaaacctttcgaaattatcatactactcacaatcttcgcgaattgcgttgctctggccatttatatccctttccccgaagacgacagtaacgccaccaactcaaatctggaacgggtggaatacctgttcctaatcattttcacagtggaagcgtttctaaaagtgatcgcttatggcttgctgttccatcctaacgcttacctccgcaacggctggaatctgctggacttcatcatcgtcgttgtcggacttttctcggcaattctcgaacaggccaccaaagccgatggagcaaatgcgctgggtgggaaaggtgccggcttcgatgtgaaagcattgagggcatttagagtgcttcgaccgctcaggcttgtgtctggggtgccgtctcttcaagttgtgctcaactccatcattaaggccatggtccctcttctccacatagcactcctggtcctctttgtgattattatctacgccatcatcggcctggaattgttcatgggcaagatgcataaaacctgctacaaccaggaagggatcgccgacgtccctgctgaggatgaccctagtccgtgcgccctggagaccggccacgggagacaatgccagaacggaacggtatgcaagcctggctgggacggcccaaagcatggcatcacgaacttcgacaacttcgcctttgcaatgctcactgtttttcagtgtattaccatggaagggtggaccgatgtgctgtactgggtgaacgatgctgtgggacgagattggccttggatttactttgtgacgcttataattataggaagcttttttgttctgaatctcgtgttgggagtgctgagcggagagttcagtaaagagcgggagaaggcaaaggctcgtggggattttcagaagctacgagagaaacagcagctcgaagaagatctgaagggctatctggattggattactcaagcggaggatatagatccggagaatgaggatgagggcatggacgaggaaaagccccgaaacatgtctatgcccacaagtgagactgaaagtgttaataccgagaacgtggcaggcggcgacatcgaaggggagaactgcggggccaggctggcccatagaatttctaagtccaagttctcccgttattggagaaggtggaatagattctgccgccgaaagtgcagagctgctgtcaaatccaacgtgttctattggctagtgatttttctggttttcctgaataccttgactatcgctagcgagcattataaccagcccaactggctgacagaagtccaggatactgccaacaaggctcttctagctctgttcactgccgagatgctgctgaagatgtacagccttgggctacaggcctactttgtgtcactcttcaatagatttgattgttttgtcgtgtgtggggggattctcgagacaatcctagtggagacgaaaatcatgagtcccctgggcatctctgtgctgagatgcgtgcggctgctgcgcatttttaaaataaccaggtattggaacagccttagtaacctggtagcttctctgctgaatagcgtgcggtccattgcaagtctgctgttgttgctgtttttatttattattatattttctctacttgggatgcaacttttcggcggaaagttcaattttgacgaaatgcagacgaggaggtcgacctttgataatttcccacagtcgctcctgaccgttttccagatactgaccggggaggattggaactcagtcatgtacgatgggattatggcctacgggggtccttccttcccaggcatgctcgtgtgtatctacttcattattctgtttatctgcggaaattatatccttctaaacgtgttcctcgcaatcgctgtcgacaatctcgcagacgctgagagcctgaccagcgcccagaaagaagaagaagaggaaaaagaacgcaagaaactcgcgagaactgcctctcctgagaaaaagcaagaacttgtggaaaagccagccgttggggagtctaaggaagaaaagatcgaactgaagtccatcaccgccgatggtgaatcccctcccgctactaagattaatatggacgatctgcaacctaacgaaaatgaagataaaagcccgtatccaaatccggaaaccactggagaggaagatgaggaagagcctgagatgcctgtcgggccaagaccaagaccgctgtcagagctacaccttaaggaaaaagccgtcccaatgcccgaagcgagcgctttcttcatcttctcctccaacaacaggttccgtttacaatgccatagaattgtgaacgacactatcttcactaacttgatcctatttttcatcctgctgtcgagcatctctctggcggcagaggatccagtgcagcatactagcttccgaaatcacatcctattttattttgatattgtgtttacaacaattttcaccatcgagatcgcacttaaaatgactgcctacggagcttttcttcataaaggaagcttttgcaggaattacttcaatatactggatctcctggttgtttcggtatcactgatttcgttcggcattcagtcttcagcgatcaacgttgttaaaatcctgagagttctgagggtgctgcgccctttgagagctattaacagagcaaagggcctgaagcacgttgttcagtgtgttttcgtggctatccgtaccattggcaacattgtcatagtcacaacactgctgcaattcatgtttgcatgtataggagtgcagttgtttaaagggaaactgtatacgtgtagcgactcttcaaagcaaacggaggccgagtgtaaagggaattacatcacttataaggatggtgaagtcgatcaccccatcatccagccgcgatcgtgggaaaattctaaattcgattttgataacgtccttgccgctatgatggcactgttcactgtcagtaccttcgagggctggcccgagttgctgtatcgctctattgacagtcatacagaagataaagggcctatttacaattaccgagtggagatatcaatcttctttatcatatatatcattatcatagctttctttatgatgaacatctttgtagggttcgtcattgtcacgttccaggaacagggggagcaggaatacaagaattgtgaactggacaagaaccaacgacagtgtgtcgagtacgccttaaaagctcgtcctctgcgtcgttatattccgaagaatcagcaccagtacaaagtatggtacgtggttaattcaacctattttgaatacctgatgttcgtgctcatcctcttgaataccatttgtttggcgatgcagcactacggacagtcttgcctgttcaaaatcgcaatgaacatacttaatatgttatttactggcctgtttaccgtcgaaatgatattaaagttaattgcctttaaaccgaagcattatttttgcgatgcctggaataccttcgatgcccttatcgtggtcggctcaatcgttgacattgctatcaccgaagtcaatccagctgaacacacacagtgctcaccaagtatggggccgtcatgcagccacccacctctagcggttctcacagcccctcctgtcgccgacggatttcagaatgctgaagagaatagcaggatctcaatcacattttttagactgttcagagtaatgcgacttgtgaaattgctcagccgcggggaaggcattaggacactcctctggaccttcattaaatcattccaagcactcccttatgtggctctgctgattgtgatgcttttttttatctacgcagtgattggaatgcaggtctttgggaaaatcgctctcaacgacaccactgaaattaatcggaataacaactttcaaactttcccacaagccgtgctcctgctgttcagatgcgctacgggggaggcttggcaagacattatgttggcttgtatgccagggaagaaatgtgctccggagagcgagccctcaaactctaccgaaggagagacaccttgtgggagtagcttcgccgtcttttatttcataagtttttatatgctctgtgcctttttgatcatcaatctttttgttgcggttatcatggataatttcgattacctgacaagggactggtctatcctcggaccccatcacctggatgaatttaagaggatttgggccgaatacgatcccgaggcaaagggccggatcaagcatctggatgtggtgaccctcctgaggcggatacagcctcccctgggattcgggaagttgtgcccacacagagtggcatgcaaacgtctggtgtccatgaatatgcctctgaatagtgacggaaccgtcatgttcaacgcaacactgttcgcactagttagaacagccttgaggatcaaaacggaggaagggccttctccctcagaggcccatcagggggctgaagacccctttcgccctgcggggaatctggagcaggcaaacgaggaattaagggccattattaagaagatctggaaaaggacttcaatgaagttgctggaccaagtggtgccccctgccggagacgatgaagtgacggtcggaaaattttacgcgacattccttattcaggagtacttccgcaagttcaagaagagaaaagagcagggcctcgtgggtaaacctagtcagcggaatgccctgagtctacaggctgggttgaggacccttcacgatattggtcccgagataaggcgggctatatccggagatctaacagctgaggaggaactggataaggcaatgaaagaggctgtgagtgcggcttcagaggacgatatattccggcgggccggggggctgttcgggaatcacgtgtcctattatcagtccgatggccggtcagcatttccacagacctttaccacgcagaggccactgcacattaataaggccgggtcctcccagggcgataccgagagccccagccacgagaagctggtggattccacattcaccccttcttcttacagtagtacaggcagcaacgcgaacataaataatgcaaacaacactgcactgggtaggctcccccggcccgcagggtacccttccaccgttagtaccgtcgaaggccatgggccccccctctcacctgccatacgtgtccaggaagtagcttggaaactgtcaagcaatcgatgtcattcaagggaatctcaggccgcaatggctggacaagaggagactagtcaggatgaaacgtacgaggtcaagatgaaccatgacactgaagcatgttctgagcctagcctcctcagtactgagatgctgtcctaccaggatgatgagaatagacagcttacccttcctgaggaagacaagagagatatcagacagtctcctaaacgcggcttcttgaggagcgctagtcttgggaggcgcgcctcatttcatcttgagtgtttgaaaagacagaaagatcgcggcggagacatctcacagaagacagtactgcccctgcatctggtccaccaccaggcactcgctgtagccgggctgtctcctctgttgcagcgctcacacagccccgcttccttccctagaccctttgctacccctcccgccacgccgggcagtaggggatggccccctcaaccggtgcccactctacgactagagggagtggaatcttctgaaaagttaaactccagcttcccctccatccattgcggttcttgggccgagaccactccagggggggggggaagcagtgccgccagacgcgtgcgaccggtgtccctgatggtccccagccaggccggggcaccaggacggcagtttcacgggtctgctagctcgctggtcgaagccgtcctgatttcagaaggtcttggccagttcgcccaagacccaaagttcatcgaagtcaccacccaagagctggctgatgcgtgcgatatgaccatcgaggagatggagtctgctgcagataacattctttcaggcggcgcgccacagtctccaaatggagccctgctgccttttgtgaactgtagagatgctggtcaggaccgagctgggggcgaagaagacgccggctgcgtgcgcgcccggggccgcccttctgaggaagagctgcaggactctcgagtttatgtaagctcactttag

SEQ ID NO: 46887 - DNA, 6540 bp, Artificial Sequence
  derived and/or modified sequence
atggtgaatgaaaacaccaggatgtacatccctgaggagaaccaccagggcagcaactacggcagccccaggcctgcccacgccaacatgaatgccaatgctgctgctggcctggcccctgagcacatccccacccctggggccgccctgtcctggcaggccgccattgatgctgcccggcaggccaagctgatgggcagcgctggaaatgccaccatcagcacagtgagcagcacccagaggaagaggcagcagtatggcaagcccaagaagcagggcagcaccacagccacccggcccccccgggccctgctgtgcctgaccctgaagaaccccatccggcgggcctgcatcagcatcgtggagtggaagccctttgagatcatcatcctgctgaccatctttgccaactgtgtggccctggccatctacatccccttcccagaagatgacagcaatgccaccaacagcaacctggagcgggtggagtacctgttcctgatcatcttcaccgtggaggccttcctgaaggtgattgcctacggcctgctcttccaccccaatgcctacctgagaaatggctggaacctgctggacttcatcatcgtggtggtgggcctcttcagcgccatcctggagcaggccaccaaggcagatggagccaatgccctgggcggcaaaggagctggctttgatgtgaaggccctgcgggccttccgggtgctgcggcccctgcggctggtgtctggagtgcccagcctgcaggtggtgctgaacagcatcatcaaggccatggtgcccctgctgcacatcgccctgctggtgctgtttgtgatcatcatctatgccatcatcggcctggagctgttcatgggcaagatgcacaagacctgctacaaccaggagggcattgctgatgtgcctgcagaagatgaccccagcccctgtgccctggagaccggccacggccggcagtgccagaatggcaccgtgtgcaagccaggctgggatggccccaagcacggcatcaccaactttgacaactttgcctttgccatgctgactgtgttccagtgcatcaccatggagggctggacagatgtgctgtactgggtgaatgatgctgtgggccgggactggccctggatctactttgtgaccctcatcatcatcggcagcttctttgtgctgaacctggtgctgggcgtgctgtctggagagttcagcaaggagcgggagaaggccaaggcccggggggacttccagaagctgcgggagaagcagcagctggaggaggacctgaagggctacctggactggatcacccaggctgaagatattgatcctgaaaatgaagatgagggcatggatgaggagaagcccaggaacatgtccatgcccaccagcgagacagaatctgtgaacacagaaaatgtggccggcggggacatcgagggggagaactgtggggcccggctggcccaccgcatcagcaagagcaagttcagccgctactggaggcgctggaaccgcttctgcaggaggaagtgcagagctgctgtgaagagcaatgtgttctactggctggtgatcttcctggtgttcctgaacaccctgaccatcgccagcgagcactacaaccagcccaactggctgacagaggtgcaggacacagccaacaaggccctgctggccctcttcaccgctgagatgctgctgaagatgtacagcctgggcctgcaggcctactttgtgtccctcttcaacagatttgactgctttgtggtgtgtggcggcatcctggagaccatcctggtggagaccaagatcatgagccccctgggcatctctgtgctgcgctgtgtgcggctgctgcgcatcttcaagatcacccgctactggaacagcctgagcaacctggtggccagcctgctgaacagcgtgcgcagcatcgccagcctgctgctgctgctcttcctgttcatcatcatcttcagcctgctgggcatgcagctgtttggaggcaagttcaactttgatgagatgcagaccaggaggagcacctttgacaacttcccccagagcctgctgaccgtcttccagatcctgaccggggaggactggaacagcgtgatgtatgatggcatcatggcctatggaggccccagcttccctggcatgctggtgtgcatctacttcatcatcctcttcatctgtggcaactacatcctgctgaatgtgttcctggccatcgctgtggacaacctggctgatgctgagagcctgaccagcgcccagaaggaggaggaggaggagaaggagaggaagaagctggccaggacagccagccctgagaagaagcaggagctggtggagaagccagctgtgggggagagcaaggaggagaagattgagctgaagagcatcacagcagatggagagagccccccagccaccaagatcaacatggatgacctgcagcccaatgaaaatgaagacaagagcccctaccccaaccctgagaccactggagaggaggatgaggaggagcctgagatgcctgtgggcccccggccccggcccctgtctgagctgcacctgaaggagaaggctgtgcccatgcctgaggccagcgccttcttcatcttcagcagcaacaaccgcttccggctgcagtgccaccgcatcgtgaatgacaccatcttcaccaacctgatcctcttcttcatcctgctgagcagcatcagcctggccgctgaggaccctgtgcagcacaccagcttcaggaaccacatcctcttctactttgacatcgtgttcaccaccatcttcaccatcgagatcgccctgaagatgacagcctatggagccttcctgcacaagggcagcttctgcaggaactacttcaacatcctggacctgctggtggtgtctgtgtccctcatcagctttggcatccagagcagcgccatcaacgtggtgaagatcctgcgggtgctgcgggtgctgcggcccctgcgggccatcaacagagccaagggcctgaagcacgtggtgcagtgtgtgtttgtggccatccgcaccatcggcaacatcgtcatcgtgaccaccctgctgcagttcatgtttgcctgcatcggcgtgcagctgttcaagggcaagctgtacacctgcagcgacagcagcaagcagacagaagctgagtgcaagggcaactacatcacctacaaggatggagaggtggaccaccccatcatccagcccaggtcctgggagaacagcaagtttgattttgacaacgtgctggccgccatgatggccctcttcaccgtgtccacctttgagggctggccagagctgctgtaccgcagcattgacagccacacagaggacaagggccccatctacaactacagagtggagatcagcatcttcttcatcatctacatcatcatcatcgccttcttcatgatgaacatctttgtgggcttcgtcatcgtgaccttccaggagcagggcgagcaggagtacaagaactgtgagctggacaagaaccagaggcagtgtgtggagtatgccctgaaggcccggcccctgcggcgctacatccccaagaaccagcaccagtacaaggtgtggtacgtggtgaacagcacctactttgagtacctgatgtttgtgctgatcctgctgaacaccatctgcctggccatgcagcactacggccagagctgcctcttcaagatcgccatgaacatcctgaacatgctgttcaccggcctcttcaccgtggagatgatcctgaagctgattgccttcaagcccaagcactacttctgtgatgcctggaacacctttgatgccctgattgtggtgggcagcatcgtggacatcgccatcacagaggtgaacccagctgagcacacccagtgcagccccagcatgggccccagctgcagccacccccccctggccgtgctgacagcccctcctgtggctgatggcttccagaatgctgaggagaacagccgcatcagcatcaccttcttccgcctcttccgggtgatgaggctggtgaagctgctgagcagaggagagggcatccgcaccctgctgtggaccttcatcaagagcttccaggccctgccctacgtggccctgctgattgtgatgctgttcttcatctatgctgtgattggcatgcaggtgtttgggaagatcgccctgaatgacaccacagagatcaacagaaacaacaacttccagaccttcccccaggccgtgctgctgctcttccgctgtgccaccggggaggcctggcaggacatcatgctggcctgcatgcctgggaagaagtgtgcccctgagagcgagcccagcaacagcacagaaggagagaccccctgtggcagcagctttgctgtgttctacttcatctccttctacatgctgtgtgccttcctgatcatcaacctgtttgtggccgtcatcatggacaactttgactacctgacccgggactggagcatcctgggcccccaccacctggatgagttcaagaggatctgggccgagtatgaccctgaggccaagggccgcatcaagcacctggatgtggtgaccctgctgcggcgcatccagccccccctgggctttgggaagctgtgcccccaccgggtggcctgcaagaggctggtgtccatgaacatgcccctgaacagtgatggcaccgtgatgtttaatgccaccctgtttgccctggtgaggacagccctgcgcatcaagacagaggagggccccagccccagcgaggcccaccagggcgctgaggaccccttccggcctgctggcaacctggagcaggccaatgaggagctgcgggccatcatcaagaagatctggaagaggacctccatgaagctgctggaccaggtggtgcccccagctggagatgatgaggtgacagtgggcaagttctacgccaccttcctgatccaggagtacttcaggaagttcaagaagaggaaggagcagggcctggtgggcaagcccagccagagaaatgccctgagcctgcaggccggcctgcggaccctgcatgacatcggccctgagatcagaagagccatcagcggggacctgacagctgaggaggagctggacaaggccatgaaggaggccgtgtctgctgcctctgaagatgacatcttccggcgggccggcggcctgtttggaaatcatgtgtcctactaccagagtgatggccgcagcgccttcccccagaccttcaccacccagaggcccctgcacatcaacaaggccggcagcagccagggcgacacagagagccccagccatgagaagctggtggacagcaccttcacccccagcagctacagcagcacaggcagcaatgccaacatcaacaatgccaacaacacagccctgggccgcctgcccaggcctgctggctaccccagcacagtgtccacagtggagggccacggcccccccctgagccctgccatccgggtgcaggaggtggcctggaagctgagcagcaaccgctgccacagccgggagagccaggccgccatggccggccaggaggagaccagccaggatgagacctatgaggtgaagatgaaccacgacacagaggcctgcagcgagcccagcctgctgagcacagagatgctgagctaccaggatgatgagaaccggcagctgaccctgcctgaggaggacaagagggacatccggcagagccccaagaggggcttcctgcggagcgccagcctgggccggcgggccagcttccacctggagtgcctgaagaggcagaaggaccggggcggggacatcagccagaagacagtgctgcccctgcacctggtgcaccaccaggccctggccgtggccggcctgagccccctgctgcagaggagccacagccctgccagcttcccccggccctttgccaccccaccagccaccccaggcagccggggctggccaccccagcctgtgcccaccctgcggctggagggcgtggagagcagcgagaagctgaacagcagcttccccagcatccactgcggctcctgggccgagaccaccccaggcggcggcggcagcagcgctgcccggcgggtgcggcctgtgtccctgatggtgcccagccaggccggggcccctggccggcagttccacggcagcgccagcagcctggtggaggccgtgctgatcagcgagggcctgggccagtttgcccaggaccccaagttcatcgaggtgaccacccaggagctggctgatgcctgtgacatgaccatcgaggagatggagagcgctgctgacaacatcctgagcggcggggccccccagagccccaacggggccctgctgccctttgtgaactgcagagatgctggccaggacagagctggaggagaagaagatgctggctgtgtgcgggcccggggccggcccagcgaggaggagctgcaggacagccgggtgtatgtgagcagcctgtag

SEQ ID NO: 46888 - DNA, 6540 bp, Artificial Sequence
  derived and/or modified sequence
atggtgaacgagaacacccggatgtacatccccgaggagaaccaccagggctccaactacggctccccccggccagcccacgctaatatgaatgcaaacgcagcagcaggcctggcacccgagcatatacctacacccggcgccgccctgtcatggcaggctgctatcgacgctgcccgacaggctaaattgatgggtagcgctggcaatgctacaatcagcaccgtgagtagcactcagcgaaagcgacaacagtacggaaagcccaaaaagcaaggttcaactactgcaactagaccaccacgggctctgttatgtctcaccttaaaaaaccctattagacgtgcctgcattagcattgtcgaatggaaaccttttgaaattatcatcctgctaactatctttgcgaactgcgtcgccctggccatctatatccccttcccggaagatgactctaacgcaaccaattctaatttggagcgggtggagtatctgtttctcattatctttacagtggaggctttcttgaaggtgatcgcatatggactcctgttccatccaaatgcctacctgcgtaatggttggaatctcttggacttcatcatcgtggtagtcggactgtttagcgctattttggagcaagccacaaaggccgacggcgctaatgccctgggcggcaagggtgcaggctttgatgttaaggcgctgagagcttttcgagtactgcggccgcttcgtctggtgagcggagtcccttcgctgcaagtggtcttgaattccattatcaaagcgatggtccccttattacatattgccctgcttgtgctatttgtaattatcatctacgctatcatcggcttagagcttttcatgggcaaaatgcataagacgtgctataatcaggaagggatcgccgatgtccccgcggaggacgaccccagcccctgcgcgcttgagacaggccatggtcgccagtgtcaaaacgggaccgtttgcaaaccaggctgggatggacctaaacacggcatcaccaacttcgacaattttgcttttgccatgctcaccgtatttcagtgcatcactatggaaggctggacagatgtcctgtactgggtcaacgatgccgtcggaagagactggccatggatctactttgttactctcattataatcggatcttttttcgttttgaatctggttttgggtgtacttagcggcgaattcagtaaggaacgggaaaaagcgaaagcaaggggcgatttccagaaattaagggaaaagcaacagctcgaagaagatctgaaaggatatctcgattggatcactcaggccgaggacatcgatccagagaatgaggacgagggcatggacgaagagaaaccacggaacatgtcaatgccaacatctgaaaccgaaagtgtcaacacagaaaatgttgcaggaggggacattgaaggggaaaattgtggagccaggctggcccaccgaatctctaagtccaaattcagtcgctattggcgaagatggaatcggttttgccggaggaaatgcagagctgccgtaaagtctaacgttttttattggcttgtaatctttctggtatttttaaacactctgaccatcgcaagcgaacactacaatcaacctaattggctgactgaggtgcaggatacggcgaacaaggcgctgttagccttatttaccgcggaaatgttactgaaaatgtattcactgggcctgcaggcttatttcgttagcctgtttaaccgctttgattgttttgtcgtctgcgggggcatcctcgagacaattctggtcgagaccaaaatcatgtctccactgggcatttcagtcttgcggtgcgtccgtctgcttcggatattcaaaattacccgatactggaatagcttgtccaatctcgtagcttcccttctgaactctgtacgctccatcgcaagcctattgctcctacttttcttgttcatcatcatcttcagcttgctgggaatgcagctgttcgggggaaaattcaacttcgacgagatgcagacgcgacgctccacctttgataatttcccccagtcattactaacggtcttccagatcctcactggtgaggattggaactctgtgatgtacgatggcatcatggcttatggcggaccctccttccccggtatgctcgtttgcatctattttataatcctgtttatctgcggaaactatatccttctgaacgttttcctagcaatcgctgttgacaatttggctgacgccgagtccctgaccagcgctcagaaggaagaagaagaagaaaaagagcggaagaaactggcgcggaccgcatctccagagaaaaagcaagaattagtggaaaagcctgccgttggcgaatcaaaggaggagaagatcgagcttaagagcattaccgctgatggtgaatctccacctgccactaagataaatatggacgatttgcagcctaatgaaaatgaagataaatctccatacccgaatccggaaaccacaggagaggaagatgaagaagagccagaaatgcccgtgggaccacggcctaggcctttatcagaactccaccttaaggagaaggccgtccccatgcccgaggcttctgctttttttatttttagttcaaacaacaggttccggctccagtgccacagaatcgtgaatgacacgattttcacgaatctcatcctctttttcattttactgagttctattagcttggccgccgaagatcccgtccagcacacgagcttcagaaaccatattttgttctattttgacatagtcttcacgacaattttcacaatcgaaatcgcattaaagatgaccgcatacggcgcttttctgcacaagggcagtttttgcagaaactacttcaacatcctagatctgctggttgtgagcgtgtctttgatctcattcgggatccagagttccgcgattaatgtggtcaaaattctgcgcgtccttcgcgtgttacgtcccctgagggctattaatagggcgaaggggctgaagcatgtcgtccaatgcgtgttcgtggctataaggacgatcgggaatatcgttattgttaccaccctccttcagttcatgtttgcctgcatcggagtgcagctgttcaagggtaaattgtatacttgtagcgacagtagcaagcagacagaggccgagtgtaaggggaattacatcacgtacaaggatggggaagtggaccatccaataattcagccaaggtcttgggagaacagcaagtttgacttcgacaatgtgcttgcagccatgatggctctattcacagtgtctactttcgagggatggcccgaactcctgtaccgctctatagacagtcatacggaggacaagggcccaatctacaactatagggtcgagatcagcatcttctttattatttacattattattatcgccttttttatgatgaacatctttgtcgggtttgtgatcgtgactttccaggaacagggcgagcaggaatataaaaattgcgagcttgataagaaccaacgccaatgtgtcgaatacgcgttgaaggccagacctttgcgtcgctatatccccaagaaccagcatcaatataaagtttggtatgtggtcaactccacttatttcgagtacttaatgtttgtattgatcctgctgaacaccatttgtctggccatgcaacattatggacagagttgcctcttcaaaatcgctatgaacatactgaatatgctcttcaccggtcttttcaccgtggagatgatcctgaagctgatcgcctttaaacccaaacattatttttgcgatgcctggaatacattcgacgcactgatagttgtcggctcaatagtggatatcgccattacggaggtcaatcctgcagagcacacccaatgttccccatctatgggcccttcatgctcccaccctcccctcgcagtgttgaccgcccctcctgtggccgatggctttcagaatgctgaggagaattcacgaatctccatcacattcttcaggctcttcagggtaatgcggctagtcaaactgctctcccgcggggagggcatccggactctcctctggaccttcattaagtcatttcaggcgctgccttacgtcgccttgttaatcgttatgctgttcttcatttacgccgttatcgggatgcaagtgtttggcaaaattgccttgaacgacacaacagagattaacagaaataataacttccagaccttccctcaggctgtactcctcttgttccggtgcgcaaccggagaagcctggcaggacatcatgctggcttgcatgcccggtaagaaatgcgcgccagagtcagagcccagcaatagcacggaaggggaaacaccttgtgggtcctcctttgcggtgttctacttcatcagtttctacatgctgtgcgcctttcttataatcaacctgttcgtcgctgtcatcatggataactttgattacttaaccagggattggagcattttgggccctcaccatctcgatgagtttaaaaggatttgggcagaatacgacccggaggccaaaggtcgtattaagcacctggatgtcgtgacgttgcttcgccgtattcagccgcccctcggattcgggaaactgtgtccccaccgagtcgcatgcaagcggctggtatccatgaacatgcctttaaacagcgacgggacggtcatgtttaacgcaacactgtttgccctggttcgcacagccctccgcataaaaactgaagaaggtcctagtccatccgaagctcaccagggcgctgaagacccatttagacccgccggcaaccttgaacaggctaatgaggaattgagagcaattattaaaaagatatggaagcgtacgtccatgaaactactggaccaggtggtgccaccggcaggtgacgatgaagtcacagtcggtaagttttacgctacctttctgattcaagagtattttaggaagtttaagaaacgaaaggagcagggcctcgtgggcaaaccatcacagagaaatgcactgagcctgcaggccggactcaggacccttcacgatattggacccgagatcagaagggctatcagtggcgacctgactgccgaggaggagctggataaggctatgaaggaagcagtgtccgcggcttcagaagatgatattttcaggcgtgcgggggggctttttgggaaccacgtctcatattatcaaagtgatggaaggtcagcttttcctcagaccttcacaactcagcggcctctacacattaataaggctgggtcctctcaaggcgacaccgagtcaccaagtcatgaaaaactggtggatagcacctttactccctccagttatagttccacaggcagcaacgcaaatattaataatgccaacaacacagcactgggtaggctgccaaggccagctgggtatccctctactgtaagcactgttgagggacacgggccaccgctgtccccagctatcagggtacaggaagtggcgtggaagctcagctctaaccggtgccactcgcgtgaatcccaagccgcaatggctggacaggaagagacatcccaggacgaaacctacgaggttaagatgaatcacgacaccgaggcctgcagcgagcccagcctgctgtcaaccgaaatgttgtcttatcaagatgacgaaaaccggcagctgacgctgccggaagaggacaagagggatatccggcaaagtccaaagcgtgggttcttgcgctccgcctctttgggacgaagggcgtcattccaccttgagtgcctcaaaaggcagaaagatcgaggaggggatatttcccagaagacagttctgccgttgcacctcgttcaccatcaggcccttgccgtggcagggctaagtcccctgctacagaggagccattcccctgccagttttccccgcccattcgccactcctcctgctaccccagggtctcgcggctggccccctcagcccgtgcctactctgcggctggaaggagtagaaagctcggaaaagctgaatagctctttcccttctatccactgcggctcctgggccgagacaacacccggcggcggggggtcatctgcagcccgaagggtacggcctgtgtctcttatggttccctcgcaagctggcgctcccggcagacaatttcatggatctgcttcttctctggtggaggctgtcctcatcagtgaaggcttagggcagtttgcgcaggacccaaagtttattgaggtgaccacgcaggagttggccgatgcttgcgacatgacgatcgaagagatggagtccgccgccgacaacatcttatcaggcggcgctcctcaaagtccgaatggagctctgctgccctttgtcaactgccgcgacgctggtcaggatcgagcaggcggggaggaggatgcgggttgcgtgcgggcgcgcggccgtccttctgaggaagagctccaggactctcgggtgtacgtatcgagtttgtag

SEQ ID NO: 46889 - DNA, 6539 bp, Artificial Sequence
  derived and/or modified sequence
atggtgaacgagaatacacgcatgtacatcccagaagagaatcatcagggtagcaattatggcagccccagaccagcccatgccaatatgaatgcgaacgctgcggcaggattggctcctgagcatatacccacgcccggtgcagccctgagttggcaggcagcaatcgatgccgcaaggcaggcaaagctgatgggcagcgcaggcaacgccaccatatccacggtgtcttctactcagcggaaaaggcaacagtacggcaagcctaagaagcaggggtctaccaccgccacacgccctcccagagcactgctgtgtctcacactgaaaaaccccatccggagggcttgcatctcgatagtggagtggaaacctttcgagatcatcatcctgctgacaattttcgccaattgcgtcgctcttgctatttacatcccgttcccagaggatgacagcaacgcaacaaattctaacctcgagagagtggaatatttattcctgatcatatttactgttgaggcctttttgaaggtcattgcgtacggcctgctttttcaccccaacgcctatctgcgcaatgggtggaatctcctcgacttcataattgtagtggtgggactattctcggccatattggagcaagcaaccaaagccgacggggcaaatgcgctggggggaaagggcgcagggttcgatgtcaaagctttaagagcatttagagtgctgaggcctctgcggttggtatcaggcgtgccctccctgcaggtggtgcttaatagcatcatcaaagctatggtgcctctgctccacatagccctgcttgttctgttcgtgatcatcatttacgccattatcggtttggagctgttcatgggtaaaatgcacaagacatgttacaatcaggaggggatcgcagatgtcccagccgaggacgatcccagcccttgtgctctagaaactggacacggaaggcaatgccagaatggcactgtctgcaagccgggatgggatgggccaaaacacggcataacaaacttcgacaactttgcgttcgccatgctgaccgtgttccagtgcattacaatggaaggctggacagatgtgttgtattgggtgaacgacgctgtcggcagagattggccatggatctacttcgtcaccctgattatcatcggttccttcttcgttttaaatctggtgctgggagtgcttagcggagaattttctaaagaaagggagaaagctaaggccagaggcgacttccagaaactacgtgaaaagcagcagttagaggaagatctcaaggggtatctagattggatcacacaggccgaagatattgacccagaaaacgaggacgagggcatggatgaagaaaaacctaggaacatgtccatgccgacctcagagaccgagagcgtgaacaccgagaacgtggcagggggtgacatcgagggagagaactgcggcgctagattggcccatcgcatttcaaaaagtaaattcagcagatattggcggaggtggaaccgtttctgccgtaggaagtgcagagccgctgtgaaaagcaacgtgttttattggcttgtgatcttcctggtatttttgaacacattgaccattgcctctgagcattataatcagcctaattggctgactgaggttcaggacacggctaacaaagccctcctcgcactgtttactgcagaaatgctgctcaagatgtacagcctgggactacaggcctacttcgtttccctctttaatcgatttgactgcttcgtcgtctgcggcggaatattggaaaccatcctcgtggagacaaagatcatgtccccacttggtatttccgttctccgttgcgtgaggctgttacgcatatttaaaatcacaagatactggaattcactgtctaacttggtggcatcacttctgaactctgtgcgatcaatagcctccctcttactgctgctattcctgtttatcatcatcttcagcttgctgggaatgcagctattcggtggcaagttcaactttgatgagatgcaaacccggaggtccacctttgacaatttccctcagtccttgctgacagtttttcagatccttactggcgaagattggaatagcgtgatgtacgatggcatcatggcctacggtggaccatcttttcccggaatgctcgtgtgtatatactttatcatcctgtttatatgtgggaattacatcctgttgaacgtcttcctggcaattgctgttgacaaccttgccgatgcggagagcctgaccagcgcccagaaagaggaagaggaggaaaaagagagaaagaaactcgcgagaaccgctagtccagagaaaaagcaggaactggtggagaagccagctgtgggggaatcaaaggaggagaagatcgagctgaaaagtattacggccgacggggaatcccccccagcaaccaaaatcaacatggacgatctccagcctaacgaaaacgaagacaaaagtccttatccaaatcccgagacgactggcgaggaggacgaggaggagccagagatgcccgtcggcccaaggcctcggcctctgtctgaacttcatctgaaggagaaagccgtaccaatgccagaagctagcgcctttttcatttttagctcaaataacagattccgattacagtgtcacaggattgtcaacgatactatcttcaccaatctcatactgttcttcatcctcttgtcctccatctccctcgccgcagaggatccagtccagcataccagcttccgcaatcacatcctgttttacttcgacattgtgttcaccaccatcttcacgatcgaaatagctctcaagatgaccgcttacggcgcttttctgcacaagggttcgttttgtagaaattactttaatatcctcgatctgttagtggtgtctgtgtctcttatctccttcggtattcagagtagcgctattaatgtggtcaagatcttgagagtgttgcgagttctgcggcctctgcgggcaatcaaccgggcaaagggcctgaagcatgttgtgcaatgtgtatttgtcgctattcgcaccatcggaaacatcgtgatcgtaacgaccttactacagtttatgtttgcctgcattggagtgcagttgttcaaggggaaactctacacttgcagcgactcatctaagcagaccgaagccgagtgtaaaggcaactacatcacctacaaagacggagaagtcgaccatcctattatccagccacgaagctgggagaatagtaagttcgactttgataatgtgctggccgctatgatggctctgtttaccgttagcacatttgagggctggcctgagctactctataggagtatcgactcacacactgaggataagggtcctatttataactatcgcgtggaaatcagcattttcttcatcatttatatcatcatcatcgctttttttatgatgaatatcttcgttgggttcgtgatcgtgactttccaggaacagggtgaacaggaatacaaaaattgcgagttggacaagaatcaacgccagtgtgttgaatatgccttgaaagccagacctctgcgacgctacatacccaaaaatcagcaccagtataaagtctggtatgtagtgaatagtacatatttcgagtacctgatgttcgtcctgattctgctcaacacaatctgtcttgccatgcagcattacggtcagagttgcctgttcaagattgctatgaatatcctgaatatgctgtttacaggtctgttcactgttgaaatgattctcaaactcattgcattcaaacccaaacattatttctgtgatgcttggaacacgttcgacgcgctgattgtagtaggatccatcgttgacatagcaattacagaagtgaaccctgccgagcacactcagtgtagcccaagtatgggcccaagttgttctcatccacctctggcagtgctgactgcaccgcctgtcgccgacggcttccaaaatgccgaagagaactctaggatctccataaccttttttagactgttcagagtgatgaggctagtgaaacttctgagtcggggagagggcatacggactctcctctggaccttcatcaagagctttcaggccttgccatacgttgcactgctgatagtcatgctctttttcatctacgcagtaatcggtatgcaagtgtttgggaagattgccctcaacgacactaccgaaatcaaccgcaacaataattttcagaccttcccccaggcagtgcttctgcttttcagatgtgctactggcgaagcctggcaggatattatgttagcatgtatgcccggtaagaaatgcgcacccgagtccgagcccagtaactcgaccgaaggcgaaactccttgtggctcgtcattcgcggtgttctacttcatcagtttctatatgctgtgtgcctttttgatcatcaatctgtttgtggccgtcattatggacaacttcgactatctgactcgggattggtccattctgggccctcatcatctggacgagttcaagcgcatatgggctgagtacgatccagaagctaagggtcgcattaaacacctagacgttgtgacactgctgcgacgcatccagccacctttgggcttcggcaaactctgtccacaccgagtggcttgtaaacgcctcgtctctatgaacatgcctctcaattctgatggtactgttatgtttaatgctactttgttcgccctcgtaaggacggccttgagaatcaagacagaagaaggcccatcacccagcgaggcccatcaaggggcagaggacccattcagaccagctgggaacctcgaacaggccaatgaggagctgcgggcaattattaagaaaatttggaaacgtacaagtatgaaactgttggatcaagtagtgccacccgctggtgacgatgaggtcaccgtcggaaagttttatgccacttttctgatccaggaatatttcaggaagttcaagaagcgaaaagagcaaggcctcgtaggtaagcctagccagcgcaatgctctctccctgcaggcaggcctacggacactgcatgacatcggtcctgaaattcggagggcaataagtggggatctgaccgctgaggaggagttggataaagctatgaaagaggcggtgtccgccgcatccgaggatgatatcttccggagagcgggtggtttatttggcaatcatgttagttattaccagagcgatggcagatctgcctttccccagactttcaccactcaacggccattacacatcaacaaagctggctcttcacagggggacaccgagtctccgtctcatgaaaaactcgtagatagcacttttacccccagctcttactcgtctacaggaagtaacgccaatattaacaacgctaataacactgccctggggagattgcccagacctgcaggttaccccagcacagtatccaccgtggagggccacggtcctcccctcagccctgcaatccgggtgcaagaagtcgcttggaaactgtcaagtaatcgctgtcattcacgagagtcccaggcggctatggcagggcaggaggagacttctcaggacgaaacttatgaagtgaagatgaaccacgatacagaggcatgcagcgaaccctcattactgtctacagagatgttatcttatcaggacgacgagaaccgccagctgactcttcccgaggaagacaaaagagatatacgccagagtccaaagcgcggattcctgcgcagtgcctctttgggaagaagggcatcctttcacctggagtgccttaaaagacagaaagataggggaggtgacattagccagaagaccgttctgccactgcatctcgtccaccaccaggccctcgctgttgctgggctcagtcccctgctgcagcggtcacattcccccgcatccttccccagaccttttgctacacctcccgcaacgcctggaagtcggggttggcctccccagcccgtgcctaccttaaggcttgaaggcgtggaatcttcagagaaactcaattcctccttccccagtattcattgtgggtcttgggccgagaccaccccaggtggcggaggctcctcagccgctaggagggtcaggccagtgtccctaatggtcccctctcaggccggagctcctggacgacagttccatggatcagcttcatccctagtggaagccgtcctcattagcgagggcttgggccagtttgctcaggacccaaaattcattgaggtgactacccaggagctggctgatgcctgtgacatgaccattgaggagatggagtctgccgcagacaacattttatcaggcggtgcgcctcaaagcccaaacggggctctattgccgttcgtaaattgccgtgacgcgggacaagacagggcgggtggtgaagaggatgccggatgcgtgcgcgcacgaggaagaccctccgaggaggaactccaggactcacgcgtctacgtctccagcctgta

SEQ ID NO: 46890 - DNA, 6634 bp, Artificial Sequence
  derived and/or modified sequence
atggtcaatgagaatacgaggatgtacattccagaggaaaaccaccaaggttccaactatgggagcccacgccccgcccatgccaacatgaatgccaatgcggcagcggggctggcccctgagcacatccccaccccgggggctgccctgtcgtggcaggcggccatcgacgcagcccggcaggctaagctgatgggcagcgctggcaatgcgaccatctccacagtcagctccacgcagcggaagcggcagcaatatgggaaacccaagaagcagggcagcaccacggccacacgcccgccccgagccctgctctgcctgaccctgaagaaccccatccggagggcctgcatcagcattgtcgaatggaaaccatttgaaataattattttactgactatttttgccaattgtgtggccttagcgatctatattccctttccagaagatgattccaacgccaccaattccaacctggaacgagtggaatatctctttctcataatttttacggtggaagcgtttttaaaagtaatcgcctatggactcctctttcaccccaatgcctacctccgcaacggctggaacctactagattttataattgtggttgtggggctttttagtgcaattttagaacaagcaaccaaagcagatggggcaaacgctctcggagggaaaggggccggatttgatgtgaaggcgctgagggccttccgcgtgctgcgccccctgcggctggtgtccggagtcccaagtctccaggtggtcctgaattccatcatcaaggccatggtccccctgctgcacatcgccctgcttgtgctgtttgtcatcatcatctacgccatcatcggcttggagctcttcatggggaagatgcacaagacctgctacaaccaggagggcatagcagatgttccagcagaagatgacccttccccttgtgcgctggaaacgggccacgggcggcagtgccagaacggcacggtgtgcaagcccggctgggatggtcccaagcacggcatcaccaactttgacaactttgccttcgccatgctcacggtgttccagtgcatcaccatggagggctggacggacgtgctgtactgggtcaatgatgccgtaggaagggactggccctggatctattttgttacactaatcatcatagggtcattttttgtacttaacttggttctcggtgtgcttagcggagagttttccaaagagagggagaaggccaaggcccggggagatttccagaagctgcgggagaagcagcagctagaagaggatctcaaaggctacctggattggatcactcaggccgaagacatcgatcctgagaatgaggacgaaggcatggatgaggagaagccccgaaacatgagcatgcccaccagtgagaccgagtccgtcaacaccgaaaacgtggctggaggtgacatcgagggagaaaactgcggggccaggctggcccaccggatctccaagtcaaagttcagccgctactggcgccggtggaatcggttctgcagaaggaagtgccgcgccgcagtcaagtctaatgtcttctactggctggtgattttcctggtgttcctcaacacgctcaccattgcctctgagcactacaaccagcccaactggctcacagaagtccaagacacggcaaacaaggccctgctggccctgttcacggcagagatgctcctgaagatgtacagcctgggcctgcaggcctacttcgtgtccctcttcaaccgctttgactgcttcgtcgtgtgtggcggcatcctggagaccatcctggtggagaccaagatcatgtccccactgggcatctccgtgctcagatgcgtccggctgctgaggattttcaagatcacgaggtactggaactccttgagcaacctggtggcatccttgctgaactctgtgcgctccatcgcctccctgctccttctcctcttcctcttcatcatcatcttctccctcctggggatgcagctctttggaggaaagttcaactttgatgagatgcagacccggaggagcacattcgataacttcccccagtccctcctcactgtgtttcagatcctgaccggggaggactggaattcggtgatgtatgatgggatcatggcttatggcggcccctcttttccagggatgttagtctgtatttacttcatcatcctcttcatctgtggaaactatatcctactgaatgtgttcttggccattgctgtggacaacctggctgatgctgagagcctcacatctgcccaaaaggaggaggaagaggagaaggagagaaagaagctggccaggactgccagcccagagaagaaacaagagttggtggagaagccggcagtgggggaatccaaggaggagaagattgagctgaaatccatcacggctgacggagagtctccacccgccaccaagatcaacatggatgacctccagcccaatgaaaatgaggataagagcccctaccccaacccagaaactacaggagaagaggatgaggaggagccagagatgcctgtcggccctcgcccacgaccactctctgagcttcaccttaaggaaaaggcagtgcccatgccagaagccagcgcgtttttcatcttcagctctaacaacaggtttcgcctccagtgccaccgcattgtcaatgacacgatcttcaccaacctgatcctcttcttcattctgctcagcagcatttccctggctgctgaggacccggtccagcacacctccttcaggaaccatattctgttttattttgatattgtttttaccaccattttcaccattgaaattgctctgaagatgactgcttatggggctttcttgcacaagggttctttctgccggaactacttcaacatcctggacctgctggtggtcagcgtgtccctcatctcctttggcatccagtccagtgcaatcaatgtcgtgaagatcttgcgagtcctgcgagtactcaggcccctgagggccatcaacagggccaaggggctaaagcatgtggttcagtgtgtgtttgtcgccatccggaccatcgggaacatcgtgattgtcaccaccctgctgcagttcatgtttgcctgcatcggggtccagctcttcaagggaaagctgtacacctgttcagacagttccaagcagacagaggcggaatgcaagggcaactacatcacgtacaaagacggggaggttgaccaccccatcatccaaccccgcagctgggagaacagcaagtttgactttgacaatgttctggcagccatgatggccctcttcaccgtctccaccttcgaagggtggccagagctgctgtaccgctccatcgactcccacacggaagacaagggccccatctacaactaccgtgtggagatctccatcttcttcatcatctacatcatcatcatcgccttcttcatgatgaacatcttcgtgggcttcgtcatcgtcacctttcaggagcagggggagcaggagtacaagaactgtgagctggacaagaaccagcgacagtgcgtggaatacgccctcaaggcccggcccctgcggaggtacatccccaagaaccagcaccagtacaaagtgtggtacgtggtcaactccacctacttcgagtacctgatgttcgtcctcatcctgctcaacaccatctgcctggccatgcagcactacggccagagctgcctgttcaaaatcgccatgaacatcctcaacatgctcttcactggcctcttcaccgtggagatgatcctgaagctcattgccttcaaacccaagcactatttctgtgatgcatggaatacatttgacgccttgattgttgtgggtagcattgttgatatagcaatcaccgaggtaaacccagctgaacatacccaatgctctccctctatggggccctcctgttctcacccccctcttgctgtgctaactgcacctcctgttgccgacgggttccagaacgcagaggaaaactcccgcatctccatcaccttcttccgcctgttccgggtcatgcgtctggtgaagctgctgagccgtggggagggcatccggacgctgctgtggaccttcatcaagtccttccaggccctgccctatgtggccctcctgatcgtgatgctgttcttcatctacgcggtgatcgggatgcaggtgtttgggaaaattgccctgaatgataccacagagatcaaccggaacaacaactttcagaccttcccccaggccgtgctgctcctcttcaggtgtgccaccggggaggcctggcaggacatcatgctggcctgcatgccaggcaagaagtgtgccccagagtccgagcccagcaacagcacggagggtgaaacaccctgtggtagcagctttgctgtcttctacttcatcagcttctacatgctctgtgccttcctgatcatcaacctctttgtagctgtcatcatggacaactttgactacctgacaagggactggtccatccttggtccccaccacctggatgagtttaaaagaatctgggcagagtatgaccctgaagccaagggtcgtatcaaacacctggatgtggtgaccctcctccggcggattcagccgccactaggttttgggaagctgtgccctcaccgcgtggcttgcaaacgcctggtctccatgaacatgcctctgaacagcgacgggacagtcatgttcaatgccaccctgtttgccctggtcaggacggccctgaggatcaaaacagaagagggacccagcccatcagaggcccaccaaggggctgaggatcctttccgccctgcagggaacctagaacaagccaatgaggagctgcgggcgatcatcaagaagatctggaagcggaccagcatgaagctgctggaccaggtggtgccccctgcaggtgatgatgaggtcaccgttggcaagttctacgccacgttcctgatccaggagtacttccggaagttcaagaagcgcaaagagcagggccttgtgggcaagccctcccagaggaacgcgctgtctctgcaggctggcttgcgcacactgcatgacatcgggcctgagatccgacgggccatctctggagatctcaccgctgaggaggagctggacaaggccatgaaggaggctgtgtccgctgcttctgaagatgacatcttcaggagggccggtggcctgttcggcaaccacgtcagctactaccaaagcgacggccggagcgccttcccccagaccttcaccactcagcgcccgctgcacatcaacaaggcgggcagcagccagggcgacactgagtcgccatcccacgagaagctggtggactccaccttcaccccgagcagctactcgtccaccggctccaacgccaacatcaacaacgccaacaacaccgccctgggtcgcctccctcgccccgccggctaccccagcacggtcagcactgtggagggccacgggccccccttgtcccctgccatccgggtgcaggaggtggcgtggaagctcagctccaacaggtgccactcccgggagagccaggcagccatggcgggtcaggaggagacgtctcaggatgagacctatgaagtgaagatgaaccatgacacggaggcctgcagtgagcccagcctgctctccacagagatgctctcctaccaggatgacgaaaatcggcaactgacgctcccagaggaggacaagagggacatccggcaatctccgaagaggggtttcctccgctctgcctcactaggtcgaagggcctccttccacctggaatgtctgaagcgacagaaggaccgagggggagacatctctcagaagacagtcctgcccttgcatctggttcatcatcaggcattggcagtggcaggcctgagccccctcctccagagaagccattcccctgcctcattccctaggccttttgccaccccaccagccacacctggcagccgaggctggcccccacagcccgtccccaccctgcggcttgagggggtcgagtccagtgagaaactcaacagcagcttcccatccatccactgcggctcctgggctgagaccacccccggtggcgggggcagcagcgccgcccggagagtccggcccgtctccctcatggtgcccagccaggctggggccccagggaggcagttccacggcagtgccagcagcctggtggaagcggtcttgatttcagaaggactggggcagtttgctcaagatcccaagttcatcgaggtcaccacccaggagctggccgacgcctgcgacatgaccatagaggagatggagagcgcggccgacaacatcctcagcgggggcgccccacagagccccaatggcgccctcttaccctttgtgaactgcagggacgcggggcaggaccgagccgggggcgaagaggacgcgggctgtgtgcgcgcgcggggtcgaccgagtgaggaggagctccaggacagcagggtctacgtcagcagcctgtagtgggcgctgccagatgcgggcttttttttatttgtttcaatgttcctaatgggttcgtttcagaagtgcctcactgttctcgtgacctggagtt

SEQ ID NO: 46891 - DNA, 6540 bp, Artificial Sequence
  derived and/or modified sequence
atggtgaacgagaacaccagaatgtacatccccgaggagaaccaccagggcagcaactacggcagccccagacccgcccacgccaacatgaacgccaacgccgccgccggcctggcccccgagcacatccccacccccggcgccgccctgagctggcaggccgccatcgacgccgccagacaggccaagctgatgggcagcgccggcaacgccaccatcagcaccgtgagcagcacccagagaaagagacagcagtacggcaagcccaagaagcagggcagcaccaccgccaccagaccccccagagccctgctgtgcctgaccctgaagaaccccatcagaagagcctgcatcagcatcgtggagtggaagcccttcgagatcatcatcctgctgaccatcttcgccaactgcgtggccctggccatctacatccccttccccgaggacgacagcaacgccaccaacagcaacctggagagagtggagtacctgttcctgatcatcttcaccgtggaggccttcctgaaggtgatcgcctacggcctgctgttccaccccaacgcctacctgagaaacggctggaacctgctggacttcatcatcgtggtggtgggcctgttcagcgccatcctggagcaggccaccaaggccgacggcgccaacgccctgggcggcaagggcgccggcttcgacgtgaaggccctgagagccttcagagtgctgagacccctgagactggtgagcggcgtgcccagcctgcaggtggtgctgaacagcatcatcaaggccatggtgcccctgctgcacatcgccctgctggtgctgttcgtgatcatcatctacgccatcatcggcctggagctgttcatgggcaagatgcacaagacctgctacaaccaggagggcatcgccgacgtgcccgccgaggacgaccccagcccctgcgccctggagaccggccacggcagacagtgccagaacggcaccgtgtgcaagcccggctgggacggccccaagcacggcatcaccaacttcgacaacttcgccttcgccatgctgaccgtgttccagtgcatcaccatggagggctggaccgacgtgctgtactgggtgaacgacgccgtgggcagagactggccctggatctacttcgtgaccctgatcatcatcggcagcttcttcgtgctgaacctggtgctgggcgtgctgagcggcgagttcagcaaggagagagagaaggccaaggccagaggcgacttccagaagctgagagagaagcagcagctggaggaggacctgaagggctacctggactggatcacccaggccgaggacatcgaccccgagaacgaggacgagggcatggacgaggagaagcccagaaacatgagcatgcccaccagcgagaccgagagcgtgaacaccgagaacgtggccggcggcgacatcgagggcgagaactgcggcgccagactggcccacagaatcagcaagagcaagttcagcagatactggagaagatggaacagattctgcagaagaaagtgcagagccgccgtgaagagcaacgtgttctactggctggtgatcttcctggtgttcctgaacaccctgaccatcgccagcgagcactacaaccagcccaactggctgaccgaggtgcaggacaccgccaacaaggccctgctggccctgttcaccgccgagatgctgctgaagatgtacagcctgggcctgcaggcctacttcgtgagcctgttcaacagattcgactgcttcgtggtgtgcggcggcatcctggagaccatcctggtggagaccaagatcatgagccccctgggcatcagcgtgctgagatgcgtgagactgctgagaatcttcaagatcaccagatactggaacagcctgagcaacctggtggccagcctgctgaacagcgtgagaagcatcgccagcctgctgctgctgctgttcctgttcatcatcatcttcagcctgctgggcatgcagctgttcggcggcaagttcaacttcgacgagatgcagaccagaagaagcaccttcgacaacttcccccagagcctgctgaccgtgttccagatcctgaccggcgaggactggaacagcgtgatgtacgacggcatcatggcctacggcggccccagcttccccggcatgctggtgtgcatctacttcatcatcctgttcatctgcggcaactacatcctgctgaacgtgttcctggccatcgccgtggacaacctggccgacgccgagagcctgaccagcgcccagaaggaggaggaggaggagaaggagagaaagaagctggccagaaccgccagccccgagaagaagcaggagctggtggagaagcccgccgtgggcgagagcaaggaggagaagatcgagctgaagagcatcaccgccgacggcgagagcccccccgccaccaagatcaacatggacgacctgcagcccaacgagaacgaggacaagagcccctaccccaaccccgagaccaccggcgaggaggacgaggaggagcccgagatgcccgtgggccccagacccagacccctgagcgagctgcacctgaaggagaaggccgtgcccatgcccgaggccagcgccttcttcatcttcagcagcaacaacagattcagactgcagtgccacagaatcgtgaacgacaccatcttcaccaacctgatcctgttcttcatcctgctgagcagcatcagcctggccgccgaggaccccgtgcagcacaccagcttcagaaaccacatcctgttctacttcgacatcgtgttcaccaccatcttcaccatcgagatcgccctgaagatgaccgcctacggcgccttcctgcacaagggcagcttctgcagaaactacttcaacatcctggacctgctggtggtgagcgtgagcctgatcagcttcggcatccagagcagcgccatcaacgtggtgaagatcctgagagtgctgagagtgctgagacccctgagagccatcaacagagccaagggcctgaagcacgtggtgcagtgcgtgttcgtggccatcagaaccatcggcaacatcgtgatcgtgaccaccctgctgcagttcatgttcgcctgcatcggcgtgcagctgttcaagggcaagctgtacacctgcagcgacagcagcaagcagaccgaggccgagtgcaagggcaactacatcacctacaaggacggcgaggtggaccaccccatcatccagcccagaagctgggagaacagcaagttcgacttcgacaacgtgctggccgccatgatggccctgttcaccgtgagcaccttcgagggctggcccgagctgctgtacagaagcatcgacagccacaccgaggacaagggccccatctacaactacagagtggagatcagcatcttcttcatcatctacatcatcatcatcgccttcttcatgatgaacatcttcgtgggcttcgtgatcgtgaccttccaggagcagggcgagcaggagtacaagaactgcgagctggacaagaaccagagacagtgcgtggagtacgccctgaaggccagacccctgagaagatacatccccaagaaccagcaccagtacaaggtgtggtacgtggtgaacagcacctacttcgagtacctgatgttcgtgctgatcctgctgaacaccatctgcctggccatgcagcactacggccagagctgcctgttcaagatcgccatgaacatcctgaacatgctgttcaccggcctgttcaccgtggagatgatcctgaagctgatcgccttcaagcccaagcactacttctgcgacgcctggaacaccttcgacgccctgatcgtggtgggcagcatcgtggacatcgccatcaccgaggtgaaccccgccgagcacacccagtgcagccccagcatgggccccagctgcagccacccccccctggccgtgctgaccgccccccccgtggccgacggcttccagaacgccgaggagaacagcagaatcagcatcaccttcttcagactgttcagagtgatgagactggtgaagctgctgagcagaggcgagggcatcagaaccctgctgtggaccttcatcaagagcttccaggccctgccctacgtggccctgctgatcgtgatgctgttcttcatctacgccgtgatcggcatgcaggtgttcggcaagatcgccctgaacgacaccaccgagatcaacagaaacaacaacttccagaccttcccccaggccgtgctgctgctgttcagatgcgccaccggcgaggcctggcaggacatcatgctggcctgcatgcccggcaagaagtgcgcccccgagagcgagcccagcaacagcaccgagggcgagaccccctgcggcagcagcttcgccgtgttctacttcatcagcttctacatgctgtgcgccttcctgatcatcaacctgttcgtggccgtgatcatggacaacttcgactacctgaccagagactggagcatcctgggcccccaccacctggacgagttcaagagaatctgggccgagtacgaccccgaggccaagggcagaatcaagcacctggacgtggtgaccctgctgagaagaatccagccccccctgggcttcggcaagctgtgcccccacagagtggcctgcaagagactggtgagcatgaacatgcccctgaacagcgacggcaccgtgatgttcaacgccaccctgttcgccctggtgagaaccgccctgagaatcaagaccgaggagggccccagccccagcgaggcccaccagggcgccgaggaccccttcagacccgccggcaacctggagcaggccaacgaggagctgagagccatcatcaagaagatctggaagagaaccagcatgaagctgctggaccaggtggtgccccccgccggcgacgacgaggtgaccgtgggcaagttctacgccaccttcctgatccaggagtacttcagaaagttcaagaagagaaaggagcagggcctggtgggcaagcccagccagagaaacgccctgagcctgcaggccggcctgagaaccctgcacgacatcggccccgagatcagaagagccatcagcggcgacctgaccgccgaggaggagctggacaaggccatgaaggaggccgtgagcgccgccagcgaggacgacatcttcagaagagccggcggcctgttcggcaaccacgtgagctactaccagagcgacggcagaagcgccttcccccagaccttcaccacccagagacccctgcacatcaacaaggccggcagcagccagggcgacaccgagagccccagccacgagaagctggtggacagcaccttcacccccagcagctacagcagcaccggcagcaacgccaacatcaacaacgccaacaacaccgccctgggcagactgcccagacccgccggctaccccagcaccgtgagcaccgtggagggccacggcccccccctgagccccgccatcagagtgcaggaggtggcctggaagctgagcagcaacagatgccacagcagagagagccaggccgccatggccggccaggaggagaccagccaggacgagacctacgaggtgaagatgaaccacgacaccgaggcctgcagcgagcccagcctgctgagcaccgagatgctgagctaccaggacgacgagaacagacagctgaccctgcccgaggaggacaagagagacatcagacagagccccaagagaggcttcctgagaagcgccagcctgggcagaagagccagcttccacctggagtgcctgaagagacagaaggacagaggcggcgacatcagccagaagaccgtgctgcccctgcacctggtgcaccaccaggccctggccgtggccggcctgagccccctgctgcagagaagccacagccccgccagcttccccagacccttcgccaccccccccgccacccccggcagcagaggctggcccccccagcccgtgcccaccctgagactggagggcgtggagagcagcgagaagctgaacagcagcttccccagcatccactgcggcagctgggccgagaccacccccggcggcggcggcagcagcgccgccagaagagtgagacccgtgagcctgatggtgcccagccaggccggcgcccccggcagacagttccacggcagcgccagcagcctggtggaggccgtgctgatcagcgagggcctgggccagttcgcccaggaccccaagttcatcgaggtgaccacccaggagctggccgacgcctgcgacatgaccatcgaggagatggagagcgccgccgacaacatcctgagcggcggcgccccccagagccccaacggcgccctgctgcccttcgtgaactgcagagacgccggccaggacagagccggcggcgaggaggacgccggctgcgtgagagccagaggcagacccagcgaggaggagctgcaggacagcagagtgtacgtgagcagcctgtag

SEQ ID NO: 46892 - protein, 2173 aa, Artificial Sequence
  derived and/or modified sequence
MVNENTRMYIPEENHQGSNYGSPRPAHANMNANAAAGLAPEHIPTPGAALSWQAAIDAARQAKLMGSAGNATISTVSSTQRKRQQYGKPKKQGSTTATRPPRALLCLTLKNPIRRACISIVEWKPFEIIILLTIFANCVALAIYIPFPEDDSNATNSNLERVEYLFLIIFTVEAFLKVIAYGLLFHPNAYLRNGWNLLDFIIVVVGLFSAILEQATKADGANALGGKGAGFDVKALRAFRVLRPLRLVSGVPSLQVVLNSIIKAMVPLLHIALLVLFVIIIYAIIGLELFMGKMHKTCYNQEGIADVPAEDDPSPCALETGHGRQCQNGTVCKPGWDGPKHGITNFDNFAFAMLTVFQCITMEGWTDVLYWVNDAVGRDWPWIYFVTLIIIGSFFVLNLVLGVLSGEFSKEREKAKARGDFQKLREKQQLEEDLKGYLDWITQAEDIDPENEDEGMDEEKPRNMSMPTSETESVNTENVAGGDIEGENCGARLAHRISKSKFSRYWRRWNRFCRRKCRAAVKSNVFYWLVIFLVFLNTLTIASEHYNQPNWLTEVQDTANKALLALFTAEMLLKMYSLGLQAYFVSLFNRFDCFVVCGGILETILVETKIMSPLGISVLRCVRLLRIFKITRYWNSLSNLVASLLNSVRSIASLLLLLFLFIIIFSLLGMQLFGGKFNFDEMQTRRSTFDNFPQSLLTVFQILTGEDWNSVMYDGIMAYGGPSFPGMLVCIYFIILFICGNYILLNVFLAIAVDNLADAESLTSAQKEEEEEKERKKLARTASPEKKQELVEKPAVGESKEEKIELKSITADGESPPATKINMDDLQPNENEDKSPYPNPETTGEEDEEEPEMPVGPRPRPLSELHLKEKAVPMPEASAFFIFSSNNRFRLQCHRIVNDTIFTNLILFFILLSSISLAAEDPVQHTSFRNHILGNADYVFTSIFTLEIILKMTAYGAFLHKGSFCRNYFNILDLLVVSVSLISFGIQSSAINVVKILRVLRVLRPLRAINRAKGLKHVVQCVFVAIRTIGNIVIVTTLLQFMFACIGVQLFKGKLYTCSDSSKQTEAECKGNYITYKDGEVDHPIIQPRSWENSKFDFDNVLAAMMALFTVSTFEGWPELLYRSIDSHTEDKGPIYNYRVEISIFFIIYIIIIAFFMMNIFVGFVIVTFQEQGEQEYKNCELDKNQRQCVEYALKARPLRRYIPKNQHQYKVWYVVNSTYFEYLMFVLILLNTICLAMQHYGQSCLFKIAMNILNMLFTGLFTVEMILKLIAFKPKHYFCDAWNTFDALIVVGSIVDIAITEVNPAEHTQCSPSMNAEENSRISITFFRLFRVMRLVKLLSRGEGIRTLLWTFIKSFQALPYVALLIVMLFFIYAVIGMQVFGKIALNDTTEINRNNNFQTFPQAVLLLFRCATGEAWQDIMLACMPGKKCAPESEPSNSTEGETPCGSSFAVFYFISFYMLCAFLIINLFVAVIMDNFDYLTRDWSILGPHHLDEFKRIWAEYDPEAKGRIKHLDVVTLLRRIQPPLGFGKLCPHRVACKRLVSMNMPLNSDGTVMFNATLFALVRTALRIKTEGNLEQANEELRAIIKKIWKRTSMKLLDQVVPPAGDDEVTVGKFYATFLIQEYFRKFKKRKEQGLVGKPSQRNALSLQAGLRTLHDIGPEIRRAISGDLTAEEELDKAMKEAVSAASEDDIFRRAGGLFGNHVSYYQSDGRSAFPQTFTTQRPLHINKAGSSQGDTESPSHEKLVDSTFTPSSYSSTGSNANINNANNTALGRLPRPAGYPSTVSTVEGHGPPLSPAIRVQEVAWKLSSNRERHVPMCEDLELRRDSGSAGTQAHCLLLRKANPSRCHSRESQAAMAGQEETSQDETYEVKMNHDTEACSEPSLLSTEMLSYQDDENRQLTLPEEDKRDIRQSPKRGFLRSASLGRRASFHLECLKRQKDRGGDISQKTVLPLHLVHHQALAVAGLSPLLQRSHSPASFPRPFATPPATPGSRGWPPQPVPTLRLEGVESSEKLNSSFPSIHCGSWAETTPGGGGSSAARRVRPVSLMVPSQAGAPGRQFHGSASSLVEAVLISEGLGQFAQDPKFIEVTTQELADACDMTIEEMESAADNILSGGAPQSPNGALLPFVNCRDAGQDRAGGEEDAGCVRARGRPSEEELQDSRVYVSSL

SEQ ID NO: 46893 - DNA, 13585 bp, Artificial Sequence
  derived and/or modified sequence
ttattttttcaaatggtgtagccgccggaggtgcggtgctcagttcttggaaggggcccggatgtactgaggatgcgttacagtttcactcgaggaggcagtagtggaaaggagcagtttttggggtttgatgccataatgggaatcaggtaatcgtcggcggggaagaagaaacgctgcagaccacggcttcctcgaatcttgcgcgaaagccgccggcctcggaggagggattaatccagacccgccggggggtgttttcacatttcttcctcttcgtggctgctcctcctattaaaaccatttttggtccatggtcaatgagaatacgaggatgtacattccagaggaaaaccaccaaggttccaactatgggagcccacgccccgcccatgccaacatgaatgccaatgcggcagcggggctggcccctgagcacatccccaccccgggggctgccctgtcgtggcaggcggccatcgacgcagcccggcaggctaagctgatgggcagcgctggcaatgcgaccatctccacagtcagctccacgcagcggaagcggcagcaatatgggaaacccaagaagcagggcagcaccacggccacacgcccgccccgagccctgctctgcctgaccctgaagaaccccatccggagggcctgcatcagcattgtcgaatggaaaccatttgaaataattattttactgactatttttgccaattgtgtggccttagcgatctatattccctttccagaagatgattccaacgccaccaattccaacctggaacgagtggaatatctctttctcataatttttacggtggaagcgtttttaaaagtaatcgcctatggactcctctttcaccccaatgcctacctccgcaacggctggaacctactagattttataattgtggttgtggggctttttagtgcaattttagaacaagcaaccaaagcagatggggcaaacgctctcggagggaaaggggccggatttgatgtgaaggcgctgagggccttccgcgtgctgcgccccctgcggctggtgtccggagtcccaagtctccaggtggtcctgaattccatcatcaaggccatggtccccctgctgcacatcgccctgcttgtgctgtttgtcatcatcatctacgccatcatcggcttggagctcttcatggggaagatgcacaagacctgctacaaccaggagggcatagcagatgttccagcagaagatgacccttccccttgtgcgctggaaacgggccacgggcggcagtgccagaacggcacggtgtgcaagcccggctgggatggtcccaagcacggcatcaccaactttgacaactttgccttcgccatgctcacggtgttccagtgcatcaccatggagggctggacggacgtgctgtactgggtcaatgatgccgtaggaagggactggccctggatctattttgttacactaatcatcatagggtcattttttgtacttaacttggttctcggtgtgcttagcggagagttttccaaagagagggagaaggccaaggcccggggagatttccagaagctgcgggagaagcagcagctagaagaggatctcaaaggctacctggattggatcactcaggccgaagacatcgatcctgagaatgaggacgaaggcatggatgaggagaagccccgaaacatgagcatgcccaccagtgagaccgagtccgtcaacaccgaaaacgtggctggaggtgacatcgagggagaaaactgcggggccaggctggcccaccggatctccaagtcaaagttcagccgctactggcgccggtggaatcggttctgcagaaggaagtgccgcgccgcagtcaagtctaatgtcttctactggctggtgattttcctggtgttcctcaacacgctcaccattgcctctgagcactacaaccagcccaactggctcacagaagtccaagacacggcaaacaaggccctgctggccctgttcacggcagagatgctcctgaagatgtacagcctgggcctgcaggcctacttcgtgtccctcttcaaccgctttgactgcttcgtcgtgtgtggcggcatcctggagaccatcctggtggagaccaagatcatgtccccactgggcatctccgtgctcagatgcgtccggctgctgaggattttcaagatcacgaggtactggaactccttgagcaacctggtggcatccttgctgaactctgtgcgctccatcgcctccctgctccttctcctcttcctcttcatcatcatcttctccctcctggggatgcagctctttggaggaaagttcaactttgatgagatgcagacccggaggagcacattcgataacttcccccagtccctcctcactgtgtttcagatcctgaccggggaggactggaattcggtgatgtatgatgggatcatggcttatggcggcccctcttttccagggatgttagtctgtatttacttcatcatcctcttcatctgtggaaactatatcctactgaatgtgttcttggccattgctgtggacaacctggctgatgctgagagcctcacatctgcccaaaaggaggaggaagaggagaaggagagaaagaagctggccaggactgccagcccagagaagaaacaagagttggtggagaagccggcagtgggggaatccaaggaggagaagattgagctgaaatccatcacggctgacggagagtctccacccgccaccaagatcaacatggatgacctccagcccaatgaaaatgaggataagagcccctaccccaacccagaaactacaggagaagaggatgaggaggagccagagatgcctgtcggccctcgcccacgaccactctctgagcttcaccttaaggaaaaggcagtgcccatgccagaagccagcgcgtttttcatcttcagctctaacaacaggtttcgcctccagtgccaccgcattgtcaatgacacgatcttcaccaacctgatcctcttcttcattctgctcagcagcatttccctggctgctgaggacccggtccagcacacctccttcaggaaccatatcctaggcaatgcagactatgtcttcactagtatctttacattagaaattatccttaagatgactgcttatggggctttcttgcacaagggttctttctgccggaactacttcaacatcctggacctgctggtggtcagcgtgtccctcatctcctttggcatccagtccagtgcaatcaatgtcgtgaagatcttgcgagtcctgcgagtactcaggcccctgagggccatcaacagggccaaggggctaaagcatgtggttcagtgtgtgtttgtcgccatccggaccatcgggaacatcgtgattgtcaccaccctgctgcagttcatgtttgcctgcatcggggtccagctcttcaagggaaagctgtacacctgttcagacagttccaagcagacagaggcggaatgcaagggcaactacatcacgtacaaagacggggaggttgaccaccccatcatccaaccccgcagctgggagaacagcaagtttgactttgacaatgttctggcagccatgatggccctcttcaccgtctccaccttcgaagggtggccagagctgctgtaccgctccatcgactcccacacggaagacaagggccccatctacaactaccgtgtggagatctccatcttcttcatcatctacatcatcatcatcgccttcttcatgatgaacatcttcgtgggcttcgtcatcgtcacctttcaggagcagggggagcaggagtacaagaactgtgagctggacaagaaccagcgacagtgcgtggaatacgccctcaaggcccggcccctgcggaggtacatccccaagaaccagcaccagtacaaagtgtggtacgtggtcaactccacctacttcgagtacctgatgttcgtcctcatcctgctcaacaccatctgcctggccatgcagcactacggccagagctgcctgttcaaaatcgccatgaacatcctcaacatgctcttcactggcctcttcaccgtggagatgatcctgaagctcattgccttcaaacccaagcactatttctgtgatgcatggaatacatttgacgccttgattgttgtgggtagcattgttgatatagcaatcaccgaggtaaacccagctgaacatacccaatgctctccctctatgaacgcagaggaaaactcccgcatctccatcaccttcttccgcctgttccgggtcatgcgtctggtgaagctgctgagccgtggggagggcatccggacgctgctgtggaccttcatcaagtccttccaggccctgccctatgtggccctcctgatcgtgatgctgttcttcatctacgcggtgatcgggatgcaggtgtttgggaaaattgccctgaatgataccacagagatcaaccggaacaacaactttcagaccttcccccaggccgtgctgctcctcttcaggtgtgccaccggggaggcctggcaggacatcatgctggcctgcatgccaggcaagaagtgtgccccagagtccgagcccagcaacagcacggagggtgaaacaccctgtggtagcagctttgctgtcttctacttcatcagcttctacatgctctgtgccttcctgatcatcaacctctttgtagctgtcatcatggacaactttgactacctgacaagggactggtccatccttggtccccaccacctggatgagtttaaaagaatctgggcagagtatgaccctgaagccaagggtcgtatcaaacacctggatgtggtgaccctcctccggcggattcagccgccactaggttttgggaagctgtgccctcaccgcgtggcttgcaaacgcctggtctccatgaacatgcctctgaacagcgacgggacagtcatgttcaatgccaccctgtttgccctggtcaggacggccctgaggatcaaaacagaagggaacctagaacaagccaatgaggagctgcgggcgatcatcaagaagatctggaagcggaccagcatgaagctgctggaccaggtggtgccccctgcaggtgatgatgaggtcaccgttggcaagttctacgccacgttcctgatccaggagtacttccggaagttcaagaagcgcaaagagcagggccttgtgggcaagccctcccagaggaacgcgctgtctctgcaggctggcttgcgcacactgcatgacatcgggcctgagatccgacgggccatctctggagatctcaccgctgaggaggagctggacaaggccatgaaggaggctgtgtccgctgcttctgaagatgacatcttcaggagggccggtggcctgttcggcaaccacgtcagctactaccaaagcgacggccggagcgccttcccccagaccttcaccactcagcgcccgctgcacatcaacaaggcgggcagcagccagggcgacactgagtcgccatcccacgagaagctggtggactccaccttcaccccgagcagctactcgtccaccggctccaacgccaacatcaacaacgccaacaacaccgccctgggtcgcctccctcgccccgccggctaccccagcacggtcagcactgtggagggccacgggccccccttgtcccctgccatccgggtgcaggaggtggcgtggaagctcagctccaacagggaaaggcacgttccgatgtgtgaggatctggagctcaggagggattcaggctcagcagggactcaggctcactgccttctgctcaggaaagcaaacccctctaggtgccactcccgggagagccaggcagccatggcgggtcaggaggagacgtctcaggatgagacctatgaagtgaagatgaaccatgacacggaggcctgcagtgagcccagcctgctctccacagagatgctctcctaccaggatgacgaaaatcggcaactgacgctcccagaggaggacaagagggacatccggcaatctccgaagaggggtttcctccgctctgcctcactaggtcgaagggcctccttccacctggaatgtctgaagcgacagaaggaccgagggggagacatctctcagaagacagtcctgcccttgcatctggttcatcatcaggcattggcagtggcaggcctgagccccctcctccagagaagccattcccctgcctcattccctaggccttttgccaccccaccagccacacctggcagccgaggctggcccccacagcccgtccccaccctgcggcttgagggggtcgagtccagtgagaaactcaacagcagcttcccatccatccactgcggctcctgggctgagaccacccccggtggcgggggcagcagcgccgcccggagagtccggcccgtctccctcatggtgcccagccaggctggggccccagggaggcagttccacggcagtgccagcagcctggtggaagcggtcttgatttcagaaggactggggcagtttgctcaagatcccaagttcatcgaggtcaccacccaggagctggccgacgcctgcgacatgaccatagaggagatggagagcgcggccgacaacatcctcagcgggggcgccccacagagccccaatggcgccctcttaccctttgtgaactgcagggacgcggggcaggaccgagccgggggcgaagaggacgcgggctgtgtgcgcgcgcggggtcgaccgagtgaggaggagctccaggacagcagggtctacgtcagcagcctgtagtgggcgctgccagatgcgggcttttttttatttgtttcaatgttcctaatgggttcgtttcagaagtgcctcactgttctcgtgacctggagttaaccggaacagcgtcttcattcatttctgttgggaccagacgcggagcctgggtgcgcgagccgccctccgggaggaaggcgcccggctgcgtctgcagaggcggggagaggaggcggcgagggtcccggggcgcgaggaaggcgcctgccctctcccagctcgcaggccccgggcccggccgcgcctccgcggggagagcaccccggcttcccgcgcgccctcaccaaaaggaccctacagcaaacgggtgtctttcgactctgcttgtagaaaccatttgcacatattctgtacgagcctcgctgtctccctagagccagggccctgcggatttggagaagggagcggggcaggacttccaggaggaccccaacccggcccggagagggaggaggaggcctccaggggcgcggagctctggggatgggcgtcgggccggcagtggtgcggctcactccgtccctgcccacctgcgacgggatcccccgaccggcacgggccacgccgagctcccggccagccgccggcccgcaggcagcgcgagggaggagctgcgccgccggctccgcccaaccaggtggtgctgagcttccgctgagcgctcttttgttttgtggtttgacacttttcttgacagcatgttgcagtttcttttcggttttggttttttttaaatgttttattttgctttcccagcgggaggggaggaagaagagtgtttacaaagtcctgtagccccctcacctttctgttttcacttttgccaatgtacatcgggtttggttttcttgtattatttaaacggttgtggtttcctttttccacggaggttcaatagaagccgctgcaggagagttttaccaaccattgtgtatgcccaataatttgttatcatttccttaggtagtaacctatttttgttctggtttggttcggttatctaatggaaaggtaactggcaatgcacttgatgtggtcttgcacatgtgggtgatagagttgggttcctttttatgctgggtgtacaggtgggtttgggagagaggagcatgcgcgagagagtctccgagtgtgtgcgacgcgtgtgtgtgtggtgggttgtctgtgtgcatatgtcctgcccgtgtatatgcacccacaccatgtgcccgtgcacaccagtgactacgcagtcccccctttctggtttagctgtgggaagatctgaatctggggccgtttgaaagcaaaaacaaaccactgtctctgcttctgaaacgggaatcagtaactctttgcattttctgtcccacaagatatgcaaaaacaatgcaataatattcatttaaaaatacaattgtgagttgtgttggcattaaaactgtattttaaaaaaagacagaaatttaagggaaaaacacaagaaggcattttgcttcaatatattccgtgtaatgttttattgcattgataatgtttctgttgaagaaaccgttatacttgaattcaggtcagtttcagtatttttcaaatatttttttaaaactgaattgcaattgtgccaagcgaatataatgaattgaattaagttggttttcggattcacttcttgtatattttgctgcatgtaaagtaaatcattttgtatttggagtgtgacaagctttacctttgaactcaagtgcttttctatatgtggttgggggaaagggaacaagttttctttagtttgcacaatgagcaaaggtatcaccagtgtagtcattattctgctctccacaaacaggtttggacattactgttttgcatatcttgtgtttgcttacatttccctcaatttttccaaaatcgtttgctgggtatgtttgtaccgcctcttgctgtgagagaccaggacctattttattccagtcttcactctgtccactctgctctggtcatctgatttggtacttctccaagaacagcccttcactgtgaggtgcagggaggcgttctgatgagccctcagtcactgggccgtcatccgcatcccccatggaagaggtagctggctttcccttcccttccaccacacggaattttctctttggcttccttaggaaagtgtacactaaccgggaggataaaattaaagtcaggctgcttggagggaggggcatcctcacttccggattcttgttgctctacccaacaaggacagcaggggctcgagaaaggaactggtgaaaccctgatccatctgaaagtcaactctgcgtgctcctttctccatcccttcctcactctggagcagcctttccttcaggcttgccctaatgtttgggctgccggggagggggccaggacaagggaagaggcatccggagctcacagtgggggtgggaacagatttttgtgggggcatctctaatgctcacttatatctccctagaacatcactcttttggtgctgtgtccttcaaatgtatgtcaacagtggtggctgaaaagggactgctttggggaaaacaggacccaaccattcacccagaattgacccattaaatctcttccagtcctagtgttccctgagcccctcttggcacatatataagtaagctagaaattacaataagggacagtccattcctctatgacagcttgctggactgattcatgacaaagtggagaaatgtactcaatactccccggttaacacagtctagaaacagagtttctttatggatatccacacccaagtcatccaaactttcttgattccttttcactgccatcaaggtcctctagaaattgagtttaggtatcatcctttgaaaagttcccaagatttctaccaggaggtacacacaggcgttccctgtctagggcaggaggactatcctagcttgaccttctgatccactagaataagactggcgtatgatgcctgtcatcagaacagactggcacaagtagtgacatcaatgaaccacagcacaatcttccaagtgatgtctactctccacctaaaatggaattttccccatgaccttgtaaaacataattgtcacatcttccatacccctcctgacagcccccaagtgtcaggagaaaacagtcaggggctaagggcccaagggacttgaagaaacaacagtttaaggtctgcagtttggtcaacttaattcttgtcctccgaccagccctgcctctttcatttccagaccttggagaatttttcccagctttgattcagaaggtactagttataacccctttccttcttcttaatccaataggcctcactctcactgggaaatccactcaaaggaacaaggcaatgtctctcattctatttcccagttccaaattccaggtgcttgtctggagtgaagctacccgttactttctcccagcttttctccacccagcatgtctcctgcccatgcagctgaagacagtggggcaacctcaggagaagcagacctttccatgcccaagttcatctcctgagcaacagtgacacctagaaaatgaggactttggaagtcacccaaaagatggtggctactttatggagtcctgaagatacacagccaccactcctaaaggcaaagaaagaaaacacgaatgtaggtcagggatagagtggaaccctggtcatcggggtttttagcctcatcgtgggaaaggtggtaaaggaggatgatggcatctccatccctagaggccaagaattgaaatatcattgtcaaggattagaaacaattcagcaaagaggccacaaaaagggcctgctgactcccagaagacctctttaaaccccaggggaggcaaatacttgctgatggagtctgggccgtttccatattttaaagaagacctgcctctggggcaaatgtcagcacagagaggactgggaggagaatggaggcaagaaaagggcatattttgactccctctgtgcctcttcccagttcatggaaggatgtgttcagcttacccacccacagtgaccagtgtggtggagccgctgacatctcaaggatctatttgggaaggtgagaagagtactcattccatctgggggtgttgttccagccacatcagcctacctggtgggatgtgggggtgtctgccaccctgtcccccctctgctgatgtccctcccctcaggctgtccaggtgccacctgacacaggctgctgtgcaaagacaggcggggaagcccaaacctcactcccagggaggccctcagccgccagagtccaggttctccagaggctacgatttgaggaggttgagggggaagacaggagggaaagaaaagtcctacaactgtcaggaatggggcacctttccctgtccctaagcaaagctccctcttcccactgccctccccagccccagctccctgtcctccccaacacctagtgagaaagacggtgcgtggaagggagtcccatgggcagatgcttacacgacctctttgtgaagcctcttctgggtttaacttcattcatcaatttattcttatgtcaaagcaatgaaacttttctttctggagccagataccaatacaacaggtgaacgggtttctgccacatctctacattgacgggggatgcttgaacaacccccctcactacacagacacacaccgttaaggcacaagggctggggttgagctctagatgagggactttcctgctcctgcaagggtgagcactgtatacacagacaaggagggtgcagtagagtgactcccttggatggaagtagtaccatcagaacctactattattatgacataaattctatttacatacattgagagaatactacaatcaacactttttcctgggatgactttaagaggtttgagccacagcacctgaagtggcaaagatccatggtctttgtagggtattagagaactcttccagtcacctctgaaagcactctagatcttgcagctgagtggatgaagtgtaacaaatctgttgcacgctgagaggagtcagaattagcatttttcatgaaagttccccacgtctctactaagaatgaggaagaaaagactaagactaggtaattacacagaggcttgaaatgttacatcaccagagccaagtcctctcccttcagatcagttactggctgctacacagggacacccccaccttttcagggcatcccatgcactccacttctcaggatctaaggaatttgactttgtagggatcccagaaagggcactgtgccacttcccctggtgtgaatcagacatacattgtacattcatttctaaaattcactcatgcacctcaaaccaaggtcattatccaaaaaaaaaaaaaaaaagctctgggtggaagagtttgtaagttttaagagagggtcatttctatgtgaggaaatgcagaaatggacagaatgattcttattcactgtttgggtctggagaattcccattgtggaaatcttagagatctcaagtttattaccaagggaataaggaaaaaaaggtgagcaggcaccaggccaagcagtggctcccttgccaaggaacctgaggctgcaggtttcagggacccccttgaagaaacctctcctggccattggccaggagaaaagagaagtctctcctgtagagtcacaagagaagcaaaagagggtgggtcactgggtcctggacatagcccccaaccccaagacttcccaatatggagaaactacaccaatgtttaaaaggggaaaaggaaagaacttgtacatcaagggaagatgatttgtaaacacacagtcctgtgcagaaagatccccttcaggaggtgtctccagcatcccaaagctgtgcgcaccttctcttttcctgcctcaggccacctatgcatccagctgcagcccatacccacacctgaaatccatctcttgaatcccagccaggttatataccaccccattgccatgtcctgtcctggccagaatgcatgctgttcccccaagcctcgtgggagtgaggccatgggaaacagagatgagcatgtctggacaagtctgtgatggtagtggatgagaataacccatggcaaaacacgcacattcattaagaaatagggcgacagattccccgttggtgaagcactgaaaggtctattactctcataatattgctgttttattttaatccaccagagctaccatgcaaaactttcctcctgtgaaacgctccagataaagctcctctaatctccccttccctcatgtcctccagctcaaacccaccttcatcccccaaaccaatctgtatcatgcctgttatcagagaggcacagaaagatgggcagtgcctccgttgtcaccattccccacacccctacacacccccacaccctcccctccaggctccacgacttcacagtcttactgttgtaaatatcattgtacagtttgtaatcctcaaataatcccattgtcagaggcctcgcctgatgggccttctcaccctcgagaaaggccagggaatctagaaggggcaacccttcaaggagagcttcagggtcatctctgtgtgagacactattgtatattcctgtaagattgcatttttatctaaggaatgatgttatttaaaaaacaaacaaaaaacacaaaaaataagaattgcaaataaatttcttaacaatgtct

SEQ ID NO: 46894 - DNA, 6522 bp, Artificial Sequence
  derived and/or modified sequence
atggtgaacgagaacaccagaatgtacatccccgaggagaaccaccagggcagcaactacggcagccccagacccgcccacgccaacatgaacgccaacgccgccgccggcctggcccccgagcacatccccacccccggcgccgccctgagctggcaggccgccatcgacgccgccagacaggccaagctgatgggcagcgccggcaacgccaccatcagcaccgtgagcagcacccagagaaagagacagcagtacggcaagcccaagaagcagggcagcaccaccgccaccagaccccccagagccctgctgtgcctgaccctgaagaaccccatcagaagagcctgcatcagcatcgtggagtggaagcccttcgagatcatcatcctgctgaccatcttcgccaactgcgtggccctggccatctacatccccttccccgaggacgacagcaacgccaccaacagcaacctggagagagtggagtacctgttcctgatcatcttcaccgtggaggccttcctgaaggtgatcgcctacggcctgctgttccaccccaacgcctacctgagaaacggctggaacctgctggacttcatcatcgtggtggtgggcctgttcagcgccatcctggagcaggccaccaaggccgacggcgccaacgccctgggcggcaagggcgccggcttcgacgtgaaggccctgagagccttcagagtgctgagacccctgagactggtgagcggcgtgcccagcctgcaggtggtgctgaacagcatcatcaaggccatggtgcccctgctgcacatcgccctgctggtgctgttcgtgatcatcatctacgccatcatcggcctggagctgttcatgggcaagatgcacaagacctgctacaaccaggagggcatcgccgacgtgcccgccgaggacgaccccagcccctgcgccctggagaccggccacggcagacagtgccagaacggcaccgtgtgcaagcccggctgggacggccccaagcacggcatcaccaacttcgacaacttcgccttcgccatgctgaccgtgttccagtgcatcaccatggagggctggaccgacgtgctgtactgggtgaacgacgccgtgggcagagactggccctggatctacttcgtgaccctgatcatcatcggcagcttcttcgtgctgaacctggtgctgggcgtgctgagcggcgagttcagcaaggagagagagaaggccaaggccagaggcgacttccagaagctgagagagaagcagcagctggaggaggacctgaagggctacctggactggatcacccaggccgaggacatcgaccccgagaacgaggacgagggcatggacgaggagaagcccagaaacatgagcatgcccaccagcgagaccgagagcgtgaacaccgagaacgtggccggcggcgacatcgagggcgagaactgcggcgccagactggcccacagaatcagcaagagcaagttcagcagatactggagaagatggaacagattctgcagaagaaagtgcagagccgccgtgaagagcaacgtgttctactggctggtgatcttcctggtgttcctgaacaccctgaccatcgccagcgagcactacaaccagcccaactggctgaccgaggtgcaggacaccgccaacaaggccctgctggccctgttcaccgccgagatgctgctgaagatgtacagcctgggcctgcaggcctacttcgtgagcctgttcaacagattcgactgcttcgtggtgtgcggcggcatcctggagaccatcctggtggagaccaagatcatgagccccctgggcatcagcgtgctgagatgcgtgagactgctgagaatcttcaagatcaccagatactggaacagcctgagcaacctggtggccagcctgctgaacagcgtgagaagcatcgccagcctgctgctgctgctgttcctgttcatcatcatcttcagcctgctgggcatgcagctgttcggcggcaagttcaacttcgacgagatgcagaccagaagaagcaccttcgacaacttcccccagagcctgctgaccgtgttccagatcctgaccggcgaggactggaacagcgtgatgtacgacggcatcatggcctacggcggccccagcttccccggcatgctggtgtgcatctacttcatcatcctgttcatctgcggcaactacatcctgctgaacgtgttcctggccatcgccgtggacaacctggccgacgccgagagcctgaccagcgcccagaaggaggaggaggaggagaaggagagaaagaagctggccagaaccgccagccccgagaagaagcaggagctggtggagaagcccgccgtgggcgagagcaaggaggagaagatcgagctgaagagcatcaccgccgacggcgagagcccccccgccaccaagatcaacatggacgacctgcagcccaacgagaacgaggacaagagcccctaccccaaccccgagaccaccggcgaggaggacgaggaggagcccgagatgcccgtgggccccagacccagacccctgagcgagctgcacctgaaggagaaggccgtgcccatgcccgaggccagcgccttcttcatcttcagcagcaacaacagattcagactgcagtgccacagaatcgtgaacgacaccatcttcaccaacctgatcctgttcttcatcctgctgagcagcatcagcctggccgccgaggaccccgtgcagcacaccagcttcagaaaccacatcctgggcaacgccgactacgtgttcaccagcatcttcaccctggagatcatcctgaagatgaccgcctacggcgccttcctgcacaagggcagcttctgcagaaactacttcaacatcctggacctgctggtggtgagcgtgagcctgatcagcttcggcatccagagcagcgccatcaacgtggtgaagatcctgagagtgctgagagtgctgagacccctgagagccatcaacagagccaagggcctgaagcacgtggtgcagtgcgtgttcgtggccatcagaaccatcggcaacatcgtgatcgtgaccaccctgctgcagttcatgttcgcctgcatcggcgtgcagctgttcaagggcaagctgtacacctgcagcgacagcagcaagcagaccgaggccgagtgcaagggcaactacatcacctacaaggacggcgaggtggaccaccccatcatccagcccagaagctgggagaacagcaagttcgacttcgacaacgtgctggccgccatgatggccctgttcaccgtgagcaccttcgagggctggcccgagctgctgtacagaagcatcgacagccacaccgaggacaagggccccatctacaactacagagtggagatcagcatcttcttcatcatctacatcatcatcatcgccttcttcatgatgaacatcttcgtgggcttcgtgatcgtgaccttccaggagcagggcgagcaggagtacaagaactgcgagctggacaagaaccagagacagtgcgtggagtacgccctgaaggccagacccctgagaagatacatccccaagaaccagcaccagtacaaggtgtggtacgtggtgaacagcacctacttcgagtacctgatgttcgtgctgatcctgctgaacaccatctgcctggccatgcagcactacggccagagctgcctgttcaagatcgccatgaacatcctgaacatgctgttcaccggcctgttcaccgtggagatgatcctgaagctgatcgccttcaagcccaagcactacttctgcgacgcctggaacaccttcgacgccctgatcgtggtgggcagcatcgtggacatcgccatcaccgaggtgaaccccgccgagcacacccagtgcagccccagcatgaacgccgaggagaacagcagaatcagcatcaccttcttcagactgttcagagtgatgagactggtgaagctgctgagcagaggcgagggcatcagaaccctgctgtggaccttcatcaagagcttccaggccctgccctacgtggccctgctgatcgtgatgctgttcttcatctacgccgtgatcggcatgcaggtgttcggcaagatcgccctgaacgacaccaccgagatcaacagaaacaacaacttccagaccttcccccaggccgtgctgctgctgttcagatgcgccaccggcgaggcctggcaggacatcatgctggcctgcatgcccggcaagaagtgcgcccccgagagcgagcccagcaacagcaccgagggcgagaccccctgcggcagcagcttcgccgtgttctacttcatcagcttctacatgctgtgcgccttcctgatcatcaacctgttcgtggccgtgatcatggacaacttcgactacctgaccagagactggagcatcctgggcccccaccacctggacgagttcaagagaatctgggccgagtacgaccccgaggccaagggcagaatcaagcacctggacgtggtgaccctgctgagaagaatccagccccccctgggcttcggcaagctgtgcccccacagagtggcctgcaagagactggtgagcatgaacatgcccctgaacagcgacggcaccgtgatgttcaacgccaccctgttcgccctggtgagaaccgccctgagaatcaagaccgagggcaacctggagcaggccaacgaggagctgagagccatcatcaagaagatctggaagagaaccagcatgaagctgctggaccaggtggtgccccccgccggcgacgacgaggtgaccgtgggcaagttctacgccaccttcctgatccaggagtacttcagaaagttcaagaagagaaaggagcagggcctggtgggcaagcccagccagagaaacgccctgagcctgcaggccggcctgagaaccctgcacgacatcggccccgagatcagaagagccatcagcggcgacctgaccgccgaggaggagctggacaaggccatgaaggaggccgtgagcgccgccagcgaggacgacatcttcagaagagccggcggcctgttcggcaaccacgtgagctactaccagagcgacggcagaagcgccttcccccagaccttcaccacccagagacccctgcacatcaacaaggccggcagcagccagggcgacaccgagagccccagccacgagaagctggtggacagcaccttcacccccagcagctacagcagcaccggcagcaacgccaacatcaacaacgccaacaacaccgccctgggcagactgcccagacccgccggctaccccagcaccgtgagcaccgtggagggccacggcccccccctgagccccgccatcagagtgcaggaggtggcctggaagctgagcagcaacagagagagacacgtgcccatgtgcgaggacctggagctgagaagagacagcggcagcgccggcacccaggcccactgcctgctgctgagaaaggccaaccccagcagatgccacagcagagagagccaggccgccatggccggccaggaggagaccagccaggacgagacctacgaggtgaagatgaaccacgacaccgaggcctgcagcgagcccagcctgctgagcaccgagatgctgagctaccaggacgacgagaacagacagctgaccctgcccgaggaggacaagagagacatcagacagagccccaagagaggcttcctgagaagcgccagcctgggcagaagagccagcttccacctggagtgcctgaagagacagaaggacagaggcggcgacatcagccagaagaccgtgctgcccctgcacctggtgcaccaccaggccctggccgtggccggcctgagccccctgctgcagagaagccacagccccgccagcttccccagacccttcgccaccccccccgccacccccggcagcagaggctggcccccccagcccgtgcccaccctgagactggagggcgtggagagcagcgagaagctgaacagcagcttccccagcatccactgcggcagctgggccgagaccacccccggcggcggcggcagcagcgccgccagaagagtgagacccgtgagcctgatggtgcccagccaggccggcgcccccggcagacagttccacggcagcgccagcagcctggtggaggccgtgctgatcagcgagggcctgggccagttcgcccaggaccccaagttcatcgaggtgaccacccaggagctggccgacgcctgcgacatgaccatcgaggagatggagagcgccgccgacaacatcctgagcggcggcgccccccagagccccaacggcgccctgctgcccttcgtgaactgcagagacgccggccaggacagagccggcggcgaggaggacgccggctgcgtgagagccagaggcagacccagcgaggaggagctgcaggacagcagagtgtacgtgagcagcctgtag

SEQ ID NO: 46895 - DNA, 6522 bp, Artificial Sequence
  derived and/or modified sequence
atggtcaacgaaaacacccgtatgtacatacctgaggagaaccaccagggcagcaattacgggtctccgagaccagcacacgcaaacatgaacgccaacgcggccgctggtttagcccctgagcacatccctacacccggcgctgctttgtcgtggcaagccgccatcgatgccgctcgccaggccaaactgatgggttccgccggtaacgccactatctctacagtctcgtcgacacagcgtaagcgccagcagtacggcaaacccaagaagcaggggtccaccacagccactcggcctccaagggctctgctatgtttgaccctgaagaacccgatacgccgagcctgtatcagtatagttgagtggaagccatttgaaataattattctgctaaccattttcgctaattgcgtggcacttgccatttacattccattccctgaagacgactctaatgcgaccaattctaacttggagagagtggaatacctgtttctcatcatattcacagtggaggccttcctgaaggtgattgcatatgggctattatttcacccaaacgcttacttgcggaatggctggaatttactggatttcatcattgtcgtggtggggctgttctcagcgatcctcgaacaggcaaccaaggccgacggagctaacgctttgggcgggaaaggagctggattcgatgtgaaggcgttacgagcctttagggtgcttcggccgcttcggctggtgtccggcgtgccttcgctgcaggtcgtcctgaacagcatcatcaaagctatggtccctctgttacatatcgccctcctggtgttattcgtcatcattatttacgcaatcatcggactggaactcttcatgggaaagatgcataagacatgttataaccaggagggcatcgccgacgtgcctgccgaggacgatccctccccatgtgcgctggagactggtcatggaaggcaatgccagaatggtaccgtctgcaaacccggctgggatggccccaaacatggaatcactaatttcgataactttgcgttcgccatgttgaccgtttttcaatgtataacgatggaaggttggaccgacgttttatactgggtaaacgatgctgtaggacgcgattggccttggatatattttgtgacacttatcattatcggctccttcttcgtcctgaaccttgttttaggcgtactgagcggtgagttttccaaggagcgcgaaaaagcgaaggcgcgtggcgatttccagaagcttcgagaaaagcaacaactagaggaggacctaaaggggtatctggactggattacacaagccgaagacatcgatcccgaaaatgaagacgaaggaatggatgaagagaaaccgcgtaacatgtccatgccgacatcagaaaccgagtcggtgaacaccgaaaatgtggctgggggtgacattgagggagagaactgcggtgcacgccttgcacacagaatcagtaaatcaaagttttccagatactggcggagatggaaccgtttctgccgaaggaaatgcagagcagcagtaaagtcaaacgtgttttactggcttgtgatctttcttgtttttttgaacaccctgacaattgcctcagagcattataatcaacccaactggctgacggaagttcaagacaccgcaaataaggcgttgcttgcattgttcacagctgaaatgctgttaaaaatgtatagcctcggactgcaggcatacttcgtgagcctgttcaataggtttgattgtttcgtcgtgtgtggcggtatccttgagacaattctggtggaaacaaagatcatgtcaccactcggcatcagcgtcttgcggtgtgtgcggctgctcaggatctttaagataactagatattggaactctctgagcaatctggttgctagcctcttaaattctgtccggtctatcgctagcttgctgctgctcctcttcctgtttataattattttttcactactaggcatgcagctctttgggggcaagtttaactttgacgaaatgcagacacggagaagtacctttgataactttccccagagcctgctcactgtcttccagatcctcaccggagaagactggaactccgtgatgtatgatggaatcatggcctatggtggaccgtccttccctggaatgctcgtttgtatatatttcatcattcttttcatttgtggcaactacatccttctaaatgtcttcctagcaatcgccgtggacaacttagctgatgctgaatcactcaccagcgcccaaaaagaggaagaagaagagaaagagcgcaagaaactcgccaggacagccagtcctgaaaagaaacaagagctggttgaaaaaccagctgttggtgagagtaaagaggagaagatcgagctaaagagcataacggctgacggggagtccccacccgcgactaaaattaatatggacgacctccagccaaacgagaacgaggacaagtccccgtaccctaatcccgaaacaaccggtgaagaggatgaggaggagcctgagatgcctgtcgggcctagacccagacccttgtccgaactccatcttaaggaaaaagctgttcccatgccggaggcttccgcctttttcatcttcagctctaataatcgcttccgtctgcagtgccatagaatcgttaacgacaccatcttcacaaatctgatactcttttttatactcctgtctagcatctccctggcggcagaggatccagtacagcacacttctttcaggaaccatatcctggggaatgccgactacgtgttcaccagcattttcaccctggagataatactgaaaatgacagcttacggggcttttcttcataaggggagcttctgccgaaattactttaatatcctggatctgctggtggtttccgtgtccttgatttctttcggtatccagtccagcgcaatcaacgtggtaaagatcctccgggtgttgcgcgtgctccggccccttcgggccattaaccgggccaagggactcaagcacgtcgtgcagtgtgtgttcgttgctataaggacaatcggcaatatcgtgatcgtcaccaccctactccaatttatgtttgcttgcatcggagtccagttgttcaagggcaagctctacacttgctccgacagctctaagcagacagaggctgagtgcaagggcaactacattacgtacaaagatggggaagtcgaccatcccatcatccagccccgcagttgggagaacagcaaattcgatttcgataacgtgctggccgccatgatggccctgttcaccgtttctacatttgagggctggccagaactgctgtatagaagcattgacagtcataccgaagataaaggaccgatctacaattaccgcgtcgagatcagtatattcttcatcatttatattatcattattgcttttttcatgatgaatatttttgtgggctttgtgatcgtgacctttcaggagcaaggtgagcaggagtacaaaaactgcgaactcgacaaaaatcaacggcaatgcgtcgagtacgcgctgaaggcacgacccctccgccgatatatcccgaaaaatcagcaccagtataaagtttggtacgttgttaatagcacatatttcgagtaccttatgttcgtgttaatcctactaaatactatatgcctcgctatgcagcactatggccagtcttgtctcttcaaaatcgcaatgaatatattgaatatgctgtttaccggcttatttactgtggaaatgatcctgaaactgatagctttcaaaccaaaacactacttctgcgacgcatggaacactttcgacgccttgatcgttgtgggctctatcgttgacatcgctattacagaggtgaaccctgccgagcacacacagtgctccccttcaatgaatgctgaagagaatagcagaatttccattacgttcttccggctgtttcgtgtgatgaggttggtgaaactactctcacggggagaaggaattaggaccctcctgtggacatttatcaaatctttccaggccttaccatacgtcgcactgcttatcgtcatgctattcttcatctatgctgtaatcggcatgcaggtctttggcaagatagctcttaacgataccactgaaattaatagaaacaataatttccaaaccttcccgcaggcggtccttctgctgtttcggtgcgccacgggcgaggcttggcaggacatcatgttagcctgtatgcccggcaaaaagtgcgccccggagagcgagccatctaactccacagaaggcgaaaccccgtgtggaagttcctttgccgtcttttactttatcagcttttacatgctttgcgcgttcctcattataaacttgttcgtggctgtgatcatggataatttcgattacctcactcgggactggtctattcttggtccacaccatttggacgaatttaagcgtatatgggccgagtacgatccagaggcaaaggggagaattaagcacttggatgttgtcacactgctacggcgcatccagccgcccctcggattcggaaaactttgtccacacagggtggcctgtaagcggctcgtctcaatgaatatgcccctgaattctgacggcacggtcatgtttaatgcgaccctttttgcgcttgtcagaaccgcccttcgtatcaagacagaagggaatctcgagcaggcaaatgaggagctccgggccatcattaaaaagatctggaagcggacatcgatgaagttgctggaccaggttgttcctcccgctggcgacgatgaggtgaccgtcgggaagttttacgcaacctttttgattcaggaatatttcagaaagtttaaaaagcggaaggaacagggcctagttggtaaaccgtcccagcggaatgctctaagcttgcaagcaggtctcaggactctgcacgatatcgggccagagattaggagggccatctccggagacctcacagccgaggaagagcttgacaaggccatgaaggaggctgtgtcagcagctagtgaagacgatattttccggagggcgggcggactgtttggcaatcatgtgagctactatcagagcgatggaaggagtgcctttcctcagacttttaccacccagagacccctccacatcaataaggccgggagttcacagggagatactgaatccccatctcatgagaaactggtagattcgacctttaccccaagtagctattcgtctaccggctcaaacgccaatattaacaacgctaacaacacagctctcgggagattacctcggccagcggggtatccaagtacagtttctacggttgaggggcatggacctccattatcccccgctatccgcgtccaggaggtggcctggaagctgagctctaatcgcgagagacatgtgccaatgtgcgaggacctcgaactcaggagagactcgggctctgccggtactcaggcacactgtctgctgctgcggaaagccaatccgtccagatgccactcacgtgaaagccaggcagccatggccgggcaggaggaaacctctcaggatgagacctacgaggtaaaaatgaatcacgacactgaagcctgctctgaacccagcctattgtctactgagatgctttcttatcaagacgacgagaaccgccagcttactttacctgaggaggacaagagagacattaggcagagtcctaaaaggggatttctccgaagtgcctccctgggtcggcgagcatcttttcatctagaatgcttgaagaggcagaaagacagggggggagatatcagccagaagaccgtcctgcccctccaccttgtgcaccatcaagctctggccgtggccggcctgtccccacttctgcagcgcagccactctcctgctagctttccaagaccattcgcgacgcccccagctaccccagggtctagaggatggcctcctcagcctgtccctaccctacgacttgagggggtagaaagtagcgagaaattaaattccagcttcccaagcattcattgcggctcatgggcagaaaccacacccgggggtggcggatcctccgcggcccggagagttcgtccagtgagcctgatggtgccgtcccaggccggagcacctgggagacagtttcacgggtccgcatcaagcttggtcgaggctgtcctgatttccgaggggttgggacagtttgctcaagatcccaaattcatagaggttacaacacaagagcttgccgatgcctgtgacatgaccatagaggaaatggagtctgccgccgataacattctgagcggcggagcacctcaaagccccaacggcgcactcctgccttttgtcaactgtagggatgccggacaagatagagccggaggggaagaggatgcggggtgtgtgcgtgctcggggcaggcctagcgaggaggagttacaggattcgcgagtttacgtatctagcctttag

SEQ ID NO: 46896 - DNA, 6522 bp, Artificial Sequence
  derived and/or modified sequence
atggtgaatgaaaacaccaggatgtacatccctgaggagaaccaccagggcagcaactacggcagccccaggcctgcccacgccaacatgaatgccaatgctgctgctggcctggcccctgagcacatccccacccctggggccgccctgtcctggcaggccgccattgatgctgcccggcaggccaagctgatgggcagcgctggaaatgccaccatcagcacagtgagcagcacccagaggaagaggcagcagtatggcaagcccaagaagcagggcagcaccacagccacccggcccccccgggccctgctgtgcctgaccctgaagaaccccatccggcgggcctgcatcagcatcgtggagtggaagccctttgagatcatcatcctgctgaccatctttgccaactgtgtggccctggccatctacatccccttcccagaagatgacagcaatgccaccaacagcaacctggagcgggtggagtacctgttcctgatcatcttcaccgtggaggccttcctgaaggtgattgcctacggcctgctcttccaccccaatgcctacctgagaaatggctggaacctgctggacttcatcatcgtggtggtgggcctcttcagcgccatcctggagcaggccaccaaggcagatggagccaatgccctgggcggcaaaggagctggctttgatgtgaaggccctgcgggccttccgggtgctgcggcccctgcggctggtgtctggagtgcccagcctgcaggtggtgctgaacagcatcatcaaggccatggtgcccctgctgcacatcgccctgctggtgctgtttgtgatcatcatctatgccatcatcggcctggagctgttcatgggcaagatgcacaagacctgctacaaccaggagggcattgctgatgtgcctgcagaagatgaccccagcccctgtgccctggagaccggccacggccggcagtgccagaatggcaccgtgtgcaagccaggctgggatggccccaagcacggcatcaccaactttgacaactttgcctttgccatgctgactgtgttccagtgcatcaccatggagggctggacagatgtgctgtactgggtgaatgatgctgtgggccgggactggccctggatctactttgtgaccctcatcatcatcggcagcttctttgtgctgaacctggtgctgggcgtgctgtctggagagttcagcaaggagcgggagaaggccaaggcccggggggacttccagaagctgcgggagaagcagcagctggaggaggacctgaagggctacctggactggatcacccaggctgaagatattgatcctgaaaatgaagatgagggcatggatgaggagaagcccaggaacatgtccatgcccaccagcgagacagaatctgtgaacacagaaaatgtggccggcggggacatcgagggggagaactgtggggcccggctggcccaccgcatcagcaagagcaagttcagccgctactggaggcgctggaaccgcttctgcaggaggaagtgcagagctgctgtgaagagcaatgtgttctactggctggtgatcttcctggtgttcctgaacaccctgaccatcgccagcgagcactacaaccagcccaactggctgacagaggtgcaggacacagccaacaaggccctgctggccctcttcaccgctgagatgctgctgaagatgtacagcctgggcctgcaggcctactttgtgtccctcttcaacagatttgactgctttgtggtgtgtggcggcatcctggagaccatcctggtggagaccaagatcatgagccccctgggcatctctgtgctgcgctgtgtgcggctgctgcgcatcttcaagatcacccgctactggaacagcctgagcaacctggtggccagcctgctgaacagcgtgcgcagcatcgccagcctgctgctgctgctcttcctgttcatcatcatcttcagcctgctgggcatgcagctgtttggaggcaagttcaactttgatgagatgcagaccaggaggagcacctttgacaacttcccccagagcctgctgaccgtcttccagatcctgaccggggaggactggaacagcgtgatgtatgatggcatcatggcctatggaggccccagcttccctggcatgctggtgtgcatctacttcatcatcctcttcatctgtggcaactacatcctgctgaatgtgttcctggccatcgctgtggacaacctggctgatgctgagagcctgaccagcgcccagaaggaggaggaggaggagaaggagaggaagaagctggccaggacagccagccctgagaagaagcaggagctggtggagaagccagctgtgggggagagcaaggaggagaagattgagctgaagagcatcacagcagatggagagagccccccagccaccaagatcaacatggatgacctgcagcccaatgaaaatgaagacaagagcccctaccccaaccctgagaccactggagaggaggatgaggaggagcctgagatgcctgtgggcccccggccccggcccctgtctgagctgcacctgaaggagaaggctgtgcccatgcctgaggccagcgccttcttcatcttcagcagcaacaaccgcttccggctgcagtgccaccgcatcgtgaatgacaccatcttcaccaacctgatcctcttcttcatcctgctgagcagcatcagcctggccgctgaggaccctgtgcagcacaccagcttcaggaaccacatcctgggcaatgctgactatgtgttcaccagcatcttcaccctggagatcatcctgaagatgacagcctatggagccttcctgcacaagggcagcttctgcaggaactacttcaacatcctggacctgctggtggtgtctgtgtccctcatcagctttggcatccagagcagcgccatcaacgtggtgaagatcctgcgggtgctgcgggtgctgcggcccctgcgggccatcaacagagccaagggcctgaagcacgtggtgcagtgtgtgtttgtggccatccgcaccatcggcaacatcgtcatcgtgaccaccctgctgcagttcatgtttgcctgcatcggcgtgcagctgttcaagggcaagctgtacacctgcagcgacagcagcaagcagacagaagctgagtgcaagggcaactacatcacctacaaggatggagaggtggaccaccccatcatccagcccaggtcctgggagaacagcaagtttgattttgacaacgtgctggccgccatgatggccctcttcaccgtgtccacctttgagggctggccagagctgctgtaccgcagcattgacagccacacagaggacaagggccccatctacaactacagagtggagatcagcatcttcttcatcatctacatcatcatcatcgccttcttcatgatgaacatctttgtgggcttcgtcatcgtgaccttccaggagcagggcgagcaggagtacaagaactgtgagctggacaagaaccagaggcagtgtgtggagtatgccctgaaggcccggcccctgcggcgctacatccccaagaaccagcaccagtacaaggtgtggtacgtggtgaacagcacctactttgagtacctgatgtttgtgctgatcctgctgaacaccatctgcctggccatgcagcactacggccagagctgcctcttcaagatcgccatgaacatcctgaacatgctgttcaccggcctcttcaccgtggagatgatcctgaagctgattgccttcaagcccaagcactacttctgtgatgcctggaacacctttgatgccctgattgtggtgggcagcatcgtggacatcgccatcacagaggtgaacccagctgagcacacccagtgcagccccagcatgaatgctgaggagaacagccgcatcagcatcaccttcttccgcctcttccgggtgatgaggctggtgaagctgctgagcagaggagagggcatccgcaccctgctgtggaccttcatcaagagcttccaggccctgccctacgtggccctgctgattgtgatgctgttcttcatctatgctgtgattggcatgcaggtgtttgggaagatcgccctgaatgacaccacagagatcaacagaaacaacaacttccagaccttcccccaggccgtgctgctgctcttccgctgtgccaccggggaggcctggcaggacatcatgctggcctgcatgcctgggaagaagtgtgcccctgagagcgagcccagcaacagcacagaaggagagaccccctgtggcagcagctttgctgtgttctacttcatctccttctacatgctgtgtgccttcctgatcatcaacctgtttgtggccgtcatcatggacaactttgactacctgacccgggactggagcatcctgggcccccaccacctggatgagttcaagaggatctgggccgagtatgaccctgaggccaagggccgcatcaagcacctggatgtggtgaccctgctgcggcgcatccagccccccctgggctttgggaagctgtgcccccaccgggtggcctgcaagaggctggtgtccatgaacatgcccctgaacagtgatggcaccgtgatgtttaatgccaccctgtttgccctggtgaggacagccctgcgcatcaagacagagggcaacctggagcaggccaatgaggagctgcgggccatcatcaagaagatctggaagaggacctccatgaagctgctggaccaggtggtgcccccagctggagatgatgaggtgacagtgggcaagttctacgccaccttcctgatccaggagtacttcaggaagttcaagaagaggaaggagcagggcctggtgggcaagcccagccagagaaatgccctgagcctgcaggccggcctgcggaccctgcatgacatcggccctgagatccggcgggccatcagcggggacctgacagctgaggaggagctggacaaggccatgaaggaggccgtgtctgctgcctctgaagatgacatcttcagaagagctgggggcctgtttggaaaccacgtgtcctactaccagagtgatggccgcagcgccttcccccagaccttcaccacccagaggcccctgcacatcaacaaggccggcagcagccagggcgacacagagagccccagccatgagaagctggtggacagcaccttcacccccagcagctacagcagcacaggcagcaatgccaacatcaacaatgccaacaacacagccctgggccgcctgcccaggcctgctggctaccccagcacagtgtccacagtggagggccacggcccccccctgagccctgccatccgggtgcaggaggtggcctggaagctgagcagcaaccgggagcggcacgtgcccatgtgtgaggacctggagctgcggcgggacagcggcagcgctggcacccaggcccactgcctgctgctgaggaaggccaaccccagccgctgccacagccgggagagccaggccgccatggccggccaggaggagaccagccaggatgagacctatgaggtgaagatgaaccacgacacagaggcctgcagcgagcccagcctgctgagcacagagatgctgagctaccaggatgatgagaaccggcagctgaccctgcctgaggaggacaagagggacatccggcagagccccaagaggggcttcctgcggagcgccagcctgggccggcgggccagcttccacctggagtgcctgaagaggcagaaggaccggggcggggacatcagccagaagacagtgctgcccctgcacctggtgcaccaccaggccctggccgtggccggcctgagccccctgctgcagaggagccacagccctgccagcttcccccggccctttgccaccccaccagccaccccaggcagccggggctggccaccccagcctgtgcccaccctgcggctggagggcgtggagagcagcgagaagctgaacagcagcttccccagcatccactgcggctcctgggccgagaccaccccaggcggcggcggcagcagcgctgcccggcgggtgcggcctgtgtccctgatggtgcccagccaggccggggcccctggccggcagttccacggcagcgccagcagcctggtggaggccgtgctgatcagcgagggcctgggccagtttgcccaggaccccaagttcatcgaggtgaccacccaggagctggctgatgcctgtgacatgaccatcgaggagatggagagcgctgctgacaacatcctgagcggcggggccccccagagccccaacggggccctgctgccctttgtgaactgcagagatgctggccaggacagagctggaggagaagaagatgctggctgtgtgcgggcccggggccggcccagcgaggaggagctgcaggacagccgggtgtatgtgagcagcctgtag

SEQ ID NO: 46897 - DNA, 6522 bp, Artificial Sequence
  derived and/or modified sequence
atggtgaacgagaacacccggatgtacatccccgaggagaaccaccagggcagcaactacgggagcccgcggccggcccacgctaatatgaatgcaaatgcagcagctggtctggcaccggagcatatcccaacccccggcgctgcccttagctggcaggccgccattgatgcagcccggcaagcaaagctgatgggatccgccggcaacgccacaatttccacggtgtcctctacccagagaaagaggcagcagtatggcaaaccgaagaaacagggttctacaaccgctacacgaccacctagagctctcctctgcctgacactgaaaaatcctattagacgagcatgtataagtatcgtagagtggaaaccttttgagattatcatactgctgactatttttgcaaattgtgtggcgttggcaatctacatccctttccccgaggacgattccaatgccaccaacagtaacctcgaaagagtggagtaccttttcctgatcatttttacagtcgaggccttcttaaaggttattgcctatgggctgctgttccaccctaatgcctatctgcgaaatggatggaatctgctggactttatcattgtcgtggtaggcttattctcagccattctagaacaggccaccaaggctgacggcgccaatgcactcggcggaaaaggagcaggattcgatgtcaaggccttgcgcgccttccgcgtgttgaggcccctgcgcctagtttcaggagttcccagtcttcaggtggtgctgaactccatcataaaggccatggtgccgctgctgcatatcgcactcttagtgctgttcgtgatcattatttacgccatcatcggcctggagctcttcatggggaagatgcataagacttgttacaaccaggaaggaattgccgatgtcccagcagaagacgatccctctccatgcgcgctcgagacaggccatgggcgacaatgccagaatggaaccgtctgcaaaccaggttgggacggtcctaaacacggaataactaatttcgataactttgccttcgccatgctgactgtttttcagtgtataacaatggaggggtggacagacgtgctttattgggtcaatgatgccgtaggaagggactggccatggatctatttcgttacacttattatcattggttcatttttcgtgttaaacctggtgctgggtgtgctcagcggcgaatttagtaaggagcgcgaaaaggcaaaggctaggggcgactttcagaaactgcgcgagaagcagcaattggaagaggacctgaagggctacctggactggataacacaggcagaagacattgaccccgagaacgaagacgaggggatggatgaagagaaacctcgcaacatgtccatgcccacgtctgagaccgaatctgttaataccgagaacgtcgcaggtggcgatatcgaaggcgagaattgtggtgcgcgactggcccaccgcattagcaaaagcaagtttagtaggtattggaggcggtggaaccgattttgtcgccgcaaatgtcgagcagcagttaagagcaatgtgttttactggcttgtcatcttcctggtgttcctcaacaccttgacgattgcctccgagcactataaccagccgaactggcttaccgaggtgcaggataccgccaacaaggctctgttggccctgtttacggccgagatgcttctgaagatgtacagtctgggactccaggcctacttcgtctccctgtttaaccgcttcgactgctttgtggtgtgtggaggcatcctggagaccatccttgtggaaactaaaatcatgagcccactgggaatttctgtgctgcggtgcgtgcgtctcctgagaatattcaaaataacgcgctattggaattccctcagtaacctggttgccagcctcctgaacagtgtgagatctatcgcctcactgctcttgctcctgttcttgtttatcatcatatttagtttgctgggaatgcaactgttcggcggtaagtttaatttcgacgagatgcagacaaggaggtccacctttgataactttccccagagcctgctgactgttttccagatacttactggggaggactggaactctgtgatgtacgatggcatcatggcttacggcgggccatcatttcccggcatgctggtctgcatttacttcattattttgttcatctgcggcaattacatcttgctcaatgtcttccttgccattgccgtagataatctggctgacgccgaaagcctgacctccgcccagaaggaggaggaagaagagaaggagcggaagaagctggcccgaaccgcatctccggagaaaaagcaggagcttgttgagaagccagcggttggagaaagcaaggaagagaaaatcgagcttaaaagcatcaccgcagacggcgaatcccctccggcaaccaagatcaatatggacgatttacagcctaatgagaatgaggacaagagcccctatccgaacccagagacaactggtgaggaggatgaagaagagcctgaaatgccagtcggccctcgccccaggccattatccgagctgcaccttaaagaaaaagccgtcccaatgccggaggcatctgctttctttatttttagttcaaacaatagatttcgacttcagtgccacagaattgtgaacgacactatcttcactaacctgatcctgttttttatcttgcttagtagcattagtttggctgccgaggacccagtacagcacactagctttagaaaccacatcctcggcaatgcggactacgtcttcacttctattttcactttagaaattattttaaagatgacagcctacggagcgtttctgcacaagggatccttctgcaggaattacttcaatattctggacctattggtggtgtctgtatcactaatcagctttggcatccagtcgtcagccatcaatgtggtcaaaatcctccgtgtgctccgggtccttcggcctcttcgggctattaatcgcgcaaagggcttgaagcacgtggttcagtgcgtgttcgttgcaatcagaactattgggaatatagtgattgtgacgaccttactgcagtttatgttcgcctgtatcggtgtgcagttatttaaagggaagctctacacctgttccgatagttctaaacagaccgaagctgaatgcaaaggaaattatattacatacaaagacggcgaggttgaccacccaatcatccagccaagatcttgggagaacagcaaatttgatttcgataacgtgttagctgccatgatggccctgtttacagtttccacttttgaaggatggcccgaactgctctatagatctattgactcccatactgaggacaaaggacctatttataactatagggttgagatatcgatcttctttataatttacatcatcattattgcctttttcatgatgaatatcttcgtgggatttgtaattgtgacgtttcaagaacagggagagcaggaatataagaactgtgaactcgataagaatcagcgccagtgtgtagagtacgcactcaaagcgcggcccctgcggcgatacatacctaaaaaccaacatcagtataaggtgtggtacgtagtgaactcaacatactttgagtatctgatgtttgttctgatcctgctgaacactatatgcttggccatgcagcactatggacagtcctgtctgtttaaaatagcgatgaatatactgaatatgctatttaccggactctttaccgtggagatgattctgaaactcatcgcattcaagcctaaacactacttttgtgacgcttggaacacttttgacgcattgatcgtggtcgggtctatagtcgacatcgcgataactgaggtgaaccccgctgaacatacccagtgtagtccttctatgaatgccgaagagaacagcagaatcagcatcacgttttttaggctctttcgcgtgatgcgcctggtaaagctgcttagccgtggtgaagggatccgtaccctactttggactttcattaagtcattccaggcgctcccttatgtcgccctgttgatcgtgatgttattctttatttatgccgtgatcgggatgcaagtcttcgggaagatcgcactgaacgacacaaccgagatcaatcgcaataacaatttccaaacattccctcaggctgtgttattgctgtttcggtgcgctactggggaggcgtggcaggacataatgttggcttgtatgcctggcaagaaatgtgcccctgagtctgagccaagcaacagtacagaaggtgagaccccttgtgggagttctttcgccgttttttattttatttcattttatatgctgtgcgccttcttgatcatcaaccttttcgttgcagtgatcatggataatttcgattatctgactcgggattggtccattcttggccctcaccatctagacgagttcaaaaggatttgggctgaatacgatcctgaggctaaagggcgtattaaacacctcgatgttgttactttgctgcgccgcatacagcccccactcggatttgggaaactgtgccctcaccgcgtggcgtgcaagaggcttgtgtctatgaatatgccgctcaactctgatggcaccgttatgttcaatgccactctattcgcactggtccggactgccctccgtattaagaccgagggtaatctggagcaggccaatgaagagttgagagctataatcaaaaaaatctggaaacgcacaagcatgaagctcctggatcaggtggttcccccagcaggggatgacgaagtcaccgtagggaagttttatgccacctttctgattcaggagtatttccggaaattcaagaaaaggaaagaacaaggcttagtggggaaaccttcacagcggaatgctctttcccttcaggctgggttgcggacattacatgacattggacccgaaattcgtcgagcaataagcggtgacttgactgctgaggaggaactggacaaggccatgaaagaggcagtctccgccgcatcagaggatgatatcttcaggcgcgctgggggactatttgggaatcatgtgagctattaccagagcgatggtagatcagctttccctcagacttttaccacacagagaccccttcacataaacaaggctgggtccagccagggggatactgagtccccttcccacgagaagctcgttgatagcacatttactccttcgagctactcgagcactgggtccaatgccaacataaacaatgccaataacacagctctgggtaggcttccacgccctgcaggctatccaagcacagtgtcaacggtcgagggacacggacccccactctctcccgctatccgtgtacaggaggtggcctggaagctgtcttccaacagagaacgccacgtccctatgtgtgaagatctggaactgaggcgggattcaggtagcgcaggaacccaagcccactgccttctgttgcgcaaggctaatccctctcggtgccactcccgggagtctcaggccgcaatggcgggccaagaggaaacctcacaggacgagacctacgaggtaaaaatgaaccacgataccgaggcttgctctgaaccgtccctgctctcaactgaaatgcttagctaccaggacgacgaaaatcgccagcttacattacccgaggaagataagcgcgatatccgccagagtcccaaacgcggattcctcaggtctgcctcactgggacgccgtgcgagttttcacctcgagtgtctcaagaggcagaaggaccgcggaggcgacatctcccagaagactgttctgccactgcatcttgtgcaccaccaagccttggctgtggctggcctcagtccactcttgcagaggtcacactcaccggcctcattccctcgccctttcgcaacacctccagcaacccctggcagtcgtggttggcctccacagcctgtgcctactctacgtctcgagggggtggaatcttccgagaagttaaactcctcatttccatctatccactgcggctcatgggctgaaacgacaccaggggggggtgggtctagcgccgctcgaagggtccgccctgtctctctcatggtccccagtcaagcaggggcacctgggagacagtttcatggaagcgcctcgtccctggtggaggccgtgttgatctctgagggcctcggtcagtttgctcaagatccaaagtttatcgaggtgactacccaggagttggcagatgcctgtgacatgacaattgaggagatggaatctgccgccgacaacatcctcagcggcggagctccacagtcccccaacggcgcgctgttaccctttgtgaactgtagagacgccggccaggatcgcgcgggcggcgaggaagatgcaggctgtgtgcgggccaggggacgaccaagtgaggaggagctgcaggactcccgcgtctatgtctcttccctgtag

SEQ ID NO: 46898 - DNA, 6521 bp, Artificial Sequence
  derived and/or modified sequence
atggttaacgagaatacacgtatgtacatccccgaagaaaaccaccagggttccaattacggaagccctcgccctgcacacgcgaatatgaatgccaatgctgcagctgggctcgcacccgagcacattcccaccccaggagcagccttatcatggcaggctgccattgacgcagctagacaggcgaaactgatggggtcggccggaaacgctaccatttccactgtgtcctctacccagcggaagcgacagcagtatggcaagcccaaaaagcaaggctccacaactgctaccaggccaccacgggcattgttgtgcctgacgttaaagaatccaattcggcgtgcgtgcatctcaatagtggagtggaagccctttgaaatcataatcctcctgactatcttcgccaactgtgtcgcacttgccatatacattcccttccccgaggatgattctaacgccactaattctaaccttgaaagggtagaatatctcttccttattatcttcactgttgaggcctttttaaaggttatcgcgtacggcctcttgtttcaccccaacgcttatctgcgaaacggctggaatctcttggatttcattatcgtggtggttgggctgtttagtgcaatcctggagcaggccaccaaggccgatggcgctaacgcgttgggcggtaagggtgcaggcttcgacgtaaaagcattacgagcctttagggtcctgaggccgctgaggctggtctcaggggtgcctagtctccaggttgtgttgaattcaattatcaaggcgatggttccattgctccacatcgctctactcgttctgtttgtgataatcatttatgctattatcgggctggagctcttcatgggaaagatgcataaaacttgttataaccaggagggtatcgcggacgttcctgccgaagatgatcccagcccttgtgcgctggaaacaggacatgggcgacagtgccagaacggtaccgtttgtaagcccggatgggacggacccaaacatgggattacgaactttgacaacttcgcgtttgccatgctgaccgtgttccaatgcattactatggaaggttggacagatgtactgtactgggtgaatgacgccgttggtcgggactggccttggatctattttgtcaccttaattattattggttcctttttcgtgctgaacttagttctcggggtactctccggcgaattttccaaggagcgagagaaagccaaggcccgaggtgattttcaaaaacttagagagaagcagcaactcgaggaggacctgaagggttacctcgattggatcactcaggctgaggacatagatccggagaatgaggatgaaggcatggatgaagagaaacccagaaatatgtctatgccaactagcgagaccgagtcagtaaacaccgagaacgttgctggcggagacatcgagggtgagaattgtggtgcacgccttgcccatcgtatcagcaagtccaaatttagccgttattggcgcaggtggaaccgcttctgtagaaggaagtgcagggctgctgttaagtccaatgtcttttactggctcgtcatatttctggtgttcttgaacactttaactatcgcttccgaacactacaaccaaccaaactggctaaccgaagtgcaagatacagctaacaaggccttgctcgctctgtttaccgcggagatgctattgaaaatgtattcccttggacttcaggcttattttgtgtctcttttcaatagatttgattgtttcgtcgtgtgtgggggtattctcgaaactatcttagttgaaaccaaaataatgagcccactgggcatctcggtactccggtgtgttcgcctgctgcgcatattcaaaatcactaggtactggaacagcctttcgaaccttgtggcctcactccttaattccgttagatccatagccagcctcctgctcttactctttctgtttatcatcatttttagcctgttgggcatgcagctgtttggagggaaattcaattttgatgaaatgcaaactagaagaagcaccttcgacaattttcctcagtccctgctgacggtttttcagatccttactggcgaggattggaattcggtcatgtatgatggtatcatggcctacggaggtccttcatttcctggaatgctggtttgcatatacttcatcatcctctttatctgtggtaactacatcctcctcaacgtgtttctcgctattgctgtggataaccttgcagatgccgagagccttaccagtgcccaaaaagaggaggaggaggaaaaggaacggaagaagttggccagaaccgcttcccctgagaagaaacaggagttggtagagaaacctgccgtcggggaatctaaagaggaaaaaatcgagctcaagagcataaccgccgatggagagtctcctcctgctaccaagataaatatggacgatctgcagcctaacgagaatgaggacaagtctccatatcccaacccggaaacaactggagaggaggatgaagaagaacctgaaatgcccgtgggaccacggcctcgaccgctaagcgagctccatctcaaggaaaaagccgtccccatgcccgaagcaagcgctttttttattttcagtagcaacaaccgtttccgtttacagtgtcataggatcgtcaatgataccattttcaccaatctcattctgttcttcattttgctctctagcatcagcctggcagccgaggacccagtacagcatacttcttttagaaaccatattctgggaaacgctgattatgtatttacttctatttttaccttagagatcattctcaagatgaccgcctacggagctttccttcataaaggatctttttgccggaattattttaacattctagatttgctggtcgtgtcagtgagcctcattagtttcggcatccagagctcagccattaacgtagtgaaaattctgcgcgtccttcgcgtgctccgtccgctgcgcgctatcaatcgggcaaagggactgaagcacgtcgtacagtgtgtattcgtcgccattcggactataggaaacattgtcatagttacaacactgctacagtttatgttcgcatgcatcggagtacagctgttcaaagggaagctctacacatgctccgactcctcaaaacagacagaggctgagtgcaaggggaattatattacatacaaggacggcgaagtagatcaccccatcattcaacctagaagctgggagaactctaaattcgattttgataatgtgcttgcagccatgatggcactatttaccgtctcgactttcgagggatggcctgagctgctgtacagaagtatcgactcgcacacggaagataaaggacccatttataattaccgagttgaaatatccatcttctttattatatacataattatcatcgctttctttatgatgaacatatttgtcggctttgtaattgtaacattccaagagcaaggggaacaggaatataagaactgcgaacttgacaagaatcagcgacagtgcgtggaatacgcgctgaaagcccgtcccttgcgaaggtacatccccaagaatcagcaccaatacaaagtttggtatgttgtgaatagtacttacttcgaatatctcatgttcgtgctaatcctgctcaacactatatgtctggctatgcagcactatgggcagtcctgcctgttcaagatcgccatgaatatcctgaacatgctgtttacggggttatttacggtcgagatgatcctaaaactgattgcctttaagccaaagcattacttttgtgacgcatggaatactttcgacgcattgatcgtcgtcggcagcatagtggacatagctatcaccgaagtaaacccggctgagcatacccagtgctctcctagtatgaacgctgaagagaattccaggattagtattaccttcttcagactttttagggtgatgagactggtgaaattactgagtcgtggggaaggtatccgtacactcctgtggaccttcattaagtctttccaagcacttccatacgttgctcttctgatcgtgatgctcttcttcatttatgccgtaataggcatgcaagtgttcggcaagattgctctgaacgacacaactgagattaacaggaacaacaactttcaaacatttccacaagccgtactcctcctgtttcgctgcgcaactggcgaggcatggcaggacatcatgctggcctgtatgcccggaaagaagtgtgctcccgagtccgaaccgtccaattctaccgagggggagaccccctgtggctcctcattcgcggtgttctatttcatatcattctatatgttgtgcgcatttctcatcatcaatctctttgtggccgtcattatggataatttcgattatctgacccgggactggagcatcctcggcccacaccatctagatgaattcaaacgaatttgggccgaatacgaccccgaggcgaaggggcgtatcaagcatctagatgtagtcacacttcttagacggatccaacccccactgggattcgggaagctctgtccacaccgtgtggcatgtaaaaggttagtcagcatgaatatgccactgaactccgatgggaccgtgatgttcaacgctacactcttcgctctcgtgagaaccgctcttagaataaagactgaaggcaaccttgagcaggccaatgaggagctacgtgccatcatcaagaaaatctggaagcgcaccagcatgaaattactcgatcaggtcgtccctcccgctggagacgacgaagtgaccgtgggaaaattttatgcaaccttcctgatccaggaatatttccggaaatttaagaagagaaaggagcaaggattggtaggaaaaccttcacagcgtaatgcactgtccctccaggccggactgcgcacactgcacgatattggacctgagataaggcgggcaatttcaggcgatctaaccgctgaagaagaactggataaagctatgaaagaggcggtgagcgccgcttcagaggatgacatcttccgccgtgcaggtggactgtttggcaaccacgtgtcctattaccagtcagatgggaggtcagctttcccgcagacatttactactcagcgacccctccacataaacaaggccggaagctcacaaggcgatactgagtctccgagccacgaaaagctggtggattccaccttcacacctagctcatacagttcaactggttcaaatgctaacataaacaatgcgaacaatacagcgttaggccgtttaccacgtcccgctggatatccctccaccgtgagtactgtagaggggcacgggccaccgctgtcacctgccatccgagtgcaggaggttgcctggaagctcagctctaaccgggagcgacatgtcccaatgtgtgaggatctggagctcagaagagattctggcagcgctgggacacaagctcactgtctgctcctgaggaaggccaacccttccaggtgccattctcgagagagtcaggctgccatggctgggcaggaagaaacctcccaggatgagacctacgaggtaaagatgaatcacgacacagaggcctgcagtgagccttctttgctaagtacagaaatgctgagttatcaagacgacgagaaccgacagcttactctcccggaggaagataagcgcgatattcgccaaagtcctaagaggggtttcctgagatccgcatctcttggcaggagggcctcattccacctggaatgcctgaagcggcagaaggacagaggaggggatatttcccagaagacggtgttgccgttgcatctggtgcaccaccaggcgctcgccgtggctggcctttctccactacttcagagaagccacagcccagcgagcttccctcgtcctttcgctaccccacctgcgaccccaggtagtcgagggtggcctccccagcccgtaccgacacttcggttggaaggcgtggagtcgtccgagaagctgaactcctccttcccaagcatccactgcggatcatgggcggagacaaccccagggggtggaggctcaagtgccgctcgtagggttcgacctgttagcctcatggtgccgtcccaggctggcgctccgggacggcagttccacggatccgcgtcatcgctggtggaggccgtattaatcagtgagggcctgggtcagtttgcccaggacccaaagttcatagaggtgaccacacaagagctcgcagacgcatgtgacatgacaatcgaagaaatggagagtgccgctgacaatatcctgagcggcggagcgcctcaaagtccaaatggggctctgttgcccttcgtgaattgcagggatgctggacaagatcgtgccggaggagaagaggatgcaggatgcgtccgtgccagagggagacccagcgaggaggagttacaggattctagagtgtatgtttcctcactgta

SEQ ID NO: 46899 - DNA, 6616 bp, Artificial Sequence
  derived and/or modified sequence
atggtcaatgagaatacgaggatgtacattccagaggaaaaccaccaaggttccaactatgggagcccacgccccgcccatgccaacatgaatgccaatgcggcagcggggctggcccctgagcacatccccaccccgggggctgccctgtcgtggcaggcggccatcgacgcagcccggcaggctaagctgatgggcagcgctggcaatgcgaccatctccacagtcagctccacgcagcggaagcggcagcaatatgggaaacccaagaagcagggcagcaccacggccacacgcccgccccgagccctgctctgcctgaccctgaagaaccccatccggagggcctgcatcagcattgtcgaatggaaaccatttgaaataattattttactgactatttttgccaattgtgtggccttagcgatctatattccctttccagaagatgattccaacgccaccaattccaacctggaacgagtggaatatctctttctcataatttttacggtggaagcgtttttaaaagtaatcgcctatggactcctctttcaccccaatgcctacctccgcaacggctggaacctactagattttataattgtggttgtggggctttttagtgcaattttagaacaagcaaccaaagcagatggggcaaacgctctcggagggaaaggggccggatttgatgtgaaggcgctgagggccttccgcgtgctgcgccccctgcggctggtgtccggagtcccaagtctccaggtggtcctgaattccatcatcaaggccatggtccccctgctgcacatcgccctgcttgtgctgtttgtcatcatcatctacgccatcatcggcttggagctcttcatggggaagatgcacaagacctgctacaaccaggagggcatagcagatgttccagcagaagatgacccttccccttgtgcgctggaaacgggccacgggcggcagtgccagaacggcacggtgtgcaagcccggctgggatggtcccaagcacggcatcaccaactttgacaactttgccttcgccatgctcacggtgttccagtgcatcaccatggagggctggacggacgtgctgtactgggtcaatgatgccgtaggaagggactggccctggatctattttgttacactaatcatcatagggtcattttttgtacttaacttggttctcggtgtgcttagcggagagttttccaaagagagggagaaggccaaggcccggggagatttccagaagctgcgggagaagcagcagctagaagaggatctcaaaggctacctggattggatcactcaggccgaagacatcgatcctgagaatgaggacgaaggcatggatgaggagaagccccgaaacatgagcatgcccaccagtgagaccgagtccgtcaacaccgaaaacgtggctggaggtgacatcgagggagaaaactgcggggccaggctggcccaccggatctccaagtcaaagttcagccgctactggcgccggtggaatcggttctgcagaaggaagtgccgcgccgcagtcaagtctaatgtcttctactggctggtgattttcctggtgttcctcaacacgctcaccattgcctctgagcactacaaccagcccaactggctcacagaagtccaagacacggcaaacaaggccctgctggccctgttcacggcagagatgctcctgaagatgtacagcctgggcctgcaggcctacttcgtgtccctcttcaaccgctttgactgcttcgtcgtgtgtggcggcatcctggagaccatcctggtggagaccaagatcatgtccccactgggcatctccgtgctcagatgcgtccggctgctgaggattttcaagatcacgaggtactggaactccttgagcaacctggtggcatccttgctgaactctgtgcgctccatcgcctccctgctccttctcctcttcctcttcatcatcatcttctccctcctggggatgcagctctttggaggaaagttcaactttgatgagatgcagacccggaggagcacattcgataacttcccccagtccctcctcactgtgtttcagatcctgaccggggaggactggaattcggtgatgtatgatgggatcatggcttatggcggcccctcttttccagggatgttagtctgtatttacttcatcatcctcttcatctgtggaaactatatcctactgaatgtgttcttggccattgctgtggacaacctggctgatgctgagagcctcacatctgcccaaaaggaggaggaagaggagaaggagagaaagaagctggccaggactgccagcccagagaagaaacaagagttggtggagaagccggcagtgggggaatccaaggaggagaagattgagctgaaatccatcacggctgacggagagtctccacccgccaccaagatcaacatggatgacctccagcccaatgaaaatgaggataagagcccctaccccaacccagaaactacaggagaagaggatgaggaggagccagagatgcctgtcggccctcgcccacgaccactctctgagcttcaccttaaggaaaaggcagtgcccatgccagaagccagcgcgtttttcatcttcagctctaacaacaggtttcgcctccagtgccaccgcattgtcaatgacacgatcttcaccaacctgatcctcttcttcattctgctcagcagcatttccctggctgctgaggacccggtccagcacacctccttcaggaaccatatcctaggcaatgcagactatgtcttcactagtatctttacattagaaattatccttaagatgactgcttatggggctttcttgcacaagggttctttctgccggaactacttcaacatcctggacctgctggtggtcagcgtgtccctcatctcctttggcatccagtccagtgcaatcaatgtcgtgaagatcttgcgagtcctgcgagtactcaggcccctgagggccatcaacagggccaaggggctaaagcatgtggttcagtgtgtgtttgtcgccatccggaccatcgggaacatcgtgattgtcaccaccctgctgcagttcatgtttgcctgcatcggggtccagctcttcaagggaaagctgtacacctgttcagacagttccaagcagacagaggcggaatgcaagggcaactacatcacgtacaaagacggggaggttgaccaccccatcatccaaccccgcagctgggagaacagcaagtttgactttgacaatgttctggcagccatgatggccctcttcaccgtctccaccttcgaagggtggccagagctgctgtaccgctccatcgactcccacacggaagacaagggccccatctacaactaccgtgtggagatctccatcttcttcatcatctacatcatcatcatcgccttcttcatgatgaacatcttcgtgggcttcgtcatcgtcacctttcaggagcagggggagcaggagtacaagaactgtgagctggacaagaaccagcgacagtgcgtggaatacgccctcaaggcccggcccctgcggaggtacatccccaagaaccagcaccagtacaaagtgtggtacgtggtcaactccacctacttcgagtacctgatgttcgtcctcatcctgctcaacaccatctgcctggccatgcagcactacggccagagctgcctgttcaaaatcgccatgaacatcctcaacatgctcttcactggcctcttcaccgtggagatgatcctgaagctcattgccttcaaacccaagcactatttctgtgatgcatggaatacatttgacgccttgattgttgtgggtagcattgttgatatagcaatcaccgaggtaaacccagctgaacatacccaatgctctccctctatgaacgcagaggaaaactcccgcatctccatcaccttcttccgcctgttccgggtcatgcgtctggtgaagctgctgagccgtggggagggcatccggacgctgctgtggaccttcatcaagtccttccaggccctgccctatgtggccctcctgatcgtgatgctgttcttcatctacgcggtgatcgggatgcaggtgtttgggaaaattgccctgaatgataccacagagatcaaccggaacaacaactttcagaccttcccccaggccgtgctgctcctcttcaggtgtgccaccggggaggcctggcaggacatcatgctggcctgcatgccaggcaagaagtgtgccccagagtccgagcccagcaacagcacggagggtgaaacaccctgtggtagcagctttgctgtcttctacttcatcagcttctacatgctctgtgccttcctgatcatcaacctctttgtagctgtcatcatggacaactttgactacctgacaagggactggtccatccttggtccccaccacctggatgagtttaaaagaatctgggcagagtatgaccctgaagccaagggtcgtatcaaacacctggatgtggtgaccctcctccggcggattcagccgccactaggttttgggaagctgtgccctcaccgcgtggcttgcaaacgcctggtctccatgaacatgcctctgaacagcgacgggacagtcatgttcaatgccaccctgtttgccctggtcaggacggccctgaggatcaaaacagaagggaacctagaacaagccaatgaggagctgcgggcgatcatcaagaagatctggaagcggaccagcatgaagctgctggaccaggtggtgccccctgcaggtgatgatgaggtcaccgttggcaagttctacgccacgttcctgatccaggagtacttccggaagttcaagaagcgcaaagagcagggccttgtgggcaagccctcccagaggaacgcgctgtctctgcaggctggcttgcgcacactgcatgacatcgggcctgagatccgacgggccatctctggagatctcaccgctgaggaggagctggacaaggccatgaaggaggctgtgtccgctgcttctgaagatgacatcttcaggagggccggtggcctgttcggcaaccacgtcagctactaccaaagcgacggccggagcgccttcccccagaccttcaccactcagcgcccgctgcacatcaacaaggcgggcagcagccagggcgacactgagtcgccatcccacgagaagctggtggactccaccttcaccccgagcagctactcgtccaccggctccaacgccaacatcaacaacgccaacaacaccgccctgggtcgcctccctcgccccgccggctaccccagcacggtcagcactgtggagggccacgggccccccttgtcccctgccatccgggtgcaggaggtggcgtggaagctcagctccaacagggaaaggcacgttccgatgtgtgaggatctggagctcaggagggattcaggctcagcagggactcaggctcactgccttctgctcaggaaagcaaacccctctaggtgccactcccgggagagccaggcagccatggcgggtcaggaggagacgtctcaggatgagacctatgaagtgaagatgaaccatgacacggaggcctgcagtgagcccagcctgctctccacagagatgctctcctaccaggatgacgaaaatcggcaactgacgctcccagaggaggacaagagggacatccggcaatctccgaagaggggtttcctccgctctgcctcactaggtcgaagggcctccttccacctggaatgtctgaagcgacagaaggaccgagggggagacatctctcagaagacagtcctgcccttgcatctggttcatcatcaggcattggcagtggcaggcctgagccccctcctccagagaagccattcccctgcctcattccctaggccttttgccaccccaccagccacacctggcagccgaggctggcccccacagcccgtccccaccctgcggcttgagggggtcgagtccagtgagaaactcaacagcagcttcccatccatccactgcggctcctgggctgagaccacccccggtggcgggggcagcagcgccgcccggagagtccggcccgtctccctcatggtgcccagccaggctggggccccagggaggcagttccacggcagtgccagcagcctggtggaagcggtcttgatttcagaaggactggggcagtttgctcaagatcccaagttcatcgaggtcaccacccaggagctggccgacgcctgcgacatgaccatagaggagatggagagcgcggccgacaacatcctcagcgggggcgccccacagagccccaatggcgccctcttaccctttgtgaactgcagggacgcggggcaggaccgagccgggggcgaagaggacgcgggctgtgtgcgcgcgcggggtcgaccgagtgaggaggagctccaggacagcagggtctacgtcagcagcctgtagtgggcgctgccagatgcgggcttttttttatttgtttcaatgttcctaatgggttcgtttcagaagtgcctcactgttctcgtgacctggagtt

SEQ ID NO: 46900 - protein, 2166 aa, Artificial Sequence
  derived and/or modified sequence
MVNENTRMYIPEENHQGSNYGSPRPAHANMNANAAAGLAPEHIPTPGAALSWQAAIDAARQAKLMGSAGNATISTVSSTQRKRQQYGKPKKQGSTTATRPPRALLCLTLKNPIRRACISIVEWKPFEIIILLTIFANCVALAIYIPFPEDDSNATNSNLERVEYLFLIIFTVEAFLKVIAYGLLFHPNAYLRNGWNLLDFIIVVVGLFSAILEQATKADGANALGGKGAGFDVKALRAFRVLRPLRLVSGVPSLQVVLNSIIKAMVPLLHIALLVLFVIIIYAIIGLELFMGKMHKTCYNQEGIADVPAEDDPSPCALETGHGRQCQNGTVCKPGWDGPKHGITNFDNFAFAMLTVFQCITMEGWTDVLYWVNDAVGRDWPWIYFVTLIIIGSFFVLNLVLGVLSGEFSKEREKAKARGDFQKLREKQQLEEDLKGYLDWITQAEDIDPENEDEGMDEEKPRNMSMPTSETESVNTENVAGGDIEGENCGARLAHRISKSKFSRYWRRWNRFCRRKCRAAVKSNVFYWLVIFLVFLNTLTIASEHYNQPNWLTEVQDTANKALLALFTAEMLLKMYSLGLQAYFVSLFNRFDCFVVCGGILETILVETKIMSPLGISVLRCVRLLRIFKITRYWNSLSNLVASLLNSVRSIASLLLLLFLFIIIFSLLGMQLFGGKFNFDEMQTRRSTFDNFPQSLLTVFQILTGEDWNSVMYDGIMAYGGPSFPGMLVCIYFIILFICGNYILLNVFLAIAVDNLADAESLTSAQKEEEEEKERKKLARTASPEKKQELVEKPAVGESKEEKIELKSITADGESPPATKINMDDLQPNENEDKSPYPNPETTGEEDEEEPEMPVGPRPRPLSELHLKEKAVPMPEASAFFIFSSNNRFRLQCHRIVNDTIFTNLILFFILLSSISLAAEDPVQHTSFRNHILFYFDIVFTTIFTIEIALKMTAYGAFLHKGSFCRNYFNILDLLVVSVSLISFGIQSSAINVVKILRVLRVLRPLRAINRAKGLKHVVQCVFVAIRTIGNIVIVTTLLQFMFACIGVQLFKGKLYTCSDSSKQTEAECKGNYITYKDGEVDHPIIQPRSWENSKFDFDNVLAAMMALFTVSTFEGWPELLYRSIDSHTEDKGPIYNYRVEISIFFIIYIIIIAFFMMNIFVGFVIVTFQEQGEQEYKNCELDKNQRQCVEYALKARPLRRYIPKNQHQYKVWYVVNSTYFEYLMFVLILLNTICLAMQHYGQSCLFKIAMNILNMLFTGLFTVEMILKLIAFKPKGYFSDPWNVFDFLIVIGSIIDVILSETNHYFCDAWNTFDALIVVGSIVDIAITEVNPAEHTQCSPSMNAEENSRISITFFRLFRVMRLVKLLSRGEGIRTLLWTFIKSFQALPYVALLIVMLFFIYAVIGMQVFGKIALNDTTEINRNNNFQTFPQAVLLLFRCATGEAWQDIMLACMPGKKCAPESEPSNSTEGETPCGSSFAVFYFISFYMLCAFLIINLFVAVIMDNFDYLTRDWSILGPHHLDEFKRIWAEYDPEAKGRIKHLDVVTLLRRIQPPLGFGKLCPHRVACKRLVSMNMPLNSDGTVMFNATLFALVRTALRIKTEGNLEQANEELRAIIKKIWKRTSMKLLDQVVPPAGDDEVTVGKFYATFLIQEYFRKFKKRKEQGLVGKPSQRNALSLQAGLRTLHDIGPEIRRAISGDLTAEEELDKAMKEAVSAASEDDIFRRAGGLFGNHVSYYQSDGRSAFPQTFTTQRPLHINKAGSSQGDTESPSHEKLVDSTFTPSSYSSTGSNANINNANNTALGRLPRPAGYPSTVSTVEGHGPPLSPAIRVQEVAWKLSSNRCHSRESQAAMAGQEETSQDETYEVKMNHDTEACSEPSLLSTEMLSYQDDENRQLTLPEEDKRDIRQSPKRGFLRSASLGRRASFHLECLKRQKDRGGDISQKTVLPLHLVHHQALAVAGLSPLLQRSHSPASFPRPFATPPATPGSRGWPPQPVPTLRLEGVESSEKLNSSFPSIHCGSWAETTPGGGGSSAARRVRPVSLMVPSQAGAPGRQFHGSASSLVEAVLISEGLGQFAQDPKFIEVTTQELADACDMTIEEMESAADNILSGGAPQSPNGALLPFVNCRDAGQDRAGGEEDAGCVRARGRPSEEELQDSRVYVSSL

SEQ ID NO: 46901 - DNA, 13564 bp, Artificial Sequence
  derived and/or modified sequence
ttattttttcaaatggtgtagccgccggaggtgcggtgctcagttcttggaaggggcccggatgtactgaggatgcgttacagtttcactcgaggaggcagtagtggaaaggagcagtttttggggtttgatgccataatgggaatcaggtaatcgtcggcggggaagaagaaacgctgcagaccacggcttcctcgaatcttgcgcgaaagccgccggcctcggaggagggattaatccagacccgccggggggtgttttcacatttcttcctcttcgtggctgctcctcctattaaaaccatttttggtccatggtcaatgagaatacgaggatgtacattccagaggaaaaccaccaaggttccaactatgggagcccacgccccgcccatgccaacatgaatgccaatgcggcagcggggctggcccctgagcacatccccaccccgggggctgccctgtcgtggcaggcggccatcgacgcagcccggcaggctaagctgatgggcagcgctggcaatgcgaccatctccacagtcagctccacgcagcggaagcggcagcaatatgggaaacccaagaagcagggcagcaccacggccacacgcccgccccgagccctgctctgcctgaccctgaagaaccccatccggagggcctgcatcagcattgtcgaatggaaaccatttgaaataattattttactgactatttttgccaattgtgtggccttagcgatctatattccctttccagaagatgattccaacgccaccaattccaacctggaacgagtggaatatctctttctcataatttttacggtggaagcgtttttaaaagtaatcgcctatggactcctctttcaccccaatgcctacctccgcaacggctggaacctactagattttataattgtggttgtggggctttttagtgcaattttagaacaagcaaccaaagcagatggggcaaacgctctcggagggaaaggggccggatttgatgtgaaggcgctgagggccttccgcgtgctgcgccccctgcggctggtgtccggagtcccaagtctccaggtggtcctgaattccatcatcaaggccatggtccccctgctgcacatcgccctgcttgtgctgtttgtcatcatcatctacgccatcatcggcttggagctcttcatggggaagatgcacaagacctgctacaaccaggagggcatagcagatgttccagcagaagatgacccttccccttgtgcgctggaaacgggccacgggcggcagtgccagaacggcacggtgtgcaagcccggctgggatggtcccaagcacggcatcaccaactttgacaactttgccttcgccatgctcacggtgttccagtgcatcaccatggagggctggacggacgtgctgtactgggtcaatgatgccgtaggaagggactggccctggatctattttgttacactaatcatcatagggtcattttttgtacttaacttggttctcggtgtgcttagcggagagttttccaaagagagggagaaggccaaggcccggggagatttccagaagctgcgggagaagcagcagctagaagaggatctcaaaggctacctggattggatcactcaggccgaagacatcgatcctgagaatgaggacgaaggcatggatgaggagaagccccgaaacatgagcatgcccaccagtgagaccgagtccgtcaacaccgaaaacgtggctggaggtgacatcgagggagaaaactgcggggccaggctggcccaccggatctccaagtcaaagttcagccgctactggcgccggtggaatcggttctgcagaaggaagtgccgcgccgcagtcaagtctaatgtcttctactggctggtgattttcctggtgttcctcaacacgctcaccattgcctctgagcactacaaccagcccaactggctcacagaagtccaagacacggcaaacaaggccctgctggccctgttcacggcagagatgctcctgaagatgtacagcctgggcctgcaggcctacttcgtgtccctcttcaaccgctttgactgcttcgtcgtgtgtggcggcatcctggagaccatcctggtggagaccaagatcatgtccccactgggcatctccgtgctcagatgcgtccggctgctgaggattttcaagatcacgaggtactggaactccttgagcaacctggtggcatccttgctgaactctgtgcgctccatcgcctccctgctccttctcctcttcctcttcatcatcatcttctccctcctggggatgcagctctttggaggaaagttcaactttgatgagatgcagacccggaggagcacattcgataacttcccccagtccctcctcactgtgtttcagatcctgaccggggaggactggaattcggtgatgtatgatgggatcatggcttatggcggcccctcttttccagggatgttagtctgtatttacttcatcatcctcttcatctgtggaaactatatcctactgaatgtgttcttggccattgctgtggacaacctggctgatgctgagagcctcacatctgcccaaaaggaggaggaagaggagaaggagagaaagaagctggccaggactgccagcccagagaagaaacaagagttggtggagaagccggcagtgggggaatccaaggaggagaagattgagctgaaatccatcacggctgacggagagtctccacccgccaccaagatcaacatggatgacctccagcccaatgaaaatgaggataagagcccctaccccaacccagaaactacaggagaagaggatgaggaggagccagagatgcctgtcggccctcgcccacgaccactctctgagcttcaccttaaggaaaaggcagtgcccatgccagaagccagcgcgtttttcatcttcagctctaacaacaggtttcgcctccagtgccaccgcattgtcaatgacacgatcttcaccaacctgatcctcttcttcattctgctcagcagcatttccctggctgctgaggacccggtccagcacacctccttcaggaaccatattctgttttattttgatattgtttttaccaccattttcaccattgaaattgctctgaagatgactgcttatggggctttcttgcacaagggttctttctgccggaactacttcaacatcctggacctgctggtggtcagcgtgtccctcatctcctttggcatccagtccagtgcaatcaatgtcgtgaagatcttgcgagtcctgcgagtactcaggcccctgagggccatcaacagggccaaggggctaaagcatgtggttcagtgtgtgtttgtcgccatccggaccatcgggaacatcgtgattgtcaccaccctgctgcagttcatgtttgcctgcatcggggtccagctcttcaagggaaagctgtacacctgttcagacagttccaagcagacagaggcggaatgcaagggcaactacatcacgtacaaagacggggaggttgaccaccccatcatccaaccccgcagctgggagaacagcaagtttgactttgacaatgttctggcagccatgatggccctcttcaccgtctccaccttcgaagggtggccagagctgctgtaccgctccatcgactcccacacggaagacaagggccccatctacaactaccgtgtggagatctccatcttcttcatcatctacatcatcatcatcgccttcttcatgatgaacatcttcgtgggcttcgtcatcgtcacctttcaggagcagggggagcaggagtacaagaactgtgagctggacaagaaccagcgacagtgcgtggaatacgccctcaaggcccggcccctgcggaggtacatccccaagaaccagcaccagtacaaagtgtggtacgtggtcaactccacctacttcgagtacctgatgttcgtcctcatcctgctcaacaccatctgcctggccatgcagcactacggccagagctgcctgttcaaaatcgccatgaacatcctcaacatgctcttcactggcctcttcaccgtggagatgatcctgaagctcattgccttcaaacccaagggttactttagtgatccctggaatgtttttgacttcctcatcgtaattggcagcataattgacgtcattctcagtgagactaatcactatttctgtgatgcatggaatacatttgacgccttgattgttgtgggtagcattgttgatatagcaatcaccgaggtaaacccagctgaacatacccaatgctctccctctatgaacgcagaggaaaactcccgcatctccatcaccttcttccgcctgttccgggtcatgcgtctggtgaagctgctgagccgtggggagggcatccggacgctgctgtggaccttcatcaagtccttccaggccctgccctatgtggccctcctgatcgtgatgctgttcttcatctacgcggtgatcgggatgcaggtgtttgggaaaattgccctgaatgataccacagagatcaaccggaacaacaactttcagaccttcccccaggccgtgctgctcctcttcaggtgtgccaccggggaggcctggcaggacatcatgctggcctgcatgccaggcaagaagtgtgccccagagtccgagcccagcaacagcacggagggtgaaacaccctgtggtagcagctttgctgtcttctacttcatcagcttctacatgctctgtgccttcctgatcatcaacctctttgtagctgtcatcatggacaactttgactacctgacaagggactggtccatccttggtccccaccacctggatgagtttaaaagaatctgggcagagtatgaccctgaagccaagggtcgtatcaaacacctggatgtggtgaccctcctccggcggattcagccgccactaggttttgggaagctgtgccctcaccgcgtggcttgcaaacgcctggtctccatgaacatgcctctgaacagcgacgggacagtcatgttcaatgccaccctgtttgccctggtcaggacggccctgaggatcaaaacagaagggaacctagaacaagccaatgaggagctgcgggcgatcatcaagaagatctggaagcggaccagcatgaagctgctggaccaggtggtgccccctgcaggtgatgatgaggtcaccgttggcaagttctacgccacgttcctgatccaggagtacttccggaagttcaagaagcgcaaagagcagggccttgtgggcaagccctcccagaggaacgcgctgtctctgcaggctggcttgcgcacactgcatgacatcgggcctgagatccgacgggccatctctggagatctcaccgctgaggaggagctggacaaggccatgaaggaggctgtgtccgctgcttctgaagatgacatcttcaggagggccggtggcctgttcggcaaccacgtcagctactaccaaagcgacggccggagcgccttcccccagaccttcaccactcagcgcccgctgcacatcaacaaggcgggcagcagccagggcgacactgagtcgccatcccacgagaagctggtggactccaccttcaccccgagcagctactcgtccaccggctccaacgccaacatcaacaacgccaacaacaccgccctgggtcgcctccctcgccccgccggctaccccagcacggtcagcactgtggagggccacgggccccccttgtcccctgccatccgggtgcaggaggtggcgtggaagctcagctccaacaggtgccactcccgggagagccaggcagccatggcgggtcaggaggagacgtctcaggatgagacctatgaagtgaagatgaaccatgacacggaggcctgcagtgagcccagcctgctctccacagagatgctctcctaccaggatgacgaaaatcggcaactgacgctcccagaggaggacaagagggacatccggcaatctccgaagaggggtttcctccgctctgcctcactaggtcgaagggcctccttccacctggaatgtctgaagcgacagaaggaccgagggggagacatctctcagaagacagtcctgcccttgcatctggttcatcatcaggcattggcagtggcaggcctgagccccctcctccagagaagccattcccctgcctcattccctaggccttttgccaccccaccagccacacctggcagccgaggctggcccccacagcccgtccccaccctgcggcttgagggggtcgagtccagtgagaaactcaacagcagcttcccatccatccactgcggctcctgggctgagaccacccccggtggcgggggcagcagcgccgcccggagagtccggcccgtctccctcatggtgcccagccaggctggggccccagggaggcagttccacggcagtgccagcagcctggtggaagcggtcttgatttcagaaggactggggcagtttgctcaagatcccaagttcatcgaggtcaccacccaggagctggccgacgcctgcgacatgaccatagaggagatggagagcgcggccgacaacatcctcagcgggggcgccccacagagccccaatggcgccctcttaccctttgtgaactgcagggacgcggggcaggaccgagccgggggcgaagaggacgcgggctgtgtgcgcgcgcggggtcgaccgagtgaggaggagctccaggacagcagggtctacgtcagcagcctgtagtgggcgctgccagatgcgggcttttttttatttgtttcaatgttcctaatgggttcgtttcagaagtgcctcactgttctcgtgacctggagttaaccggaacagcgtcttcattcatttctgttgggaccagacgcggagcctgggtgcgcgagccgccctccgggaggaaggcgcccggctgcgtctgcagaggcggggagaggaggcggcgagggtcccggggcgcgaggaaggcgcctgccctctcccagctcgcaggccccgggcccggccgcgcctccgcggggagagcaccccggcttcccgcgcgccctcaccaaaaggaccctacagcaaacgggtgtctttcgactctgcttgtagaaaccatttgcacatattctgtacgagcctcgctgtctccctagagccagggccctgcggatttggagaagggagcggggcaggacttccaggaggaccccaacccggcccggagagggaggaggaggcctccaggggcgcggagctctggggatgggcgtcgggccggcagtggtgcggctcactccgtccctgcccacctgcgacgggatcccccgaccggcacgggccacgccgagctcccggccagccgccggcccgcaggcagcgcgagggaggagctgcgccgccggctccgcccaaccaggtggtgctgagcttccgctgagcgctcttttgttttgtggtttgacacttttcttgacagcatgttgcagtttcttttcggttttggttttttttaaatgttttattttgctttcccagcgggaggggaggaagaagagtgtttacaaagtcctgtagccccctcacctttctgttttcacttttgccaatgtacatcgggtttggttttcttgtattatttaaacggttgtggtttcctttttccacggaggttcaatagaagccgctgcaggagagttttaccaaccattgtgtatgcccaataatttgttatcatttccttaggtagtaacctatttttgttctggtttggttcggttatctaatggaaaggtaactggcaatgcacttgatgtggtcttgcacatgtgggtgatagagttgggttcctttttatgctgggtgtacaggtgggtttgggagagaggagcatgcgcgagagagtctccgagtgtgtgcgacgcgtgtgtgtgtggtgggttgtctgtgtgcatatgtcctgcccgtgtatatgcacccacaccatgtgcccgtgcacaccagtgactacgcagtcccccctttctggtttagctgtgggaagatctgaatctggggccgtttgaaagcaaaaacaaaccactgtctctgcttctgaaacgggaatcagtaactctttgcattttctgtcccacaagatatgcaaaaacaatgcaataatattcatttaaaaatacaattgtgagttgtgttggcattaaaactgtattttaaaaaaagacagaaatttaagggaaaaacacaagaaggcattttgcttcaatatattccgtgtaatgttttattgcattgataatgtttctgttgaagaaaccgttatacttgaattcaggtcagtttcagtatttttcaaatatttttttaaaactgaattgcaattgtgccaagcgaatataatgaattgaattaagttggttttcggattcacttcttgtatattttgctgcatgtaaagtaaatcattttgtatttggagtgtgacaagctttacctttgaactcaagtgcttttctatatgtggttgggggaaagggaacaagttttctttagtttgcacaatgagcaaaggtatcaccagtgtagtcattattctgctctccacaaacaggtttggacattactgttttgcatatcttgtgtttgcttacatttccctcaatttttccaaaatcgtttgctgggtatgtttgtaccgcctcttgctgtgagagaccaggacctattttattccagtcttcactctgtccactctgctctggtcatctgatttggtacttctccaagaacagcccttcactgtgaggtgcagggaggcgttctgatgagccctcagtcactgggccgtcatccgcatcccccatggaagaggtagctggctttcccttcccttccaccacacggaattttctctttggcttccttaggaaagtgtacactaaccgggaggataaaattaaagtcaggctgcttggagggaggggcatcctcacttccggattcttgttgctctacccaacaaggacagcaggggctcgagaaaggaactggtgaaaccctgatccatctgaaagtcaactctgcgtgctcctttctccatcccttcctcactctggagcagcctttccttcaggcttgccctaatgtttgggctgccggggagggggccaggacaagggaagaggcatccggagctcacagtgggggtgggaacagatttttgtgggggcatctctaatgctcacttatatctccctagaacatcactcttttggtgctgtgtccttcaaatgtatgtcaacagtggtggctgaaaagggactgctttggggaaaacaggacccaaccattcacccagaattgacccattaaatctcttccagtcctagtgttccctgagcccctcttggcacatatataagtaagctagaaattacaataagggacagtccattcctctatgacagcttgctggactgattcatgacaaagtggagaaatgtactcaatactccccggttaacacagtctagaaacagagtttctttatggatatccacacccaagtcatccaaactttcttgattccttttcactgccatcaaggtcctctagaaattgagtttaggtatcatcctttgaaaagttcccaagatttctaccaggaggtacacacaggcgttccctgtctagggcaggaggactatcctagcttgaccttctgatccactagaataagactggcgtatgatgcctgtcatcagaacagactggcacaagtagtgacatcaatgaaccacagcacaatcttccaagtgatgtctactctccacctaaaatggaattttccccatgaccttgtaaaacataattgtcacatcttccatacccctcctgacagcccccaagtgtcaggagaaaacagtcaggggctaagggcccaagggacttgaagaaacaacagtttaaggtctgcagtttggtcaacttaattcttgtcctccgaccagccctgcctctttcatttccagaccttggagaatttttcccagctttgattcagaaggtactagttataacccctttccttcttcttaatccaataggcctcactctcactgggaaatccactcaaaggaacaaggcaatgtctctcattctatttcccagttccaaattccaggtgcttgtctggagtgaagctacccgttactttctcccagcttttctccacccagcatgtctcctgcccatgcagctgaagacagtggggcaacctcaggagaagcagacctttccatgcccaagttcatctcctgagcaacagtgacacctagaaaatgaggactttggaagtcacccaaaagatggtggctactttatggagtcctgaagatacacagccaccactcctaaaggcaaagaaagaaaacacgaatgtaggtcagggatagagtggaaccctggtcatcggggtttttagcctcatcgtgggaaaggtggtaaaggaggatgatggcatctccatccctagaggccaagaattgaaatatcattgtcaaggattagaaacaattcagcaaagaggccacaaaaagggcctgctgactcccagaagacctctttaaaccccaggggaggcaaatacttgctgatggagtctgggccgtttccatattttaaagaagacctgcctctggggcaaatgtcagcacagagaggactgggaggagaatggaggcaagaaaagggcatattttgactccctctgtgcctcttcccagttcatggaaggatgtgttcagcttacccacccacagtgaccagtgtggtggagccgctgacatctcaaggatctatttgggaaggtgagaagagtactcattccatctgggggtgttgttccagccacatcagcctacctggtgggatgtgggggtgtctgccaccctgtcccccctctgctgatgtccctcccctcaggctgtccaggtgccacctgacacaggctgctgtgcaaagacaggcggggaagcccaaacctcactcccagggaggccctcagccgccagagtccaggttctccagaggctacgatttgaggaggttgagggggaagacaggagggaaagaaaagtcctacaactgtcaggaatggggcacctttccctgtccctaagcaaagctccctcttcccactgccctccccagccccagctccctgtcctccccaacacctagtgagaaagacggtgcgtggaagggagtcccatgggcagatgcttacacgacctctttgtgaagcctcttctgggtttaacttcattcatcaatttattcttatgtcaaagcaatgaaacttttctttctggagccagataccaatacaacaggtgaacgggtttctgccacatctctacattgacgggggatgcttgaacaacccccctcactacacagacacacaccgttaaggcacaagggctggggttgagctctagatgagggactttcctgctcctgcaagggtgagcactgtatacacagacaaggagggtgcagtagagtgactcccttggatggaagtagtaccatcagaacctactattattatgacataaattctatttacatacattgagagaatactacaatcaacactttttcctgggatgactttaagaggtttgagccacagcacctgaagtggcaaagatccatggtctttgtagggtattagagaactcttccagtcacctctgaaagcactctagatcttgcagctgagtggatgaagtgtaacaaatctgttgcacgctgagaggagtcagaattagcatttttcatgaaagttccccacgtctctactaagaatgaggaagaaaagactaagactaggtaattacacagaggcttgaaatgttacatcaccagagccaagtcctctcccttcagatcagttactggctgctacacagggacacccccaccttttcagggcatcccatgcactccacttctcaggatctaaggaatttgactttgtagggatcccagaaagggcactgtgccacttcccctggtgtgaatcagacatacattgtacattcatttctaaaattcactcatgcacctcaaaccaaggtcattatccaaaaaaaaaaaaaaaaagctctgggtggaagagtttgtaagttttaagagagggtcatttctatgtgaggaaatgcagaaatggacagaatgattcttattcactgtttgggtctggagaattcccattgtggaaatcttagagatctcaagtttattaccaagggaataaggaaaaaaaggtgagcaggcaccaggccaagcagtggctcccttgccaaggaacctgaggctgcaggtttcagggacccccttgaagaaacctctcctggccattggccaggagaaaagagaagtctctcctgtagagtcacaagagaagcaaaagagggtgggtcactgggtcctggacatagcccccaaccccaagacttcccaatatggagaaactacaccaatgtttaaaaggggaaaaggaaagaacttgtacatcaagggaagatgatttgtaaacacacagtcctgtgcagaaagatccccttcaggaggtgtctccagcatcccaaagctgtgcgcaccttctcttttcctgcctcaggccacctatgcatccagctgcagcccatacccacacctgaaatccatctcttgaatcccagccaggttatataccaccccattgccatgtcctgtcctggccagaatgcatgctgttcccccaagcctcgtgggagtgaggccatgggaaacagagatgagcatgtctggacaagtctgtgatggtagtggatgagaataacccatggcaaaacacgcacattcattaagaaatagggcgacagattccccgttggtgaagcactgaaaggtctattactctcataatattgctgttttattttaatccaccagagctaccatgcaaaactttcctcctgtgaaacgctccagataaagctcctctaatctccccttccctcatgtcctccagctcaaacccaccttcatcccccaaaccaatctgtatcatgcctgttatcagagaggcacagaaagatgggcagtgcctccgttgtcaccattccccacacccctacacacccccacaccctcccctccaggctccacgacttcacagtcttactgttgtaaatatcattgtacagtttgtaatcctcaaataatcccattgtcagaggcctcgcctgatgggccttctcaccctcgagaaaggccagggaatctagaaggggcaacccttcaaggagagcttcagggtcatctctgtgtgagacactattgtatattcctgtaagattgcatttttatctaaggaatgatgttatttaaaaaacaaacaaaaaacacaaaaaataagaattgcaaataaatttcttaacaatgtct

SEQ ID NO: 46902 - DNA, 6501 bp, Artificial Sequence
  derived and/or modified sequence
atggttaacgaaaatacacgaatgtacatccccgaagaaaatcaccaagggagtaactatggttcaccacgacctgcacacgctaatatgaatgccaacgcagccgccggtctggcacccgagcacatccctactcccggcgctgccttatcctggcaggccgctatcgacgctgctagacaggccaaactgatggggtccgctgggaatgctacaatcagtaccgtttcttccacacagaggaagcgccagcagtacggaaagccaaagaagcaagggtccaccacagcaactcggcctccccgagccctcctgtgcctcactttgaagaaccccatacgccgcgcttgtatatctatcgtggaatggaagccttttgagattattattctgttaactatttttgccaactgtgtggcactcgctatctacattccgttcccggaggatgatagcaacgcgaccaacagtaatcttgagagagtggagtacttattcctcattatctttacagttgaagcattcctgaaggtgatcgcgtatgggttactgttccacccgaacgcctacctaaggaatggatggaatctcctggatttcatcatcgtagtggtcggattgttctctgccatcctcgaacaggcaacaaaagctgatggcgctaacgctctgggaggcaaaggagctgggttcgatgtaaaagcccttcgggctttccgcgtgctgcggcctttaaggcttgtttccggcgttccatctctacaagtggtactgaatagcattataaaggctatggtacctctgctgcacattgcgctgttggtacttttcgtcataatcatatatgcaatcatcggactcgaactgttcatggggaagatgcataagacatgctacaaccaagaaggcatcgccgatgtacctgccgaggacgatcctagcccttgtgcactcgaaaccggacacggcaggcaatgccagaacggaacagtgtgcaaacccgggtgggacggcccaaagcatggtattacgaacttcgacaattttgcctttgcaatgctgacagtcttccagtgcattactatggagggatggaccgacgtactttactgggtcaatgacgcagtcggcagggattggccatggatctatttcgttactctcattattattggttcctttttcgtgttaaacctggttcttggcgttctcagtggcgagttttcaaaggagagagagaaggcaaaggccagaggtgactttcagaagttgcgggaaaaacagcagctggaagaggacctgaaaggatatttggattggatcacacaagccgaagatattgatccagaaaatgaggacgaagggatggacgaggagaagccacgcaatatgtccatgcctacatccgagacggagtctgtcaatacagagaatgtcgccggcggcgacatagaaggcgagaactgtggtgccaggctggctcacagaatcagcaagtccaagttcagtagatattggaggagatggaaccgtttttgccgcaggaagtgtcgggcagctgtgaagtcaaatgtcttctattggctggtgatatttctggtttttctcaatactctgacaatcgcttctgagcattacaaccaaccaaattggttgaccgaggtgcaggacacagcaaataaggccctgcttgccctgttcacggcagaaatgctgctgaaaatgtacagtctcggcctgcaggcgtactttgtctcactgttcaaccggttcgactgcttcgttgtttgtgggggcatcttggaaacaattctcgtagagactaaaattatgtcacccctgggtatctcggtgctgaggtgcgtgcggttgctgcgaatattcaagatcaccaggtattggaattccctcagcaatttggtcgccagtctccttaactctgtacgcagtatcgcgtcgttattgctattgctgtttctgttcatcataattttctcactccttggcatgcaactgttcggaggcaaatttaatttcgatgaaatgcagaccaggcgcagcacctttgataatttcccgcagtctttgcttactgtttttcagattctgaccggggaagattggaattcagttatgtatgatgggatcatggcatacggaggccccagctttcctggcatgctggtgtgtatttactttataattctgttcatatgcggcaattacattctcctcaacgtattcttggccatcgccgtcgataacctagccgatgctgagagcttaacgagcgcccaaaaagaggaggaggaagagaaggaacggaagaagttggctcggacagcatcacctgagaaaaaacaggagcttgtggagaaacctgccgtgggggagagcaaggaggagaaaattgagctgaagtccatcaccgctgatggagaaagccctcccgcaactaaaattaatatggatgatctgcaacccaatgaaaacgaggataagagcccctacccaaaccctgaaactactggcgaggaagatgaggaagaacccgaaatgccagtaggaccacgtccaaggcccttgtctgagctccacctgaaggaaaaagccgttcccatgccggaggcaagcgcattttttatcttctccagtaacaatagatttagactgcagtgtcacaggatcgtgaatgatactatcttcaccaacttaatcctgttttttatcctactctcaagtatctccctggccgccgaagatccagtgcagcatacttcgttccgtaaccacatcctgttttacttcgacattgtcttcacaaccatctttacgattgagattgctctgaagatgaccgcctatggggcattcctgcataaaggatctttctgccgcaattattttaacatcctggatttgctcgtggtcagcgtgtctctaattagtttcgggatccaaagctctgccattaatgttgttaaaatccttagggtgttacgggttctaagaccactacgagcgataaatcgggccaaaggcctgaagcatgtggtccagtgtgtgtttgtcgccattcggacaattggcaacatcgtaatagtcacgactctgctgcagttcatgtttgcttgcatcggagtgcagctattcaagggcaaattgtacacctgttcggactccagtaagcagactgaagccgagtgtaagggcaattacattacgtacaaggacggtgaggtcgatcatcctatcatccaacccagaagttgggagaattccaagttcgattttgacaacgtcttagcagctatgatggctcttttcacagtctccacttttgagggctggcccgagctcttgtacaggtctatcgattctcacaccgaagataaaggacccatctacaattaccgcgtcgagatttctattttctttattatctacatcatcatcattgcgttctttatgatgaacatatttgtcggctttgtgatagtcacattccaggagcagggagagcaggagtacaaaaattgcgaactggacaagaatcaaaggcaatgtgttgaatatgccctaaaagcccgacctctccgacgctacattccaaaaaatcaacatcagtacaaagtctggtacgtggtgaactcgacctacttcgagtaccttatgtttgtgttgattctcctgaacactatatgcttggcaatgcaacattacggccagagctgtctgtttaaaattgcaatgaacatcctaaatatgttgttcactgggttattcacggtggagatgattctgaaattaattgcgttcaagcctaagggttatttctccgatccatggaatgtgttcgacttcttgattgtcattggctctatcatagacgtgatattatccgaaaccaaccactatttctgcgacgcttggaacacattcgatgctctgatagttgtagggtctattgtggacatcgcaattacagaagtaaaccccgcagaacacacccagtgtagtccgagcatgaacgccgaagagaactctaggatttcaattactttttttagactcttccgcgttatgaggttggtgaaattgcttagccggggcgagggaatccgcactctgctttggacgtttatcaaatccttccaggctctcccgtatgtcgctctcctgatagtgatgctgttcttcatatatgctgtgattgggatgcaggtgtttggtaagatagcactgaatgatactactgagattaacagaaacaataacttccagacgtttccccaggcagtgcttttgctgtttcggtgtgcaactggtgaggcatggcaggacattatgctagcgtgtatgcctggcaagaaatgtgccccagaatccgaaccctcaaactccaccgaaggagagacgccctgtggttcctctttcgcggtgttttatttcattagcttctacatgttatgcgccttcctaataattaatctcttcgtcgcagtgatcatggacaactttgattacctcactcgagattggagtatcctgggcccacatcacttagatgagttcaaacgaatatgggcagagtacgaccctgaggctaaagggagaataaagcatctggatgtcgtcacactgttgcgacgcattcagccccccctcggtttcggaaaactttgtccccaccgggtggcgtgcaagagactggtgtccatgaatatgccccttaattcagatggaaccgtgatgttcaacgctaccctgttcgctctcgtgaggactgcattgcgcattaaaactgaaggcaatctcgagcaagctaacgaagagctcagagccatcattaagaaaatctggaaacgtacgtccatgaaattacttgatcaggtggtgccgccagctggagacgacgaagttacagtgggcaaattctatgctacgtttctgatacaggagtacttccgcaagtttaagaaacggaaggaacagggtctggtaggtaagcccagccagagaaatgcactgtcccttcaggcaggattgcggacactgcacgacataggcccagagatcaggcgggcgatttcaggtgatctgactgcagaggaggaactcgacaaagctatgaaggaagctgtgagcgccgccagcgaggacgatatcttcagacgggccggaggcctcttcggtaatcatgtgagttattatcaaagtgatggacggtctgcttttcctcagactttcaccactcaacgcccactacacatcaataaggccgggagttctcagggagacactgaatctccttcgcatgaaaaactggttgacagcacctttactcctagctcttactcctcaactggcagcaacgccaacattaataatgccaacaatactgccctcggtagattgcctcgaccagcaggctatccttctactgtctctactgtggaaggccatggccctcctctctcaccggctatccgtgtccaggaggttgcctggaagctttcctcaaacagatgccactcccgcgaatctcaggctgctatggccggtcaggaagaaacctcccaagatgaaacatacgaagtcaagatgaaccacgacaccgaggcttgtagcgagccttctctgctgtctaccgagatgctcagctaccaggatgacgaaaacagacagctgacattgcccgaggaggacaaacgagatattcgacaatcacctaaacgtggttttcttcgaagtgcatcactgggtcggagagcctcttttcatctagaatgcctgaaaaggcagaaggacagaggtggcgatataagccagaagacagttttacccctacacttagtgcaccatcaggcactggctgtagccgggttgtcacctctgctccagcgatcccattcacccgcttcttttcctagaccgttcgcaaccccacctgcaaccccggggagtagaggatggccacctcagccagtgccgacccttcgccttgagggagtagaatcatcagagaagctgaattcaagcttcccttccatccattgcggcagctgggcggaaaccaccccaggaggcggggggagcagcgccgcgaggagggtaaggcccgtaagcttaatggttccgagccaggcgggagcacctggacgacagtttcatggttcagcctctagtttggtcgaagctgttttgatttctgaaggcttgggccagttcgctcaagaccctaagtttattgaggtgactacacaggaattggcggacgcctgcgatatgacaatcgaggagatggaatctgccgctgacaacattctcagtggaggcgccccacagtcccccaacggcgctcttctcccatttgtgaattgtcgagacgccgggcaggacagggcaggcggtgaggaagacgctggttgcgttagagctcgagggcggccatctgaagaagagctccaggactcacgggtttatgtgtcttcactgtag

SEQ ID NO: 46903 - DNA, 6501 bp, Artificial Sequence
  derived and/or modified sequence
atggtgaatgaaaacaccaggatgtacatccctgaggagaaccaccagggcagcaactacggcagccccaggcctgcccacgccaacatgaatgccaatgctgctgctggcctggcccctgagcacatccccacccctggggccgccctgtcctggcaggccgccattgatgctgcccggcaggccaagctgatgggcagcgctggaaatgccaccatcagcacagtgagcagcacccagaggaagaggcagcagtatggcaagcccaagaagcagggcagcaccacagccacccggcccccccgggccctgctgtgcctgaccctgaagaaccccatccggcgggcctgcatcagcatcgtggagtggaagccctttgagatcatcatcctgctgaccatctttgccaactgtgtggccctggccatctacatccccttcccagaagatgacagcaatgccaccaacagcaacctggagcgggtggagtacctgttcctgatcatcttcaccgtggaggccttcctgaaggtgattgcctacggcctgctcttccaccccaatgcctacctgagaaatggctggaacctgctggacttcatcatcgtggtggtgggcctcttcagcgccatcctggagcaggccaccaaggcagatggagccaatgccctgggcggcaaaggagctggctttgatgtgaaggccctgcgggccttccgggtgctgcggcccctgcggctggtgtctggagtgcccagcctgcaggtggtgctgaacagcatcatcaaggccatggtgcccctgctgcacatcgccctgctggtgctgtttgtgatcatcatctatgccatcatcggcctggagctgttcatgggcaagatgcacaagacctgctacaaccaggagggcattgctgatgtgcctgcagaagatgaccccagcccctgtgccctggagaccggccacggccggcagtgccagaatggcaccgtgtgcaagccaggctgggatggccccaagcacggcatcaccaactttgacaactttgcctttgccatgctgactgtgttccagtgcatcaccatggagggctggacagatgtgctgtactgggtgaatgatgctgtgggccgggactggccctggatctactttgtgaccctcatcatcatcggcagcttctttgtgctgaacctggtgctgggcgtgctgtctggagagttcagcaaggagcgggagaaggccaaggcccggggggacttccagaagctgcgggagaagcagcagctggaggaggacctgaagggctacctggactggatcacccaggctgaagatattgatcctgaaaatgaagatgagggcatggatgaggagaagcccaggaacatgtccatgcccaccagcgagacagaatctgtgaacacagaaaatgtggccggcggggacatcgagggggagaactgtggggcccggctggcccaccgcatcagcaagagcaagttcagccgctactggaggcgctggaaccgcttctgcaggaggaagtgcagagctgctgtgaagagcaatgtgttctactggctggtgatcttcctggtgttcctgaacaccctgaccatcgccagcgagcactacaaccagcccaactggctgacagaggtgcaggacacagccaacaaggccctgctggccctcttcaccgctgagatgctgctgaagatgtacagcctgggcctgcaggcctactttgtgtccctcttcaacagatttgactgctttgtggtgtgtggcggcatcctggagaccatcctggtggagaccaagatcatgagccccctgggcatctctgtgctgcgctgtgtgcggctgctgcgcatcttcaagatcacccgctactggaacagcctgagcaacctggtggccagcctgctgaacagcgtgcgcagcatcgccagcctgctgctgctgctcttcctgttcatcatcatcttcagcctgctgggcatgcagctgtttggaggcaagttcaactttgatgagatgcagaccaggaggagcacctttgacaacttcccccagagcctgctgaccgtcttccagatcctgaccggggaggactggaacagcgtgatgtatgatggcatcatggcctatggaggccccagcttccctggcatgctggtgtgcatctacttcatcatcctcttcatctgtggcaactacatcctgctgaatgtgttcctggccatcgctgtggacaacctggctgatgctgagagcctgaccagcgcccagaaggaggaggaggaggagaaggagaggaagaagctggccaggacagccagccctgagaagaagcaggagctggtggagaagccagctgtgggggagagcaaggaggagaagattgagctgaagagcatcacagcagatggagagagccccccagccaccaagatcaacatggatgacctgcagcccaatgaaaatgaagacaagagcccctaccccaaccctgagaccactggagaggaggatgaggaggagcctgagatgcctgtgggcccccggccccggcccctgtctgagctgcacctgaaggagaaggctgtgcccatgcctgaggccagcgccttcttcatcttcagcagcaacaaccgcttccggctgcagtgccaccgcatcgtgaatgacaccatcttcaccaacctgatcctcttcttcatcctgctgagcagcatcagcctggccgctgaggaccctgtgcagcacaccagcttcaggaaccacatcctcttctactttgacatcgtgttcaccaccatcttcaccatcgagatcgccctgaagatgacagcctatggagccttcctgcacaagggcagcttctgcaggaactacttcaacatcctggacctgctggtggtgtctgtgtccctcatcagctttggcatccagagcagcgccatcaacgtggtgaagatcctgcgggtgctgcgggtgctgcggcccctgcgggccatcaacagagccaagggcctgaagcacgtggtgcagtgtgtgtttgtggccatccgcaccatcggcaacatcgtcatcgtgaccaccctgctgcagttcatgtttgcctgcatcggcgtgcagctgttcaagggcaagctgtacacctgcagcgacagcagcaagcagacagaagctgagtgcaagggcaactacatcacctacaaggatggagaggtggaccaccccatcatccagcccaggtcctgggagaacagcaagtttgattttgacaacgtgctggccgccatgatggccctcttcaccgtgtccacctttgagggctggccagagctgctgtaccgcagcattgacagccacacagaggacaagggccccatctacaactacagagtggagatcagcatcttcttcatcatctacatcatcatcatcgccttcttcatgatgaacatctttgtgggcttcgtcatcgtgaccttccaggagcagggcgagcaggagtacaagaactgtgagctggacaagaaccagaggcagtgtgtggagtatgccctgaaggcccggcccctgcggcgctacatccccaagaaccagcaccagtacaaggtgtggtacgtggtgaacagcacctactttgagtacctgatgtttgtgctgatcctgctgaacaccatctgcctggccatgcagcactacggccagagctgcctcttcaagatcgccatgaacatcctgaacatgctgttcaccggcctcttcaccgtggagatgatcctgaagctgattgccttcaagcccaagggctacttcagtgacccctggaatgtgtttgacttcctgattgtcatcggcagcatcattgatgtgatcctgtctgagaccaaccactacttctgtgatgcctggaacacctttgatgccctgattgtggtgggcagcatcgtggacatcgccatcacagaggtgaacccagctgagcacacccagtgcagccccagcatgaatgctgaggagaacagccgcatcagcatcaccttcttccgcctcttccgggtgatgaggctggtgaagctgctgagcagaggagagggcatccgcaccctgctgtggaccttcatcaagagcttccaggccctgccctacgtggccctgctgattgtgatgctgttcttcatctatgctgtgattggcatgcaggtgtttgggaagatcgccctgaatgacaccacagagatcaacagaaacaacaacttccagaccttcccccaggccgtgctgctgctcttccgctgtgccaccggggaggcctggcaggacatcatgctggcctgcatgcctgggaagaagtgtgcccctgagagcgagcccagcaacagcacagaaggagagaccccctgtggcagcagctttgctgtgttctacttcatctccttctacatgctgtgtgccttcctgatcatcaacctgtttgtggccgtcatcatggacaactttgactacctgacccgggactggagcatcctgggcccccaccacctggatgagttcaagaggatctgggccgagtatgaccctgaggccaagggccgcatcaagcacctggatgtggtgaccctgctgcggcgcatccagccccccctgggctttgggaagctgtgcccccaccgggtggcctgcaagaggctggtgtccatgaacatgcccctgaacagtgatggcaccgtgatgtttaatgccaccctgtttgccctggtgaggacagccctgcgcatcaagacagagggcaacctggagcaggccaatgaggagctgcgggccatcatcaagaagatctggaagaggacctccatgaagctgctggaccaggtggtgcccccagctggagatgatgaggtgacagtgggcaagttctacgccaccttcctgatccaggagtacttcaggaagttcaagaagaggaaggagcagggcctggtgggcaagcccagccagagaaatgccctgagcctgcaggccggcctgcggaccctgcatgacatcggccctgagatccggcgggccatcagcggggacctgacagctgaggaggagctggacaaggccatgaaggaggccgtgtctgctgcctctgaagatgacatcttcagaagagctgggggcctgtttggaaaccacgtgtcctactaccagagtgatggccgcagcgccttcccccagaccttcaccacccagaggcccctgcacatcaacaaggccggcagcagccagggcgacacagagagccccagccatgagaagctggtggacagcaccttcacccccagcagctacagcagcacaggcagcaatgccaacatcaacaatgccaacaacacagccctgggccgcctgcccaggcctgctggctaccccagcacagtgtccacagtggagggccacggcccccccctgagccctgccatccgggtgcaggaggtggcctggaagctgagcagcaaccgctgccacagccgggagagccaggccgccatggccggccaggaggagaccagccaggatgagacctatgaggtgaagatgaaccacgacacagaggcctgcagcgagcccagcctgctgagcacagagatgctgagctaccaggatgatgaaaatcggcagctgaccctgcctgaggaggacaagagggacatccggcagagccccaagaggggcttcctgcggagcgccagcctgggcagaagagccagcttccacctggagtgcctgaagaggcagaaggacagaggaggagacatcagccagaagacagtgctgcccctgcacctggtgcaccaccaggccctggccgtggccggcctgagccccctgctgcagaggagccacagccctgccagcttcccccggccctttgccaccccaccagccaccccaggcagccggggctggccaccccagcctgtgcccaccctgcggctggagggcgtggagagcagcgagaagctgaacagcagcttccccagcatccactgcggctcctgggccgagaccacccctgggggcggcggcagcagcgctgccaggagagtgcggcctgtgtccctgatggtgcccagccaggccggggcccctggccggcagttccacggcagcgccagcagcctggtggaggccgtgctgatcagcgagggcctgggccagtttgcccaggaccccaagttcatcgaggtgaccacccaggagctggctgatgcctgtgacatgaccatcgaggagatggagagcgctgctgacaacatcctgtctggaggagccccccagagccccaatggagccctgctgccctttgtgaactgcagagatgctggccaggaccgggccggcggggaggaggatgctggctgtgtgcgggcccggggccggcccagcgaggaggagctgcaggacagccgggtgtatgtgagcagcctgtag

SEQ ID NO: 46904 - DNA, 6501 bp, Artificial Sequence
  derived and/or modified sequence
atggtgaacgagaacacccggatgtacatccccgaggagaaccaccaagggtcaaattacggcagcccccgtcccgctcatgccaatatgaatgccaacgctgccgcgggtctcgcacctgagcacattcccaccccaggagctgccctctcttggcaggccgctatcgacgcggccaggcaagccaagttgatgggaagcgctggcaatgccacgattagtacagtgtccagcacccaacggaagaggcagcagtacggcaagcctaagaaacaggggtccactactgcgacacgacccccaagggcacttctgtgtctaactctgaagaatccgattagacgagcctgtatcagcatagtggaatggaagcctttcgaaataatcatcctactgacaatttttgctaattgcgtcgccctggcaatctacataccatttcctgaggacgattctaacgctactaactctaacctcgagagggtcgagtatctgttcctaattatcttcactgtagaagcgttccttaaagtcatcgcctatggcctgctgttccatcctaatgcttacctgcgcaacggctggaatctcctggactttatcatcgtcgtggtggggctcttctctgctatcctcgagcaggctacaaaggccgacggggccaacgccctcggggggaagggagcaggcttcgacgtcaaggcattacgcgccttcagagttctgcgcccactccggctcgtgtccggagtgccttcactgcaggtggtcctgaattcgattattaaagccatggtcccattgctgcacattgcgctcctggtacttttcgttattatcatttacgcaatcatcggtctcgaactgtttatgggcaagatgcataaaacttgttataaccaggagggcattgctgacgtcccagcagaggacgacccgtcaccctgcgcccttgagactggccacggacgacaatgtcaaaacggaaccgtgtgcaaacccggctgggacggtcccaagcatgggataaccaactttgacaatttcgcctttgccatgctgacggttttccagtgcattactatggagggttggaccgacgtgctgtattgggtcaacgacgcagtgggccgggactggccctggatctacttcgtgacactgattatcattggatccttctttgtgcttaacctcgtgctcggcgtgctgtctggggagttttctaaggaacgagagaaggctaaggcccgcggcgacttccagaaactcagagaaaagcaacaattggaggaagacttaaaaggttaccttgattggattactcaagctgaagacattgacccggagaatgaggacgagggaatggatgaggagaaacctcggaacatgagtatgcccacctctgaaaccgagtcagtgaacacagagaatgtggcaggaggggatattgagggagaaaactgtggagcccggctcgctcacagaatcagcaaaagcaagttttcacgctattggaggcgctggaaccgcttctgcaggcgcaagtgtagggccgccgtgaagtctaatgtgttttattggttagtgatttttttggtctttctcaacacattgaccatcgctagcgaacattacaaccagcccaattggttgacagaagttcaagacaccgccaacaaagcgctcctcgccctattcaccgcagaaatgctgcttaaaatgtactctctggggcttcaggcttacttcgtcagcctgtttaacaggttcgactgctttgttgtgtgtgggggaattctggaaacaattctggtggagactaagattatgagtccattgggaatctcagtgctgaggtgcgtgcgacttctgcggatctttaagataaccagatattggaacagcctctcaaacctcgtagcatccttattaaactcagttcggtccatagcctctctgctattacttctctttctgtttattataattttctctctgctgggcatgcagctgttcgggggaaaattcaactttgatgaaatgcagacacgccggtccactttcgacaactttccccagagcctcctcacagtgtttcaaattcttaccggggaggactggaattctgtgatgtacgacggtattatggcctacgggggacctagcttcccaggtatgctggtgtgcatttatttcatcatcctttttatctgtggcaattatattctgctgaacgtattcttggccattgccgtcgacaaccttgctgacgctgaatccctcacaagcgctcagaaagaggaggaagaagagaaggaaagaaaaaaactagcgaggaccgctagtcccgagaaaaaacaagagctggttgagaagcccgccgttggggagtcgaaggaagagaaaattgagctgaaaagcatcacagcagacggggaaagcccgcctgccactaagataaatatggatgatttgcagccaaatgagaatgaggataaaagtccgtaccctaaccccgaaacaacaggtgaggaagatgaagaagagcccgagatgccagtggggcctcggcctagacctctatctgagctgcacctcaaagaaaaggctgtacctatgccagaagcctcggccttcttcattttttcctctaataacagatttagattacagtgccaccgcattgtcaacgacaccatcttcacgaacctaatacttttctttattctactctcatccattagtctcgcggcggaagatcctgtgcagcacacttcctttcgcaatcacatcttgttttattttgatatcgtgtttaccaccatctttacgatcgagatcgccttgaaaatgaccgcttacggtgcctttctccataagggaagcttttgccgcaactatttcaacatcctggatttgctggtggtgagcgtgagcctcatttcatttgggatccagtctagcgccattaatgtggtaaagattcttcgggtactgcgagtgctccggccgctgagggcaatcaacagagcgaaagggctgaaacatgtcgttcaatgcgtgtttgttgctatccgaacgattgggaacatcgtgatcgtcaccaccctcctccagtttatgtttgcttgtataggcgtccagttgtttaaaggcaagttgtatacgtgttctgactccagcaagcagacggaagctgagtgcaagggcaattatattacgtacaaagacggcgaagttgaccatcccatcattcagcccagatcatgggagaactcaaagttcgacttcgataatgtgctggccgcaatgatggccctatttaccgtgagtacattcgaggggtggccggagctactgtaccggtctattgactcccatactgaggacaaggggcccatctataactatcgcgtagaaatctcaatattcttcataatttatattatcataattgccttttttatgatgaatatcttcgtaggttttgtaatagtaacgtttcaggagcagggcgaacaagagtacaagaattgtgagttggataagaatcagcgccagtgtgttgaatacgctctcaaagcacggccgctccggaggtatatcccgaagaatcagcatcaatacaaggtgtggtatgtggtgaacagtacctactttgagtacctgatgttcgtgttgatcttactgaacactatatgcctggcgatgcaacattatggacagagctgtctttttaagattgcgatgaatatactgaatatgcttttcactgggctttttaccgtggaaatgattctcaaactcatagcgttcaagcccaaagggtacttcagcgacccctggaatgtcttcgatttcttgatcgtgataggcagcattattgatgttatcttgtctgagaccaaccactacttctgcgacgcctggaatacatttgacgcgctgattgttgttgggagcatcgtcgacatcgctataactgaagtcaaccccgccgagcatacgcagtgttcaccttctatgaacgctgaagaaaactccaggatcagcataaccttcttccggctctttcgggttatgcgattggtcaagctgcttagccgaggcgaaggcatccgaacgctactttggacatttattaaatcattccaggccctgccatatgtggccctgctgatcgtgatgctgttctttatttacgcggtgattggaatgcaggtgtttggcaaaatagccctaaatgacacaaccgaaattaacagaaataataatttccagactttcccacaggccgtactgctcctcttccgctgtgcaactggcgaggcttggcaggacattatgttggcttgtatgcccggaaagaagtgtgcccccgagtcggagccctctaactctactgagggagaaacgccatgtggtagttctttcgcagttttctacttcattagcttctacatgctctgcgccttcctcatcatcaacttgttcgtagctgtgatcatggataacttcgattacttgacacgcgactggagcatcttggggccccatcatctggacgagtttaaacggatctgggccgaatatgacccagaggcaaagggcaggatcaaacatttggatgtggttaccctgctacgccggatccagcccccactgggttttgggaaactgtgcccacatagagtcgcatgcaagcgcctggtgtcaatgaatatgcctcttaacagcgacggcaccgttatgttcaacgccaccctcttcgcactggtccgaactgcccttaggataaagaccgaaggtaacctggaacaggctaatgaagaactccgcgctatcatcaagaagatctggaagagaacctccatgaagctcttggatcaggtggtaccgccagccggggatgatgaggtcacggtgggcaagttctatgccacttttctgatccaggagtactttcgcaagttcaaaaaacgcaaagaacaaggtctcgtgggcaagccctcccagcgcaacgcactgtccctgcaggccggcctgcgcaccctgcacgatatcggaccagagatacgtcgagccatctctggcgacctgaccgctgaggaagaactggacaaggcaatgaaggaggccgtgtctgcagcctcagaggatgacattttccggcgtgccgggggactgtttggtaaccatgtgagctactaccagtccgatggccggtcagccttccctcagacctttacaacccaacgcccactgcatattaataaagctggatcttcccagggagatactgagagcccttcccatgagaagttagtggacagcacctttacaccaagttcttatagttcgactggcagcaacgccaacataaacaacgccaacaatacagcattgggcagactcccacgtccggctggatacccgtccactgtcagtacagtggaagggcatggacctccattatctccagccattcgggtgcaagaagtggcgtggaagctttctagcaaccgatgccacagccgggagtcccaggcggcaatggctggacaagaggaaacctctcaagacgagacctatgaggtgaagatgaatcacgataccgaagcttgttccgaaccctccctgctgtctacagaaatgctaagctaccaggacgacgaaaatcggcaattgacactgccagaagaagataagcgggatatccggcagagcccgaagcgcgggttcctgcgctctgcgtcgctcggccgccgcgcaagtttccatctagagtgcctgaagcggcagaaggacaggggcggggatatctcccagaagacagttctgcccctgcatttagtacatcatcaggccctggccgttgccgggctttctcccctgctgcagagatcacactctcctgccagctttccgcgcccgttcgccacccctccagccacccctggcagcaggggctggcccccccaacctgtccctaccctcagactggaaggtgtcgagtcctctgaaaagctgaactcctccttcccatctatccattgtgggagttgggccgagacaactccaggagggggtgggagttccgccgcaagaagagttcgaccagtctccctcatggttccttctcaggctggagcaccaggccggcagttccatggatctgcttctagtctggttgaagccgtcctcataagtgaaggtctgggacaatttgctcaggaccccaaattcattgaggtcacaactcaagagctcgcagacgcctgcgacatgacgattgaggaaatggagtctgcagctgacaatatcctctcaggaggcgcccctcaatcgccaaacggtgcactgctcccctttgtgaattgccgggatgcgggccaggatcgtgctgggggagaggaggacgcgggctgcgtacgagcccggggcagaccctcagaggaggagctccaggacagcagagtgtatgttagtagtctgtag

SEQ ID NO: 46905 - DNA, 6500 bp, Artificial Sequence
  derived and/or modified sequence
atggttaacgaaaacacaaggatgtacatcccggaagaaaatcatcagggctcaaactacggctcccccaggccagctcacgcaaacatgaacgccaacgccgctgccggactggcccctgaacacatccccacccccggtgccgcactcagttggcaggcggcaatcgatgctgctcgccaggccaaactgatggggtcagccggaaatgccacaatctcaactgtaagctccacgcagcggaagcgccagcagtacggaaaacctaaaaaacaaggaagcactaccgcaacccggccacctcgcgctctgttgtgtttgactctcaagaatcccattcggcgagcatgcatcagcatcgtagagtggaagcctttcgagattatcatcttgctgacaatcttcgctaattgtgtggctttggctatctatattccctttcctgaggatgactcaaatgcaacaaactctaatctggaacgcgtcgagtacctctttttaatcatcttcactgtcgaggccttccttaaagttatcgcttacggactcctgtttcacccgaatgcatatttgagaaacggatggaatctgctggacttcataatagtggtcgtgggtttgtttagcgcaatactcgagcaggccacaaaagcagacggcgctaacgccttgggcggaaagggagctggcttcgacgtgaaggcccttagggcctttcgtgtcctccgacccttgcgcctggtgtccggggtacctagcctgcaggtggtcctcaattcgatcatcaaagctatggtaccacttctgcatatcgcccttctggtgttgttcgtgattattatctacgccataattggcctcgagctctttatgggcaagatgcacaagacctgttacaatcaggagggaatcgcagatgtgccagcagaggatgacccctctccctgtgctctagagacgggccacggcaggcagtgtcaaaatgggaccgtgtgtaagcccggttgggacggacctaaacacggaattacgaacttcgataattttgcctttgctatgttaacagtgttccagtgcatcactatggagggatggactgacgtgctttactgggtgaacgatgcggtcggaagggactggccctggatctacttcgtgaccttgatcattatcgggtccttttttgtcctcaacttggtgctgggggtgctttccggcgagttctctaaggaaagagagaaagccaaggccagaggagactttcagaagcttagggagaagcagcaactggaggaggacctcaagggttacttagactggataacgcaggccgaggatatcgatcccgaaaacgaggacgaggggatggatgaggaaaaacctcggaatatgagtatgcctacaagcgaaaccgaaagtgtcaataccgagaacgtcgcagggggagatatcgagggggagaactgcggcgctcggctggcccacaggatctctaagagcaaattttcaaggtactggagacggtggaataggttttgccgacgtaaatgccgcgcagcggtgaagtcaaatgtgttttactggttggtgatcttcctggtctttttgaacaccctcacaatcgccagcgagcactacaaccagcctaattggctgacggaagttcaggatacagcgaacaaggcattgcttgctctgttcaccgccgaaatgctcctgaagatgtatagcttaggtctgcaggcttatttcgtgagcctgttcaatcgtttcgactgcttcgtggtgtgcggcggtattttagagaccatcttggttgaaaccaagatcatgtctcctctcggcatctcagtgctgagatgtgtgcgacttcttaggatttttaagattacgcgttattggaattccctctcaaacctggttgcttcactgctcaactctgtgagaagcatcgctagcttgttgttactgctcttcctgtttatcattatcttctccttgctgggaatgcagctcttcggcggtaagttcaattttgacgagatgcagaccagacggagcaccttcgacaacttcccacaaagcctcctgaccgtttttcagatcctgaccggcgaagactggaattccgtgatgtatgacggcattatggcctacggcggaccgagcttccccggaatgcttgtgtgcatctattttattatattattcatctgcgggaactatatccttctgaacgttttcctagctatcgcagtggacaacctggccgacgcagagtcgctgacttcagcccagaaggaagaggaagaggagaaggagcgaaaaaagctagctcggaccgcttcccctgagaagaagcaggaactcgtggaaaagccggctgtgggggaatcaaaggaggaaaagattgaactcaagtcaatcactgccgacggtgaatcccctccagcaacaaaaataaatatggatgacctccaaccaaacgaaaacgaagataaatcaccataccccaatccagaaactaccggtgaagaggacgaagaggaacccgagatgccggtggggccaaggccaaggccgttgtccgagctacacctgaaagaaaaggccgtccccatgcctgaggcgtcagctttctttattttctcaagcaacaatagattcagactgcagtgccatcggattgttaatgacacgattttcactaatctgattctgtttttcatactcttgagcagtataagtcttgcggcagaagatccagtacagcacacctcattcagaaatcatatcctcttttacttcgacatagttttcactacgatcttcaccattgagattgccctcaagatgacagcatatggagcttttctgcacaagggcagtttttgccgtaactattttaatattttggacctgttggtcgtatccgtctcactcatctccttcggtattcagagttcagcaattaatgttgtgaagattctgagggtacttagggtgctgaggcctctaagagctattaacagagccaaagggctgaagcatgtggtgcaatgcgttttcgttgctattaggacaattgggaacatcgtgatcgtaactacactcctgcaattcatgtttgcctgcatcggcgtacagctgttcaaggggaaattatacacctgcagtgactcttccaaacaaacagaggcagagtgcaaaggaaactatattacatacaaagatggggaagttgaccaccccattattcagcccaggtcatgggaaaactctaagttcgactttgataatgtactggccgctatgatggcgctatttacggtttccacatttgaaggatggcctgagttactctacaggtcaattgactcccacaccgaggataagggcccaatctataattaccgggtggaaatttcaatcttttttattatctacattattataatagcgttcttcatgatgaatatttttgtgggatttgttattgttacgtttcaggaacagggggaacaggaatacaaaaattgtgaactggataaaaatcaaaggcagtgtgttgagtatgccctcaaagccagacccctccggaggtacatccccaagaatcagcaccaatataaagtatggtacgtggtgaattcaacatacttcgaatacctgatgttcgttctgatcctcctgaacactatctgcctagcaatgcaacactacggccagagctgcttgtttaagattgcgatgaatatcctcaatatgctgttcaccggcctgttcaccgtcgagatgattttgaaactcatcgcttttaagcctaagggctatttcagtgatccatggaatgtgtttgatttcctgattgtgattggaagcatcatcgatgtcatcttgtccgaaaccaaccactatttctgcgatgcgtggaacacctttgatgcccttattgtcgttggcagcattgtagacatcgcgatcacagaggtgaatcctgccgaacacactcagtgcagcccgagtatgaatgcggaggagaactcccggatcagtattaccttcttccgcctgttccgagtcatgcgcctcgtaaaattattgtctcgcggagagggcattcggacactgctgtggacttttattaagtccttccaagcgctgccctatgtggcgttgctgattgtgatgctctttttcatttacgcggtgattggcatgcaggtgtttgggaaaatcgcactcaatgacacaactgaaattaaccggaataataattttcagacttttccccaggccgtcctgctgctgttcagatgtgctaccggcgaagcgtggcaggacatcatgttagcatgcatgcctgggaagaagtgcgcccctgaaagcgagccttctaactccaccgaaggggagacaccgtgtgggagctcttttgcagtcttctatttcatctctttctacatgctttgtgcctttttgatcattaacctgtttgtggccgtgatcatggacaattttgactatctcactcgggattggagcattttgggccctcaccatctggacgaattcaaaaggatctgggcagaatacgatcccgaggccaaaggcaggatcaaacacttagatgtcgtgacactcttaaggcggatccaacctcccttagggtttgggaaactgtgccctcatagggtcgcttgcaaacggctggtgagcatgaacatgcctcttaactccgacggaaccgtaatgttcaacgccacactttttgcattggtcagaacagccctgcggatcaaaaccgaaggtaacctagagcaggccaatgaagagttgcgcgctattataaaaaaaatctggaaacgaacatctatgaagctgttggaccaggtagtgcccccagcaggagatgacgaggtaacagtgggcaagttttatgccaccttcctcatacaggaatatttccggaaattcaaaaagaggaaggaacaaggactggtggggaagccatcccagcggaacgctttgtcattgcaagctggtctcagaacccttcatgatattggccctgaaattcggagggccatatccggagaccttacagccgaagaagaactggacaaggcaatgaaagaagctgttagcgccgcatctgaggatgacatcttcagaagggccggtggactgttcggcaaccacgtgtcatactatcagagcgatgggaggtctgcctttccccagacctttaccactcagaggcctctgcacattaacaaggccggatcaagtcagggcgacactgaatcgccctcccacgaaaagctggtagactccacttttaccccatcgagctactccagtactggaagtaatgcgaatatcaataatgcgaacaacactgcactgggccgattgcccaggcccgctggctatccgagtaccgtgtcaaccgtggagggccacgggccaccgttatcacccgctattcgggttcaggaagtagcctggaagcttagcagtaatcgctgtcacagtcgcgagtcccaagcagccatggcgggacaggaggagacttcccaggatgagacttatgaggtcaaaatgaatcacgatacggaggcttgcagtgaaccctcactattgtcaaccgagatgctatcgtaccaggacgacgagaatcgacagcttactttgcctgaggaggataagagggatatacgccagagcccaaaaagggggttccttaggtcggcctcgttgggtaggagggcttcttttcacttagagtgcctcaagaggcagaaagatcggggtggtgacatttcccagaaaacggtgctgcccctgcacctggttcaccaccaggcactggccgtggcaggcctatcaccattgcttcaaagatcgcattcacctgctagtttccctagaccgttcgctacccctcccgcaactcctgggagccgtggatggccccctcaaccagtgcccaccttgagactcgagggggttgaaagcagcgagaaactgaactcctccttcccatctattcattgtgggtcatgggctgagactacccctgggggtgggggttcttccgcagctcgaagagtgcgacctgtttcactaatggtgccctctcaggctggagctcccggacgccagtttcatggcagcgctagctccctggttgaagcagtgctgatctccgaaggcttgggacagttcgcacaggatcctaaattcatcgaggtaacgacccaggaactggcagacgcttgcgacatgaccatcgaagagatggaaagcgcggctgataacatcctaagcgggggagctcctcaatctcccaacggcgctttactgccatttgtgaattgccgcgacgctggccaagatcgggcaggcggtgaagaggatgcgggatgcgttcgggcacgtggcagacccagcgaggaagagctgcaggatagcagagtgtacgtgtcttcactcta

SEQ ID NO: 46906 - DNA, 6595 bp, Artificial Sequence
  derived and/or modified sequence
atggtcaatgagaatacgaggatgtacattccagaggaaaaccaccaaggttccaactatgggagcccacgccccgcccatgccaacatgaatgccaatgcggcagcggggctggcccctgagcacatccccaccccgggggctgccctgtcgtggcaggcggccatcgacgcagcccggcaggctaagctgatgggcagcgctggcaatgcgaccatctccacagtcagctccacgcagcggaagcggcagcaatatgggaaacccaagaagcagggcagcaccacggccacacgcccgccccgagccctgctctgcctgaccctgaagaaccccatccggagggcctgcatcagcattgtcgaatggaaaccatttgaaataattattttactgactatttttgccaattgtgtggccttagcgatctatattccctttccagaagatgattccaacgccaccaattccaacctggaacgagtggaatatctctttctcataatttttacggtggaagcgtttttaaaagtaatcgcctatggactcctctttcaccccaatgcctacctccgcaacggctggaacctactagattttataattgtggttgtggggctttttagtgcaattttagaacaagcaaccaaagcagatggggcaaacgctctcggagggaaaggggccggatttgatgtgaaggcgctgagggccttccgcgtgctgcgccccctgcggctggtgtccggagtcccaagtctccaggtggtcctgaattccatcatcaaggccatggtccccctgctgcacatcgccctgcttgtgctgtttgtcatcatcatctacgccatcatcggcttggagctcttcatggggaagatgcacaagacctgctacaaccaggagggcatagcagatgttccagcagaagatgacccttccccttgtgcgctggaaacgggccacgggcggcagtgccagaacggcacggtgtgcaagcccggctgggatggtcccaagcacggcatcaccaactttgacaactttgccttcgccatgctcacggtgttccagtgcatcaccatggagggctggacggacgtgctgtactgggtcaatgatgccgtaggaagggactggccctggatctattttgttacactaatcatcatagggtcattttttgtacttaacttggttctcggtgtgcttagcggagagttttccaaagagagggagaaggccaaggcccggggagatttccagaagctgcgggagaagcagcagctagaagaggatctcaaaggctacctggattggatcactcaggccgaagacatcgatcctgagaatgaggacgaaggcatggatgaggagaagccccgaaacatgagcatgcccaccagtgagaccgagtccgtcaacaccgaaaacgtggctggaggtgacatcgagggagaaaactgcggggccaggctggcccaccggatctccaagtcaaagttcagccgctactggcgccggtggaatcggttctgcagaaggaagtgccgcgccgcagtcaagtctaatgtcttctactggctggtgattttcctggtgttcctcaacacgctcaccattgcctctgagcactacaaccagcccaactggctcacagaagtccaagacacggcaaacaaggccctgctggccctgttcacggcagagatgctcctgaagatgtacagcctgggcctgcaggcctacttcgtgtccctcttcaaccgctttgactgcttcgtcgtgtgtggcggcatcctggagaccatcctggtggagaccaagatcatgtccccactgggcatctccgtgctcagatgcgtccggctgctgaggattttcaagatcacgaggtactggaactccttgagcaacctggtggcatccttgctgaactctgtgcgctccatcgcctccctgctccttctcctcttcctcttcatcatcatcttctccctcctggggatgcagctctttggaggaaagttcaactttgatgagatgcagacccggaggagcacattcgataacttcccccagtccctcctcactgtgtttcagatcctgaccggggaggactggaattcggtgatgtatgatgggatcatggcttatggcggcccctcttttccagggatgttagtctgtatttacttcatcatcctcttcatctgtggaaactatatcctactgaatgtgttcttggccattgctgtggacaacctggctgatgctgagagcctcacatctgcccaaaaggaggaggaagaggagaaggagagaaagaagctggccaggactgccagcccagagaagaaacaagagttggtggagaagccggcagtgggggaatccaaggaggagaagattgagctgaaatccatcacggctgacggagagtctccacccgccaccaagatcaacatggatgacctccagcccaatgaaaatgaggataagagcccctaccccaacccagaaactacaggagaagaggatgaggaggagccagagatgcctgtcggccctcgcccacgaccactctctgagcttcaccttaaggaaaaggcagtgcccatgccagaagccagcgcgtttttcatcttcagctctaacaacaggtttcgcctccagtgccaccgcattgtcaatgacacgatcttcaccaacctgatcctcttcttcattctgctcagcagcatttccctggctgctgaggacccggtccagcacacctccttcaggaaccatattctgttttattttgatattgtttttaccaccattttcaccattgaaattgctctgaagatgactgcttatggggctttcttgcacaagggttctttctgccggaactacttcaacatcctggacctgctggtggtcagcgtgtccctcatctcctttggcatccagtccagtgcaatcaatgtcgtgaagatcttgcgagtcctgcgagtactcaggcccctgagggccatcaacagggccaaggggctaaagcatgtggttcagtgtgtgtttgtcgccatccggaccatcgggaacatcgtgattgtcaccaccctgctgcagttcatgtttgcctgcatcggggtccagctcttcaagggaaagctgtacacctgttcagacagttccaagcagacagaggcggaatgcaagggcaactacatcacgtacaaagacggggaggttgaccaccccatcatccaaccccgcagctgggagaacagcaagtttgactttgacaatgttctggcagccatgatggccctcttcaccgtctccaccttcgaagggtggccagagctgctgtaccgctccatcgactcccacacggaagacaagggccccatctacaactaccgtgtggagatctccatcttcttcatcatctacatcatcatcatcgccttcttcatgatgaacatcttcgtgggcttcgtcatcgtcacctttcaggagcagggggagcaggagtacaagaactgtgagctggacaagaaccagcgacagtgcgtggaatacgccctcaaggcccggcccctgcggaggtacatccccaagaaccagcaccagtacaaagtgtggtacgtggtcaactccacctacttcgagtacctgatgttcgtcctcatcctgctcaacaccatctgcctggccatgcagcactacggccagagctgcctgttcaaaatcgccatgaacatcctcaacatgctcttcactggcctcttcaccgtggagatgatcctgaagctcattgccttcaaacccaagggttactttagtgatccctggaatgtttttgacttcctcatcgtaattggcagcataattgacgtcattctcagtgagactaatcactatttctgtgatgcatggaatacatttgacgccttgattgttgtgggtagcattgttgatatagcaatcaccgaggtaaacccagctgaacatacccaatgctctccctctatgaacgcagaggaaaactcccgcatctccatcaccttcttccgcctgttccgggtcatgcgtctggtgaagctgctgagccgtggggagggcatccggacgctgctgtggaccttcatcaagtccttccaggccctgccctatgtggccctcctgatcgtgatgctgttcttcatctacgcggtgatcgggatgcaggtgtttgggaaaattgccctgaatgataccacagagatcaaccggaacaacaactttcagaccttcccccaggccgtgctgctcctcttcaggtgtgccaccggggaggcctggcaggacatcatgctggcctgcatgccaggcaagaagtgtgccccagagtccgagcccagcaacagcacggagggtgaaacaccctgtggtagcagctttgctgtcttctacttcatcagcttctacatgctctgtgccttcctgatcatcaacctctttgtagctgtcatcatggacaactttgactacctgacaagggactggtccatccttggtccccaccacctggatgagtttaaaagaatctgggcagagtatgaccctgaagccaagggtcgtatcaaacacctggatgtggtgaccctcctccggcggattcagccgccactaggttttgggaagctgtgccctcaccgcgtggcttgcaaacgcctggtctccatgaacatgcctctgaacagcgacgggacagtcatgttcaatgccaccctgtttgccctggtcaggacggccctgaggatcaaaacagaagggaacctagaacaagccaatgaggagctgcgggcgatcatcaagaagatctggaagcggaccagcatgaagctgctggaccaggtggtgccccctgcaggtgatgatgaggtcaccgttggcaagttctacgccacgttcctgatccaggagtacttccggaagttcaagaagcgcaaagagcagggccttgtgggcaagccctcccagaggaacgcgctgtctctgcaggctggcttgcgcacactgcatgacatcgggcctgagatccgacgggccatctctggagatctcaccgctgaggaggagctggacaaggccatgaaggaggctgtgtccgctgcttctgaagatgacatcttcaggagggccggtggcctgttcggcaaccacgtcagctactaccaaagcgacggccggagcgccttcccccagaccttcaccactcagcgcccgctgcacatcaacaaggcgggcagcagccagggcgacactgagtcgccatcccacgagaagctggtggactccaccttcaccccgagcagctactcgtccaccggctccaacgccaacatcaacaacgccaacaacaccgccctgggtcgcctccctcgccccgccggctaccccagcacggtcagcactgtggagggccacgggccccccttgtcccctgccatccgggtgcaggaggtggcgtggaagctcagctccaacaggtgccactcccgggagagccaggcagccatggcgggtcaggaggagacgtctcaggatgagacctatgaagtgaagatgaaccatgacacggaggcctgcagtgagcccagcctgctctccacagagatgctctcctaccaggatgacgaaaatcggcaactgacgctcccagaggaggacaagagggacatccggcaatctccgaagaggggtttcctccgctctgcctcactaggtcgaagggcctccttccacctggaatgtctgaagcgacagaaggaccgagggggagacatctctcagaagacagtcctgcccttgcatctggttcatcatcaggcattggcagtggcaggcctgagccccctcctccagagaagccattcccctgcctcattccctaggccttttgccaccccaccagccacacctggcagccgaggctggcccccacagcccgtccccaccctgcggcttgagggggtcgagtccagtgagaaactcaacagcagcttcccatccatccactgcggctcctgggctgagaccacccccggtggcgggggcagcagcgccgcccggagagtccggcccgtctccctcatggtgcccagccaggctggggccccagggaggcagttccacggcagtgccagcagcctggtggaagcggtcttgatttcagaaggactggggcagtttgctcaagatcccaagttcatcgaggtcaccacccaggagctggccgacgcctgcgacatgaccatagaggagatggagagcgcggccgacaacatcctcagcgggggcgccccacagagccccaatggcgccctcttaccctttgtgaactgcagggacgcggggcaggaccgagccgggggcgaagaggacgcgggctgtgtgcgcgcgcggggtcgaccgagtgaggaggagctccaggacagcagggtctacgtcagcagcctgtagtgggcgctgccagatgcgggcttttttttatttgtttcaatgttcctaatgggttcgtttcagaagtgcctcactgttctcgtgacctggagtt

SEQ ID NO: 46907 - DNA, 6501 bp, Artificial Sequence
  derived and/or modified sequence
atggtgaacgagaacaccagaatgtacatccccgaggagaaccaccagggcagcaactacggcagccccagacccgcccacgccaacatgaacgccaacgccgccgccggcctggcccccgagcacatccccacccccggcgccgccctgagctggcaggccgccatcgacgccgccagacaggccaagctgatgggcagcgccggcaacgccaccatcagcaccgtgagcagcacccagagaaagagacagcagtacggcaagcccaagaagcagggcagcaccaccgccaccagaccccccagagccctgctgtgcctgaccctgaagaaccccatcagaagagcctgcatcagcatcgtggagtggaagcccttcgagatcatcatcctgctgaccatcttcgccaactgcgtggccctggccatctacatccccttccccgaggacgacagcaacgccaccaacagcaacctggagagagtggagtacctgttcctgatcatcttcaccgtggaggccttcctgaaggtgatcgcctacggcctgctgttccaccccaacgcctacctgagaaacggctggaacctgctggacttcatcatcgtggtggtgggcctgttcagcgccatcctggagcaggccaccaaggccgacggcgccaacgccctgggcggcaagggcgccggcttcgacgtgaaggccctgagagccttcagagtgctgagacccctgagactggtgagcggcgtgcccagcctgcaggtggtgctgaacagcatcatcaaggccatggtgcccctgctgcacatcgccctgctggtgctgttcgtgatcatcatctacgccatcatcggcctggagctgttcatgggcaagatgcacaagacctgctacaaccaggagggcatcgccgacgtgcccgccgaggacgaccccagcccctgcgccctggagaccggccacggcagacagtgccagaacggcaccgtgtgcaagcccggctgggacggccccaagcacggcatcaccaacttcgacaacttcgccttcgccatgctgaccgtgttccagtgcatcaccatggagggctggaccgacgtgctgtactgggtgaacgacgccgtgggcagagactggccctggatctacttcgtgaccctgatcatcatcggcagcttcttcgtgctgaacctggtgctgggcgtgctgagcggcgagttcagcaaggagagagagaaggccaaggccagaggcgacttccagaagctgagagagaagcagcagctggaggaggacctgaagggctacctggactggatcacccaggccgaggacatcgaccccgagaacgaggacgagggcatggacgaggagaagcccagaaacatgagcatgcccaccagcgagaccgagagcgtgaacaccgagaacgtggccggcggcgacatcgagggcgagaactgcggcgccagactggcccacagaatcagcaagagcaagttcagcagatactggagaagatggaacagattctgcagaagaaagtgcagagccgccgtgaagagcaacgtgttctactggctggtgatcttcctggtgttcctgaacaccctgaccatcgccagcgagcactacaaccagcccaactggctgaccgaggtgcaggacaccgccaacaaggccctgctggccctgttcaccgccgagatgctgctgaagatgtacagcctgggcctgcaggcctacttcgtgagcctgttcaacagattcgactgcttcgtggtgtgcggcggcatcctggagaccatcctggtggagaccaagatcatgagccccctgggcatcagcgtgctgagatgcgtgagactgctgagaatcttcaagatcaccagatactggaacagcctgagcaacctggtggccagcctgctgaacagcgtgagaagcatcgccagcctgctgctgctgctgttcctgttcatcatcatcttcagcctgctgggcatgcagctgttcggcggcaagttcaacttcgacgagatgcagaccagaagaagcaccttcgacaacttcccccagagcctgctgaccgtgttccagatcctgaccggcgaggactggaacagcgtgatgtacgacggcatcatggcctacggcggccccagcttccccggcatgctggtgtgcatctacttcatcatcctgttcatctgcggcaactacatcctgctgaacgtgttcctggccatcgccgtggacaacctggccgacgccgagagcctgaccagcgcccagaaggaggaggaggaggagaaggagagaaagaagctggccagaaccgccagccccgagaagaagcaggagctggtggagaagcccgccgtgggcgagagcaaggaggagaagatcgagctgaagagcatcaccgccgacggcgagagcccccccgccaccaagatcaacatggacgacctgcagcccaacgagaacgaggacaagagcccctaccccaaccccgagaccaccggcgaggaggacgaggaggagcccgagatgcccgtgggccccagacccagacccctgagcgagctgcacctgaaggagaaggccgtgcccatgcccgaggccagcgccttcttcatcttcagcagcaacaacagattcagactgcagtgccacagaatcgtgaacgacaccatcttcaccaacctgatcctgttcttcatcctgctgagcagcatcagcctggccgccgaggaccccgtgcagcacaccagcttcagaaaccacatcctgttctacttcgacatcgtgttcaccaccatcttcaccatcgagatcgccctgaagatgaccgcctacggcgccttcctgcacaagggcagcttctgcagaaactacttcaacatcctggacctgctggtggtgagcgtgagcctgatcagcttcggcatccagagcagcgccatcaacgtggtgaagatcctgagagtgctgagagtgctgagacccctgagagccatcaacagagccaagggcctgaagcacgtggtgcagtgcgtgttcgtggccatcagaaccatcggcaacatcgtgatcgtgaccaccctgctgcagttcatgttcgcctgcatcggcgtgcagctgttcaagggcaagctgtacacctgcagcgacagcagcaagcagaccgaggccgagtgcaagggcaactacatcacctacaaggacggcgaggtggaccaccccatcatccagcccagaagctgggagaacagcaagttcgacttcgacaacgtgctggccgccatgatggccctgttcaccgtgagcaccttcgagggctggcccgagctgctgtacagaagcatcgacagccacaccgaggacaagggccccatctacaactacagagtggagatcagcatcttcttcatcatctacatcatcatcatcgccttcttcatgatgaacatcttcgtgggcttcgtgatcgtgaccttccaggagcagggcgagcaggagtacaagaactgcgagctggacaagaaccagagacagtgcgtggagtacgccctgaaggccagacccctgagaagatacatccccaagaaccagcaccagtacaaggtgtggtacgtggtgaacagcacctacttcgagtacctgatgttcgtgctgatcctgctgaacaccatctgcctggccatgcagcactacggccagagctgcctgttcaagatcgccatgaacatcctgaacatgctgttcaccggcctgttcaccgtggagatgatcctgaagctgatcgccttcaagcccaagggctacttcagcgacccctggaacgtgttcgacttcctgatcgtgatcggcagcatcatcgacgtgatcctgagcgagaccaaccactacttctgcgacgcctggaacaccttcgacgccctgatcgtggtgggcagcatcgtggacatcgccatcaccgaggtgaaccccgccgagcacacccagtgcagccccagcatgaacgccgaggagaacagcagaatcagcatcaccttcttcagactgttcagagtgatgagactggtgaagctgctgagcagaggcgagggcatcagaaccctgctgtggaccttcatcaagagcttccaggccctgccctacgtggccctgctgatcgtgatgctgttcttcatctacgccgtgatcggcatgcaggtgttcggcaagatcgccctgaacgacaccaccgagatcaacagaaacaacaacttccagaccttcccccaggccgtgctgctgctgttcagatgcgccaccggcgaggcctggcaggacatcatgctggcctgcatgcccggcaagaagtgcgcccccgagagcgagcccagcaacagcaccgagggcgagaccccctgcggcagcagcttcgccgtgttctacttcatcagcttctacatgctgtgcgccttcctgatcatcaacctgttcgtggccgtgatcatggacaacttcgactacctgaccagagactggagcatcctgggcccccaccacctggacgagttcaagagaatctgggccgagtacgaccccgaggccaagggcagaatcaagcacctggacgtggtgaccctgctgagaagaatccagccccccctgggcttcggcaagctgtgcccccacagagtggcctgcaagagactggtgagcatgaacatgcccctgaacagcgacggcaccgtgatgttcaacgccaccctgttcgccctggtgagaaccgccctgagaatcaagaccgagggcaacctggagcaggccaacgaggagctgagagccatcatcaagaagatctggaagagaaccagcatgaagctgctggaccaggtggtgccccccgccggcgacgacgaggtgaccgtgggcaagttctacgccaccttcctgatccaggagtacttcagaaagttcaagaagagaaaggagcagggcctggtgggcaagcccagccagagaaacgccctgagcctgcaggccggcctgagaaccctgcacgacatcggccccgagatcagaagagccatcagcggcgacctgaccgccgaggaggagctggacaaggccatgaaggaggccgtgagcgccgccagcgaggacgacatcttcagaagagccggcggcctgttcggcaaccacgtgagctactaccagagcgacggcagaagcgccttcccccagaccttcaccacccagagacccctgcacatcaacaaggccggcagcagccagggcgacaccgagagccccagccacgagaagctggtggacagcaccttcacccccagcagctacagcagcaccggcagcaacgccaacatcaacaacgccaacaacaccgccctgggcagactgcccagacccgccggctaccccagcaccgtgagcaccgtggagggccacggcccccccctgagccccgccatcagagtgcaggaggtggcctggaagctgagcagcaacagatgccacagcagagagagccaggccgccatggccggccaggaggagaccagccaggacgagacctacgaggtgaagatgaaccacgacaccgaggcctgcagcgagcccagcctgctgagcaccgagatgctgagctaccaggacgacgagaacagacagctgaccctgcccgaggaggacaagagagacatcagacagagccccaagagaggcttcctgagaagcgccagcctgggcagaagagccagcttccacctggagtgcctgaagagacagaaggacagaggcggcgacatcagccagaagaccgtgctgcccctgcacctggtgcaccaccaggccctggccgtggccggcctgagccccctgctgcagagaagccacagccccgccagcttccccagacccttcgccaccccccccgccacccccggcagcagaggctggcccccccagcccgtgcccaccctgagactggagggcgtggagagcagcgagaagctgaacagcagcttccccagcatccactgcggcagctgggccgagaccacccccggcggcggcggcagcagcgccgccagaagagtgagacccgtgagcctgatggtgcccagccaggccggcgcccccggcagacagttccacggcagcgccagcagcctggtggaggccgtgctgatcagcgagggcctgggccagttcgcccaggaccccaagttcatcgaggtgaccacccaggagctggccgacgcctgcgacatgaccatcgaggagatggagagcgccgccgacaacatcctgagcggcggcgccccccagagccccaacggcgccctgctgcccttcgtgaactgcagagacgccggccaggacagagccggcggcgaggaggacgccggctgcgtgagagccagaggcagacccagcgaggaggagctgcaggacagcagagtgtacgtgagcagcctgtag

SEQ ID NO: 46908 - protein, 2158 aa, Artificial Sequence
  derived and/or modified sequence
MVNENTRMYIPEENHQGSNYGSPRPAHANMNANAAAGLAPEHIPTPGAALSWQAAIDAARQAKLMGSAGNATISTVSSTQRKRQQYGKPKKQGSTTATRPPRALLCLTLKNPIRRACISIVEWKPFEIIILLTIFANCVALAIYIPFPEDDSNATNSNLERVEYLFLIIFTVEAFLKVIAYGLLFHPNAYLRNGWNLLDFIIVVVGLFSAILEQATKADGANALGGKGAGFDVKALRAFRVLRPLRLVSGVPSLQVVLNSIIKAMVPLLHIALLVLFVIIIYAIIGLELFMGKMHKTCYNQEGIADVPAEDDPSPCALETGHGRQCQNGTVCKPGWDGPKHGITNFDNFAFAMLTVFQCITMEGWTDVLYWVNDAVGRDWPWIYFVTLIIIGSFFVLNLVLGVLSGEFSKEREKAKARGDFQKLREKQQLEEDLKGYLDWITQAEDIDPENEDEGMDEEKPRNMSMPTSETESVNTENVAGGDIEGENCGARLAHRISKSKFSRYWRRWNRFCRRKCRAAVKSNVFYWLVIFLVFLNTLTIASEHYNQPNWLTEVQDTANKALLALFTAEMLLKMYSLGLQAYFVSLFNRFDCFVVCGGILETILVETKIMSPLGISVLRCVRLLRIFKITRYWNSLSNLVASLLNSVRSIASLLLLLFLFIIIFSLLGMQLFGGKFNFDEMQTRRSTFDNFPQSLLTVFQILTGEDWNSVMYDGIMAYGGPSFPGMLVCIYFIILFICGNYILLNVFLAIAVDNLADAESLTSAQKEEEEEKERKKLARTASPEKKQELVEKPAVGESKEEKIELKSITADGESPPATKINMDDLQPNENEDKSPYPNPETTGEEDEEEPEMPVGPRPRPLSELHLKEKAVPMPEASAFFIFSSNNRFRLQCHRIVNDTIFTNLILFFILLSSISLAAEDPVQHTSFRNHILFYFDIVFTTIFTIEIALKILGNADYVFTSIFTLEIILKMTAYGAFLHKGSFCRNYFNILDLLVVSVSLISFGIQSSAINVVKILRVLRVLRPLRAINRAKGLKHVVQCVFVAIRTIGNIVIVTTLLQFMFACIGVQLFKGKLYTCSDSSKQTEAECKGNYITYKDGEVDHPIIQPRSWENSKFDFDNVLAAMMALFTVSTFEGWPELLYRSIDSHTEDKGPIYNYRVEISIFFIIYIIIIAFFMMNIFVGFVIVTFQEQGEQEYKNCELDKNQRQCVEYALKARPLRRYIPKNQHQYKVWYVVNSTYFEYLMFVLILLNTICLAMQHYGQSCLFKIAMNILNMLFTGLFTVEMILKLIAFKPKHYFCDAWNTFDALIVVGSIVDIAITEVNPAEHTQCSPSMNAEENSRISITFFRLFRVMRLVKLLSRGEGIRTLLWTFIKSFQALPYVALLIVMLFFIYAVIGMQVFGKIALNDTTEINRNNNFQTFPQAVLLLFRCATGEAWQDIMLACMPGKKCAPESEPSNSTEGETPCGSSFAVFYFISFYMLCAFLIINLFVAVIMDNFDYLTRDWSILGPHHLDEFKRIWAEYDPEAKGRIKHLDVVTLLRRIQPPLGFGKLCPHRVACKRLVSMNMPLNSDGTVMFNATLFALVRTALRIKTEGNLEQANEELRAIIKKIWKRTSMKLLDQVVPPAGDDEVTVGKFYATFLIQEYFRKFKKRKEQGLVGKPSQRNALSLQAGLRTLHDIGPEIRRAISGDLTAEEELDKAMKEAVSAASEDDIFRRAGGLFGNHVSYYQSDGRSAFPQTFTTQRPLHINKAGSSQGDTESPSHEKLVDSTFTPSSYSSTGSNANINNANNTALGRLPRPAGYPSTVSTVEGHGPPLSPAIRVQEVAWKLSSNRCHSRESQAAMAGQEETSQDETYEVKMNHDTEACSEPSLLSTEMLSYQDDENRQLTLPEEDKRDIRQSPKRGFLRSASLGRRASFHLECLKRQKDRGGDISQKTVLPLHLVHHQALAVAGLSPLLQRSHSPASFPRPFATPPATPGSRGWPPQPVPTLRLEGVESSEKLNSSFPSIHCGSWAETTPGGGGSSAARRVRPVSLMVPSQAGAPGRQFHGSASSLVEAVLISEGLGQFAQDPKFIEVTTQELADACDMTIEEMESAADNILSGGAPQSPNGALLPFVNCRDAGQDRAGGEEDAGCVRARGRPSEEELQDSRVYVSSL

SEQ ID NO: 46909 - DNA, 13540 bp, Artificial Sequence
  derived and/or modified sequence
ttattttttcaaatggtgtagccgccggaggtgcggtgctcagttcttggaaggggcccggatgtactgaggatgcgttacagtttcactcgaggaggcagtagtggaaaggagcagtttttggggtttgatgccataatgggaatcaggtaatcgtcggcggggaagaagaaacgctgcagaccacggcttcctcgaatcttgcgcgaaagccgccggcctcggaggagggattaatccagacccgccggggggtgttttcacatttcttcctcttcgtggctgctcctcctattaaaaccatttttggtccatggtcaatgagaatacgaggatgtacattccagaggaaaaccaccaaggttccaactatgggagcccacgccccgcccatgccaacatgaatgccaatgcggcagcggggctggcccctgagcacatccccaccccgggggctgccctgtcgtggcaggcggccatcgacgcagcccggcaggctaagctgatgggcagcgctggcaatgcgaccatctccacagtcagctccacgcagcggaagcggcagcaatatgggaaacccaagaagcagggcagcaccacggccacacgcccgccccgagccctgctctgcctgaccctgaagaaccccatccggagggcctgcatcagcattgtcgaatggaaaccatttgaaataattattttactgactatttttgccaattgtgtggccttagcgatctatattccctttccagaagatgattccaacgccaccaattccaacctggaacgagtggaatatctctttctcataatttttacggtggaagcgtttttaaaagtaatcgcctatggactcctctttcaccccaatgcctacctccgcaacggctggaacctactagattttataattgtggttgtggggctttttagtgcaattttagaacaagcaaccaaagcagatggggcaaacgctctcggagggaaaggggccggatttgatgtgaaggcgctgagggccttccgcgtgctgcgccccctgcggctggtgtccggagtcccaagtctccaggtggtcctgaattccatcatcaaggccatggtccccctgctgcacatcgccctgcttgtgctgtttgtcatcatcatctacgccatcatcggcttggagctcttcatggggaagatgcacaagacctgctacaaccaggagggcatagcagatgttccagcagaagatgacccttccccttgtgcgctggaaacgggccacgggcggcagtgccagaacggcacggtgtgcaagcccggctgggatggtcccaagcacggcatcaccaactttgacaactttgccttcgccatgctcacggtgttccagtgcatcaccatggagggctggacggacgtgctgtactgggtcaatgatgccgtaggaagggactggccctggatctattttgttacactaatcatcatagggtcattttttgtacttaacttggttctcggtgtgcttagcggagagttttccaaagagagggagaaggccaaggcccggggagatttccagaagctgcgggagaagcagcagctagaagaggatctcaaaggctacctggattggatcactcaggccgaagacatcgatcctgagaatgaggacgaaggcatggatgaggagaagccccgaaacatgagcatgcccaccagtgagaccgagtccgtcaacaccgaaaacgtggctggaggtgacatcgagggagaaaactgcggggccaggctggcccaccggatctccaagtcaaagttcagccgctactggcgccggtggaatcggttctgcagaaggaagtgccgcgccgcagtcaagtctaatgtcttctactggctggtgattttcctggtgttcctcaacacgctcaccattgcctctgagcactacaaccagcccaactggctcacagaagtccaagacacggcaaacaaggccctgctggccctgttcacggcagagatgctcctgaagatgtacagcctgggcctgcaggcctacttcgtgtccctcttcaaccgctttgactgcttcgtcgtgtgtggcggcatcctggagaccatcctggtggagaccaagatcatgtccccactgggcatctccgtgctcagatgcgtccggctgctgaggattttcaagatcacgaggtactggaactccttgagcaacctggtggcatccttgctgaactctgtgcgctccatcgcctccctgctccttctcctcttcctcttcatcatcatcttctccctcctggggatgcagctctttggaggaaagttcaactttgatgagatgcagacccggaggagcacattcgataacttcccccagtccctcctcactgtgtttcagatcctgaccggggaggactggaattcggtgatgtatgatgggatcatggcttatggcggcccctcttttccagggatgttagtctgtatttacttcatcatcctcttcatctgtggaaactatatcctactgaatgtgttcttggccattgctgtggacaacctggctgatgctgagagcctcacatctgcccaaaaggaggaggaagaggagaaggagagaaagaagctggccaggactgccagcccagagaagaaacaagagttggtggagaagccggcagtgggggaatccaaggaggagaagattgagctgaaatccatcacggctgacggagagtctccacccgccaccaagatcaacatggatgacctccagcccaatgaaaatgaggataagagcccctaccccaacccagaaactacaggagaagaggatgaggaggagccagagatgcctgtcggccctcgcccacgaccactctctgagcttcaccttaaggaaaaggcagtgcccatgccagaagccagcgcgtttttcatcttcagctctaacaacaggtttcgcctccagtgccaccgcattgtcaatgacacgatcttcaccaacctgatcctcttcttcattctgctcagcagcatttccctggctgctgaggacccggtccagcacacctccttcaggaaccatattctgttttattttgatattgtttttaccaccattttcaccattgaaattgctctgaagatcctaggcaatgcagactatgtcttcactagtatctttacattagaaattatccttaagatgactgcttatggggctttcttgcacaagggttctttctgccggaactacttcaacatcctggacctgctggtggtcagcgtgtccctcatctcctttggcatccagtccagtgcaatcaatgtcgtgaagatcttgcgagtcctgcgagtactcaggcccctgagggccatcaacagggccaaggggctaaagcatgtggttcagtgtgtgtttgtcgccatccggaccatcgggaacatcgtgattgtcaccaccctgctgcagttcatgtttgcctgcatcggggtccagctcttcaagggaaagctgtacacctgttcagacagttccaagcagacagaggcggaatgcaagggcaactacatcacgtacaaagacggggaggttgaccaccccatcatccaaccccgcagctgggagaacagcaagtttgactttgacaatgttctggcagccatgatggccctcttcaccgtctccaccttcgaagggtggccagagctgctgtaccgctccatcgactcccacacggaagacaagggccccatctacaactaccgtgtggagatctccatcttcttcatcatctacatcatcatcatcgccttcttcatgatgaacatcttcgtgggcttcgtcatcgtcacctttcaggagcagggggagcaggagtacaagaactgtgagctggacaagaaccagcgacagtgcgtggaatacgccctcaaggcccggcccctgcggaggtacatccccaagaaccagcaccagtacaaagtgtggtacgtggtcaactccacctacttcgagtacctgatgttcgtcctcatcctgctcaacaccatctgcctggccatgcagcactacggccagagctgcctgttcaaaatcgccatgaacatcctcaacatgctcttcactggcctcttcaccgtggagatgatcctgaagctcattgccttcaaacccaagcactatttctgtgatgcatggaatacatttgacgccttgattgttgtgggtagcattgttgatatagcaatcaccgaggtaaacccagctgaacatacccaatgctctccctctatgaacgcagaggaaaactcccgcatctccatcaccttcttccgcctgttccgggtcatgcgtctggtgaagctgctgagccgtggggagggcatccggacgctgctgtggaccttcatcaagtccttccaggccctgccctatgtggccctcctgatcgtgatgctgttcttcatctacgcggtgatcgggatgcaggtgtttgggaaaattgccctgaatgataccacagagatcaaccggaacaacaactttcagaccttcccccaggccgtgctgctcctcttcaggtgtgccaccggggaggcctggcaggacatcatgctggcctgcatgccaggcaagaagtgtgccccagagtccgagcccagcaacagcacggagggtgaaacaccctgtggtagcagctttgctgtcttctacttcatcagcttctacatgctctgtgccttcctgatcatcaacctctttgtagctgtcatcatggacaactttgactacctgacaagggactggtccatccttggtccccaccacctggatgagtttaaaagaatctgggcagagtatgaccctgaagccaagggtcgtatcaaacacctggatgtggtgaccctcctccggcggattcagccgccactaggttttgggaagctgtgccctcaccgcgtggcttgcaaacgcctggtctccatgaacatgcctctgaacagcgacgggacagtcatgttcaatgccaccctgtttgccctggtcaggacggccctgaggatcaaaacagaagggaacctagaacaagccaatgaggagctgcgggcgatcatcaagaagatctggaagcggaccagcatgaagctgctggaccaggtggtgccccctgcaggtgatgatgaggtcaccgttggcaagttctacgccacgttcctgatccaggagtacttccggaagttcaagaagcgcaaagagcagggccttgtgggcaagccctcccagaggaacgcgctgtctctgcaggctggcttgcgcacactgcatgacatcgggcctgagatccgacgggccatctctggagatctcaccgctgaggaggagctggacaaggccatgaaggaggctgtgtccgctgcttctgaagatgacatcttcaggagggccggtggcctgttcggcaaccacgtcagctactaccaaagcgacggccggagcgccttcccccagaccttcaccactcagcgcccgctgcacatcaacaaggcgggcagcagccagggcgacactgagtcgccatcccacgagaagctggtggactccaccttcaccccgagcagctactcgtccaccggctccaacgccaacatcaacaacgccaacaacaccgccctgggtcgcctccctcgccccgccggctaccccagcacggtcagcactgtggagggccacgggccccccttgtcccctgccatccgggtgcaggaggtggcgtggaagctcagctccaacaggtgccactcccgggagagccaggcagccatggcgggtcaggaggagacgtctcaggatgagacctatgaagtgaagatgaaccatgacacggaggcctgcagtgagcccagcctgctctccacagagatgctctcctaccaggatgacgaaaatcggcaactgacgctcccagaggaggacaagagggacatccggcaatctccgaagaggggtttcctccgctctgcctcactaggtcgaagggcctccttccacctggaatgtctgaagcgacagaaggaccgagggggagacatctctcagaagacagtcctgcccttgcatctggttcatcatcaggcattggcagtggcaggcctgagccccctcctccagagaagccattcccctgcctcattccctaggccttttgccaccccaccagccacacctggcagccgaggctggcccccacagcccgtccccaccctgcggcttgagggggtcgagtccagtgagaaactcaacagcagcttcccatccatccactgcggctcctgggctgagaccacccccggtggcgggggcagcagcgccgcccggagagtccggcccgtctccctcatggtgcccagccaggctggggccccagggaggcagttccacggcagtgccagcagcctggtggaagcggtcttgatttcagaaggactggggcagtttgctcaagatcccaagttcatcgaggtcaccacccaggagctggccgacgcctgcgacatgaccatagaggagatggagagcgcggccgacaacatcctcagcgggggcgccccacagagccccaatggcgccctcttaccctttgtgaactgcagggacgcggggcaggaccgagccgggggcgaagaggacgcgggctgtgtgcgcgcgcggggtcgaccgagtgaggaggagctccaggacagcagggtctacgtcagcagcctgtagtgggcgctgccagatgcgggcttttttttatttgtttcaatgttcctaatgggttcgtttcagaagtgcctcactgttctcgtgacctggagttaaccggaacagcgtcttcattcatttctgttgggaccagacgcggagcctgggtgcgcgagccgccctccgggaggaaggcgcccggctgcgtctgcagaggcggggagaggaggcggcgagggtcccggggcgcgaggaaggcgcctgccctctcccagctcgcaggccccgggcccggccgcgcctccgcggggagagcaccccggcttcccgcgcgccctcaccaaaaggaccctacagcaaacgggtgtctttcgactctgcttgtagaaaccatttgcacatattctgtacgagcctcgctgtctccctagagccagggccctgcggatttggagaagggagcggggcaggacttccaggaggaccccaacccggcccggagagggaggaggaggcctccaggggcgcggagctctggggatgggcgtcgggccggcagtggtgcggctcactccgtccctgcccacctgcgacgggatcccccgaccggcacgggccacgccgagctcccggccagccgccggcccgcaggcagcgcgagggaggagctgcgccgccggctccgcccaaccaggtggtgctgagcttccgctgagcgctcttttgttttgtggtttgacacttttcttgacagcatgttgcagtttcttttcggttttggttttttttaaatgttttattttgctttcccagcgggaggggaggaagaagagtgtttacaaagtcctgtagccccctcacctttctgttttcacttttgccaatgtacatcgggtttggttttcttgtattatttaaacggttgtggtttcctttttccacggaggttcaatagaagccgctgcaggagagttttaccaaccattgtgtatgcccaataatttgttatcatttccttaggtagtaacctatttttgttctggtttggttcggttatctaatggaaaggtaactggcaatgcacttgatgtggtcttgcacatgtgggtgatagagttgggttcctttttatgctgggtgtacaggtgggtttgggagagaggagcatgcgcgagagagtctccgagtgtgtgcgacgcgtgtgtgtgtggtgggttgtctgtgtgcatatgtcctgcccgtgtatatgcacccacaccatgtgcccgtgcacaccagtgactacgcagtcccccctttctggtttagctgtgggaagatctgaatctggggccgtttgaaagcaaaaacaaaccactgtctctgcttctgaaacgggaatcagtaactctttgcattttctgtcccacaagatatgcaaaaacaatgcaataatattcatttaaaaatacaattgtgagttgtgttggcattaaaactgtattttaaaaaaagacagaaatttaagggaaaaacacaagaaggcattttgcttcaatatattccgtgtaatgttttattgcattgataatgtttctgttgaagaaaccgttatacttgaattcaggtcagtttcagtatttttcaaatatttttttaaaactgaattgcaattgtgccaagcgaatataatgaattgaattaagttggttttcggattcacttcttgtatattttgctgcatgtaaagtaaatcattttgtatttggagtgtgacaagctttacctttgaactcaagtgcttttctatatgtggttgggggaaagggaacaagttttctttagtttgcacaatgagcaaaggtatcaccagtgtagtcattattctgctctccacaaacaggtttggacattactgttttgcatatcttgtgtttgcttacatttccctcaatttttccaaaatcgtttgctgggtatgtttgtaccgcctcttgctgtgagagaccaggacctattttattccagtcttcactctgtccactctgctctggtcatctgatttggtacttctccaagaacagcccttcactgtgaggtgcagggaggcgttctgatgagccctcagtcactgggccgtcatccgcatcccccatggaagaggtagctggctttcccttcccttccaccacacggaattttctctttggcttccttaggaaagtgtacactaaccgggaggataaaattaaagtcaggctgcttggagggaggggcatcctcacttccggattcttgttgctctacccaacaaggacagcaggggctcgagaaaggaactggtgaaaccctgatccatctgaaagtcaactctgcgtgctcctttctccatcccttcctcactctggagcagcctttccttcaggcttgccctaatgtttgggctgccggggagggggccaggacaagggaagaggcatccggagctcacagtgggggtgggaacagatttttgtgggggcatctctaatgctcacttatatctccctagaacatcactcttttggtgctgtgtccttcaaatgtatgtcaacagtggtggctgaaaagggactgctttggggaaaacaggacccaaccattcacccagaattgacccattaaatctcttccagtcctagtgttccctgagcccctcttggcacatatataagtaagctagaaattacaataagggacagtccattcctctatgacagcttgctggactgattcatgacaaagtggagaaatgtactcaatactccccggttaacacagtctagaaacagagtttctttatggatatccacacccaagtcatccaaactttcttgattccttttcactgccatcaaggtcctctagaaattgagtttaggtatcatcctttgaaaagttcccaagatttctaccaggaggtacacacaggcgttccctgtctagggcaggaggactatcctagcttgaccttctgatccactagaataagactggcgtatgatgcctgtcatcagaacagactggcacaagtagtgacatcaatgaaccacagcacaatcttccaagtgatgtctactctccacctaaaatggaattttccccatgaccttgtaaaacataattgtcacatcttccatacccctcctgacagcccccaagtgtcaggagaaaacagtcaggggctaagggcccaagggacttgaagaaacaacagtttaaggtctgcagtttggtcaacttaattcttgtcctccgaccagccctgcctctttcatttccagaccttggagaatttttcccagctttgattcagaaggtactagttataacccctttccttcttcttaatccaataggcctcactctcactgggaaatccactcaaaggaacaaggcaatgtctctcattctatttcccagttccaaattccaggtgcttgtctggagtgaagctacccgttactttctcccagcttttctccacccagcatgtctcctgcccatgcagctgaagacagtggggcaacctcaggagaagcagacctttccatgcccaagttcatctcctgagcaacagtgacacctagaaaatgaggactttggaagtcacccaaaagatggtggctactttatggagtcctgaagatacacagccaccactcctaaaggcaaagaaagaaaacacgaatgtaggtcagggatagagtggaaccctggtcatcggggtttttagcctcatcgtgggaaaggtggtaaaggaggatgatggcatctccatccctagaggccaagaattgaaatatcattgtcaaggattagaaacaattcagcaaagaggccacaaaaagggcctgctgactcccagaagacctctttaaaccccaggggaggcaaatacttgctgatggagtctgggccgtttccatattttaaagaagacctgcctctggggcaaatgtcagcacagagaggactgggaggagaatggaggcaagaaaagggcatattttgactccctctgtgcctcttcccagttcatggaaggatgtgttcagcttacccacccacagtgaccagtgtggtggagccgctgacatctcaaggatctatttgggaaggtgagaagagtactcattccatctgggggtgttgttccagccacatcagcctacctggtgggatgtgggggtgtctgccaccctgtcccccctctgctgatgtccctcccctcaggctgtccaggtgccacctgacacaggctgctgtgcaaagacaggcggggaagcccaaacctcactcccagggaggccctcagccgccagagtccaggttctccagaggctacgatttgaggaggttgagggggaagacaggagggaaagaaaagtcctacaactgtcaggaatggggcacctttccctgtccctaagcaaagctccctcttcccactgccctccccagccccagctccctgtcctccccaacacctagtgagaaagacggtgcgtggaagggagtcccatgggcagatgcttacacgacctctttgtgaagcctcttctgggtttaacttcattcatcaatttattcttatgtcaaagcaatgaaacttttctttctggagccagataccaatacaacaggtgaacgggtttctgccacatctctacattgacgggggatgcttgaacaacccccctcactacacagacacacaccgttaaggcacaagggctggggttgagctctagatgagggactttcctgctcctgcaagggtgagcactgtatacacagacaaggagggtgcagtagagtgactcccttggatggaagtagtaccatcagaacctactattattatgacataaattctatttacatacattgagagaatactacaatcaacactttttcctgggatgactttaagaggtttgagccacagcacctgaagtggcaaagatccatggtctttgtagggtattagagaactcttccagtcacctctgaaagcactctagatcttgcagctgagtggatgaagtgtaacaaatctgttgcacgctgagaggagtcagaattagcatttttcatgaaagttccccacgtctctactaagaatgaggaagaaaagactaagactaggtaattacacagaggcttgaaatgttacatcaccagagccaagtcctctcccttcagatcagttactggctgctacacagggacacccccaccttttcagggcatcccatgcactccacttctcaggatctaaggaatttgactttgtagggatcccagaaagggcactgtgccacttcccctggtgtgaatcagacatacattgtacattcatttctaaaattcactcatgcacctcaaaccaaggtcattatccaaaaaaaaaaaaaaaaagctctgggtggaagagtttgtaagttttaagagagggtcatttctatgtgaggaaatgcagaaatggacagaatgattcttattcactgtttgggtctggagaattcccattgtggaaatcttagagatctcaagtttattaccaagggaataaggaaaaaaaggtgagcaggcaccaggccaagcagtggctcccttgccaaggaacctgaggctgcaggtttcagggacccccttgaagaaacctctcctggccattggccaggagaaaagagaagtctctcctgtagagtcacaagagaagcaaaagagggtgggtcactgggtcctggacatagcccccaaccccaagacttcccaatatggagaaactacaccaatgtttaaaaggggaaaaggaaagaacttgtacatcaagggaagatgatttgtaaacacacagtcctgtgcagaaagatccccttcaggaggtgtctccagcatcccaaagctgtgcgcaccttctcttttcctgcctcaggccacctatgcatccagctgcagcccatacccacacctgaaatccatctcttgaatcccagccaggttatataccaccccattgccatgtcctgtcctggccagaatgcatgctgttcccccaagcctcgtgggagtgaggccatgggaaacagagatgagcatgtctggacaagtctgtgatggtagtggatgagaataacccatggcaaaacacgcacattcattaagaaatagggcgacagattccccgttggtgaagcactgaaaggtctattactctcataatattgctgttttattttaatccaccagagctaccatgcaaaactttcctcctgtgaaacgctccagataaagctcctctaatctccccttccctcatgtcctccagctcaaacccaccttcatcccccaaaccaatctgtatcatgcctgttatcagagaggcacagaaagatgggcagtgcctccgttgtcaccattccccacacccctacacacccccacaccctcccctccaggctccacgacttcacagtcttactgttgtaaatatcattgtacagtttgtaatcctcaaataatcccattgtcagaggcctcgcctgatgggccttctcaccctcgagaaaggccagggaatctagaaggggcaacccttcaaggagagcttcagggtcatctctgtgtgagacactattgtatattcctgtaagattgcatttttatctaaggaatgatgttatttaaaaaacaaacaaaaaacacaaaaaataagaattgcaaataaatttcttaacaatgtct

SEQ ID NO: 46910 - DNA, 6477 bp, Artificial Sequence
  derived and/or modified sequence
atggttaacgaaaatacccgtatgtatatacccgaggagaaccatcagggatctaactatgggtctcctcgcccagctcatgccaatatgaacgccaacgccgctgccgggctcgctcccgaacatatccctaccccaggagctgcgctcagttggcaggccgccattgatgccgcacgccaggcgaaactcatggggagcgcaggaaacgctacgatctcgacggtgtcgtctacccaaaggaagcgccagcaatacggcaagcccaaaaagcaaggctcaaccacagcaacgcggccgccccgcgccctgctgtgcctgaccttaaagaacccgatccgccgggcctgtatcagcatagttgaatggaaacccttcgaaattatcatcctgctgactatttttgctaattgtgtggctctcgccatctacatcccgttcccagaggatgattcgaatgccacaaattctaatctggagagggtcgaatacctctttctgatcatcttcaccgtcgaggcgttcttgaaagtgatcgcctatggccttctgtttcaccctaacgcatatttaaggaacggctggaacctcctggacttcatcatcgtggtggtaggcctcttctctgcaatattagagcaagctaccaaagccgacggagccaacgctctcggaggtaaaggtgccgggttcgacgttaaggcactgcgcgccttccgtgtactccggccactgcggctcgtgtcaggcgtgccttcgttacaagtagtcctcaactctattatcaaagccatggtccctctcctccacattgctctcttagtccttttcgtgatcatcatctacgcaataattgggcttgagctcttcatgggtaagatgcacaagacatgctacaaccaggagggtatagccgacgtgcccgccgaggacgacccctccccctgcgcactagagacgggccatggacgtcaatgtcaaaacgggaccgtgtgcaaaccgggctgggacgggcccaagcacggaatcaccaatttcgataatttcgcattcgcaatgttaacagtgttccagtgcattactatggagggatggacagatgtcctgtactgggttaacgatgccgttggacgagactggccctggatttattttgtcacgctaattatcatcgggtcctttttcgtcctgaatcttgtgttgggcgtcttgtctggggagttctcaaaggaacgggagaaggccaaggcaaggggagatttccagaaactgcgggagaaacagcagcttgaggaggacctgaaaggttacctcgactggattacccaggcagaggacattgacccagagaacgaggatgaggggatggacgaagagaaacctaggaatatgagcatgccgacgtcggaaactgagagcgtaaacaccgaaaatgtcgcagggggtgacatagaaggcgagaactgcggcgcacgactcgcacaccggatatctaaaagcaagttctcacgctactggcgccgatggaacaggttttgccggcggaaatgccgtgccgccgtcaagtcaaacgtgttttactggctcgtcatctttctcgtgtttcttaacacactgaccatcgcaagcgagcattacaaccagcctaattggctgaccgaggtccaggatactgcgaataaagcgctgcttgccctgttcacagccgagatgttgctgaaaatgtactctcttgggctgcaggcctattttgtatcacttttcaatagattcgactgtttcgtcgtgtgtggcgggatcctcgaaactattctcgtcgagacaaagattatgagccccctgggaatcagcgtcctgaggtgtgtcaggctgctgcgtattttcaaaataacccgctactggaacagcctgtctaacctcgttgcgagcttgttaaattctgtgaggtctatcgcttctcttctgctgctgctgttcttgttcataatcattttttctctactgggaatgcagctgtttgggggaaaattcaattttgatgagatgcagacccgacggagcacttttgataattttccacaaagcctgctcacagtttttcagatcctgaccggagaagattggaatagcgtaatgtacgacggtattatggcttatggaggcccaagctttccgggcatgctggtgtgcatctactttattattctgttcatctgcggtaattacattcttcttaatgtgttcctcgcgatagccgtggacaacctggccgacgctgagagcctcacatctgctcagaaagaagaggaagaggagaaggaacgcaaaaaacttgccagaacagcatctcccgagaagaaacaagaattggttgagaagcccgcagtcggagagtctaaagaagaaaaaattgagcttaagagcataactgccgatggtgagtcgccccccgccacaaaaataaacatggatgacttgcagcctaatgaaaatgaagataaatccccctacccaaatcctgagacgactggggaagaagacgaggaggagcccgagatgcctgtggggccacgtccacgacccctgagtgaattgcatcttaaagagaaggcagtcccaatgcccgaggcctcagcattcttcatcttctcatctaataaccgttttcgactgcagtgccatcggatcgttaacgatacaatctttacaaatctcattttgtttttcattctcctgagttcaatttcattggcagccgaggaccctgttcaacacacttccttccgaaatcatatcttgttttacttcgacatagtgttcactacaatcttcacaatcgagatcgctctaaagatcctgggcaacgccgattacgtgtttacatccatctttaccctcgaaattatcttgaagatgacagcctatggagctttcctccataaaggatctttttgtcgcaactattttaatatcctggatctactcgtggtgagcgtgtcattaatcagttttgggatacagtctagcgcaatcaacgtcgttaagattctaagagtgctgcgagtactccgcccacttagggcaatcaatagggcgaaaggcctgaagcacgtggtgcagtgtgtatttgtggctatccgcaccatcggcaatatcgttatcgtgacgacactgttacagtttatgtttgcgtgcattggcgtccagctattcaaaggtaagctgtacacatgttctgatagctccaagcagacagaggcggaatgcaaggggaattatattacatataaggacggagaggtagatcatcctatcatccaaccacgctcatgggagaactctaagttcgacttcgataacgttttggcagccatgatggcactgttcaccgtgtccacgttcgagggatggcccgaactgctgtaccgctcgatcgatagccatactgaggacaaaggaccaatttacaattacagagtcgagatcagcatcttcttcatcatatacatcatcatcatcgccttcttcatgatgaatattttcgtgggcttcgttatcgtaacatttcaggagcagggagagcaggagtacaaaaactgtgaactggataaaaaccaacggcagtgtgtcgaatacgcgctcaaagcacggcctcttagacggtatatccccaagaatcagcaccaatataaggtctggtacgtggtcaattcaacgtatttcgagtacctgatgttcgtactcatcttgctgaacacaatttgtctggccatgcaacactacggccagagttgtctgttcaagatcgccatgaacatcctgaatatgctgttcaccggactctttactgtggaaatgattttaaagttgatcgcgtttaaacccaaacactatttttgtgacgcctggaacacgtttgatgccttgatagttgtgggatcgatcgtggacattgcaatcacggaggtgaaccctgctgagcacacccaatgtagtccctccatgaacgcagaagagaactctagaattagcatcacattctttcgtctgttcagggtgatgaggctggtgaagctactttctcggggtgaagggattcggaccctgctgtggacatttatcaaatcttttcaggccttgccctatgtggctttgctgatagtgatgctgttctttatctacgccgtgataggaatgcaggtattcggtaagattgcccttaatgacactactgaaatcaaccgtaacaataattttcagacctttccacaagccgttttgttactgtttcggtgtgctactggcgaggcttggcaagacataatgcttgcttgtatgcccggaaaaaagtgtgccccagagtctgagccctccaattcaacggaaggtgagacgccctgcggttctagctttgctgtcttttacttcatcagtttctacatgctgtgcgcattccttataattaacctgttcgtagctgtgatcatggacaactttgattacctgacaagggactggagtatcctgggccctcaccatctggacgagttcaaaagaatctgggccgaatacgatccagaggcaaaaggccgtatcaagcatttggatgtggtgacactgctgagaagaattcagcctcctcttggcttcggaaaactgtgcccgcaccgggttgcatgcaagagattggtgtccatgaatatgccactcaatagtgacgggactgtgatgtttaatgccaccttgtttgcgttggtcagaacggctctgagaatcaaaacggagggcaacctcgagcaggctaacgaggagctgcgtgccatcatcaagaaaatctggaaacgaactagtatgaagctgttagaccaagtggtgcctccagcaggggacgatgaggtgactgtgggtaaattttacgcaacctttttgatccaggagtacttcaggaagttcaaaaaaaggaaggagcagggactggtgggtaagccatcccagcgtaacgcactttctttgcaagcagggctcagaaccctgcatgatatcgggcccgagatcaggagggcaatatccggcgacctgaccgccgaagaagagttggataaggcaatgaaggaggcagtaagcgcagcctcggaagacgacatctttcgaagggcaggcgggctcttcgggaaccacgtatcctattatcagtccgacggtcgcagcgccttcccccagacattcacgacacagcggccacttcacatcaataaagccggtagctcacagggtgataccgaatcaccttcacatgagaagctggtggactccacttttacgccaagcagctattcttccactggatccaacgctaatattaacaacgccaacaatacagcgctcgggagactgcctcggccggccgggtatccaagcactgtcagcactgtcgaaggacacggaccccccctatctccggcaatccgtgtgcaggaagtggcatggaaattaagcagtaatcgttgtcactctcgggagagtcaagccgctatggctggccaagaagagacctcacaagatgagacctacgaggtaaagatgaatcacgatactgaagcctgctctgaaccctcactcctgagcaccgagatgctctcatatcaggacgatgaaaatcgccagctcactctccctgaggaggacaaacgggacataaggcagtcgccgaaaagggggttcctcagatctgcctctctcggtcggagagcctctttccatttggaatgcctaaagcgtcagaaggaccgcggaggcgacatctcccaaaaaacagttcttccattgcatctggtgcaccaccaggctctcgccgtggccgggctgtcaccactcttacagagatcccactcccccgcaagcttcccccgccctttcgctacaccccccgcaacacccggctcaaggggatggcctcctcagcctgtgcccactttgcgtcttgaaggcgtggagtcttccgagaaactcaatagttcattcccttccattcactgcggatcctgggctgagactacaccaggcggagggggcagttccgcagccaggagagtgcgccctgtatctctgatggtgcccagccaggctggggcgccgggacgccagtttcacggaagtgcctcttccttagtggaagctgtgttgatctcggaggggttgggccagtttgcccaggaccccaaatttatagaagtcaccactcaggagctcgccgacgcctgtgatatgactattgaggagatggagtcagccgctgataatattctgtcaggcggcgctccacagagtccaaatggagccctactcccctttgttaactgtcgcgatgccggacaagatcgggccggcggtgaagaggatgcgggctgcgtgagagccagaggtaggcccagtgaggaggaattgcaggattcacgcgtgtacgtatcatctctgtag

SEQ ID NO: 46911 - DNA, 6477 bp, Artificial Sequence
  derived and/or modified sequence
atggtgaatgaaaacaccaggatgtacatccctgaggagaaccaccagggcagcaactacggcagccccaggcctgcccacgccaacatgaatgccaatgctgctgctggcctggcccctgagcacatccccacccctggggccgccctgtcctggcaggccgccattgatgctgcccggcaggccaagctgatgggcagcgctggaaatgccaccatcagcacagtgagcagcacccagaggaagaggcagcagtatggcaagcccaagaagcagggcagcaccacagccacccggcccccccgggccctgctgtgcctgaccctgaagaaccccatccggcgggcctgcatcagcatcgtggagtggaagccctttgagatcatcatcctgctgaccatctttgccaactgtgtggccctggccatctacatccccttcccagaagatgacagcaatgccaccaacagcaacctggagcgggtggagtacctgttcctgatcatcttcaccgtggaggccttcctgaaggtgattgcctacggcctgctcttccaccccaatgcctacctgagaaatggctggaacctgctggacttcatcatcgtggtggtgggcctcttcagcgccatcctggagcaggccaccaaggcagatggagccaatgccctgggcggcaaaggagctggctttgatgtgaaggccctgcgggccttccgggtgctgcggcccctgcggctggtgtctggagtgcccagcctgcaggtggtgctgaacagcatcatcaaggccatggtgcccctgctgcacatcgccctgctggtgctgtttgtgatcatcatctatgccatcatcggcctggagctgttcatgggcaagatgcacaagacctgctacaaccaggagggcattgctgatgtgcctgcagaagatgaccccagcccctgtgccctggagaccggccacggccggcagtgccagaatggcaccgtgtgcaagccaggctgggatggccccaagcacggcatcaccaactttgacaactttgcctttgccatgctgactgtgttccagtgcatcaccatggagggctggacagatgtgctgtactgggtgaatgatgctgtgggccgggactggccctggatctactttgtgaccctcatcatcatcggcagcttctttgtgctgaacctggtgctgggcgtgctgtctggagagttcagcaaggagcgggagaaggccaaggcccggggggacttccagaagctgcgggagaagcagcagctggaggaggacctgaagggctacctggactggatcacccaggctgaagatattgatcctgaaaatgaagatgagggcatggatgaggagaagcccaggaacatgtccatgcccaccagcgagacagaatctgtgaacacagaaaatgtggccggcggggacatcgagggggagaactgtggggcccggctggcccaccgcatcagcaagagcaagttcagccgctactggaggcgctggaaccgcttctgcaggaggaagtgcagagctgctgtgaagagcaatgtgttctactggctggtgatcttcctggtgttcctgaacaccctgaccatcgccagcgagcactacaaccagcccaactggctgacagaggtgcaggacacagccaacaaggccctgctggccctcttcaccgctgagatgctgctgaagatgtacagcctgggcctgcaggcctactttgtgtccctcttcaacagatttgactgctttgtggtgtgtggcggcatcctggagaccatcctggtggagaccaagatcatgagccccctgggcatctctgtgctgcgctgtgtgcggctgctgcgcatcttcaagatcacccgctactggaacagcctgagcaacctggtggccagcctgctgaacagcgtgcgcagcatcgccagcctgctgctgctgctcttcctgttcatcatcatcttcagcctgctgggcatgcagctgtttggaggcaagttcaactttgatgagatgcagaccaggaggagcacctttgacaacttcccccagagcctgctgaccgtcttccagatcctgaccggggaggactggaacagcgtgatgtatgatggcatcatggcctatggaggccccagcttccctggcatgctggtgtgcatctacttcatcatcctcttcatctgtggcaactacatcctgctgaatgtgttcctggccatcgctgtggacaacctggctgatgctgagagcctgaccagcgcccagaaggaggaggaggaggagaaggagaggaagaagctggccaggacagccagccctgagaagaagcaggagctggtggagaagccagctgtgggggagagcaaggaggagaagattgagctgaagagcatcacagcagatggagagagccccccagccaccaagatcaacatggatgacctgcagcccaatgaaaatgaagacaagagcccctaccccaaccctgagaccactggagaggaggatgaggaggagcctgagatgcctgtgggcccccggccccggcccctgtctgagctgcacctgaaggagaaggctgtgcccatgcctgaggccagcgccttcttcatcttcagcagcaacaaccgcttccggctgcagtgccaccgcatcgtgaatgacaccatcttcaccaacctgatcctcttcttcatcctgctgagcagcatcagcctggccgctgaggaccctgtgcagcacaccagcttcaggaaccacatcctcttctactttgacatcgtgttcaccaccatcttcaccatcgagatcgccctgaagatcctgggcaatgctgactatgtgttcaccagcatcttcaccctggagatcatcctgaagatgacagcctatggagccttcctgcacaagggcagcttctgcaggaactacttcaacatcctggacctgctggtggtgtctgtgtccctcatcagctttggcatccagagcagcgccatcaacgtggtgaagatcctgcgggtgctgcgggtgctgcggcccctgcgggccatcaacagagccaagggcctgaagcacgtggtgcagtgtgtgtttgtggccatccgcaccatcggcaacatcgtcatcgtgaccaccctgctgcagttcatgtttgcctgcatcggcgtgcagctgttcaagggcaagctgtacacctgcagcgacagcagcaagcagacagaagctgagtgcaagggcaactacatcacctacaaggatggagaggtggaccaccccatcatccagcccaggtcctgggagaacagcaagtttgattttgacaacgtgctggccgccatgatggccctcttcaccgtgtccacctttgagggctggccagagctgctgtaccgcagcattgacagccacacagaggacaagggccccatctacaactacagagtggagatcagcatcttcttcatcatctacatcatcatcatcgccttcttcatgatgaacatctttgtgggcttcgtcatcgtgaccttccaggagcagggcgagcaggagtacaagaactgtgagctggacaagaaccagaggcagtgtgtggagtatgccctgaaggcccggcccctgcggcgctacatccccaagaaccagcaccagtacaaggtgtggtacgtggtgaacagcacctactttgagtacctgatgtttgtgctgatcctgctgaacaccatctgcctggccatgcagcactacggccagagctgcctcttcaagatcgccatgaacatcctgaacatgctgttcaccggcctcttcaccgtggagatgatcctgaagctgattgccttcaagcccaagcactacttctgtgatgcctggaacacctttgatgccctgattgtggtgggcagcatcgtggacatcgccatcacagaggtgaacccagctgagcacacccagtgcagccccagcatgaatgctgaggagaacagccgcatcagcatcaccttcttccgcctcttccgggtgatgaggctggtgaagctgctgagcagaggagagggcatccgcaccctgctgtggaccttcatcaagagcttccaggccctgccctacgtggccctgctgattgtgatgctgttcttcatctatgctgtgattggcatgcaggtgtttgggaagatcgccctgaatgacaccacagagatcaacagaaacaacaacttccagaccttcccccaggccgtgctgctgctcttccgctgtgccaccggggaggcctggcaggacatcatgctggcctgcatgcctgggaagaagtgtgcccctgagagcgagcccagcaacagcacagaaggagagaccccctgtggcagcagctttgctgtgttctacttcatctccttctacatgctgtgtgccttcctgatcatcaacctgtttgtggccgtcatcatggacaactttgactacctgacccgggactggagcatcctgggcccccaccacctggatgagttcaagaggatctgggccgagtatgaccctgaggccaagggccgcatcaagcacctggatgtggtgaccctgctgcggcgcatccagccccccctgggctttgggaagctgtgcccccaccgggtggcctgcaagaggctggtgtccatgaacatgcccctgaacagtgatggcaccgtgatgtttaatgccaccctgtttgccctggtgaggacagccctgcgcatcaagacagagggcaacctggagcaggccaatgaggagctgcgggccatcatcaagaagatctggaagaggacctccatgaagctgctggaccaggtggtgcccccagctggagatgatgaggtgacagtgggcaagttctacgccaccttcctgatccaggagtacttcaggaagttcaagaagaggaaggagcagggcctggtgggcaagcccagccagagaaatgccctgagcctgcaggccggcctgcggaccctgcatgacatcggccctgagatccggcgggccatcagcggggacctgacagctgaggaggagctggacaaggccatgaaggaggccgtgtctgctgcctctgaagatgacatcttcagaagagctgggggcctgtttggaaaccacgtgtcctactaccagagtgatggccgcagcgccttcccccagaccttcaccacccagaggcccctgcacatcaacaaggccggcagcagccagggcgacacagagagccccagccatgagaagctggtggacagcaccttcacccccagcagctacagcagcacaggcagcaatgccaacatcaacaatgccaacaacacagccctgggccgcctgcccaggcctgctggctaccccagcacagtgtccacagtggagggccacggcccccccctgagccctgccatccgggtgcaggaggtggcctggaagctgagcagcaaccgctgccacagccgggagagccaggccgccatggccggccaggaggagaccagccaggatgagacctatgaggtgaagatgaaccacgacacagaggcctgcagcgagcccagcctgctgagcacagagatgctgagctaccaggatgatgaaaatcggcagctgaccctgcctgaggaggacaagagggacatccggcagagccccaagaggggcttcctgcggagcgccagcctgggcagaagagccagcttccacctggagtgcctgaagaggcagaaggacagaggaggagacatcagccagaagacagtgctgcccctgcacctggtgcaccaccaggccctggccgtggccggcctgagccccctgctgcagaggagccacagccctgccagcttcccccggccctttgccaccccaccagccaccccaggcagccggggctggccaccccagcctgtgcccaccctgcggctggagggcgtggagagcagcgagaagctgaacagcagcttccccagcatccactgcggctcctgggccgagaccacccctgggggcggcggcagcagcgctgccaggagagtgcggcctgtgtccctgatggtgcccagccaggccggggcccctggccggcagttccacggcagcgccagcagcctggtggaggccgtgctgatcagcgagggcctgggccagtttgcccaggaccccaagttcatcgaggtgaccacccaggagctggctgatgcctgtgacatgaccatcgaggagatggagagcgctgctgacaacatcctgtctggaggagccccccagagccccaatggagccctgctgccctttgtgaactgcagagatgctggccaggaccgggccggcggggaggaggatgctggctgtgtgcgggcccggggccggcccagcgaggaggagctgcaggacagccgggtgtatgtgagcagcctgtag

SEQ ID NO: 46912 - DNA, 6477 bp, Artificial Sequence
  derived and/or modified sequence
atggtgaacgagaacacccggatgtacatccccgaggagaaccaccaggggtccaattatggctcgccacggcccgctcacgcaaatatgaatgctaacgctgcggccggtttggctccggagcacattcccactcctggggccgcactgtcctggcaggctgccatcgatgctgcccggcaagccaaactaatgggttcagcaggaaatgcaaccatcagcacagtgagttccacacagcgaaaacgccagcagtatggaaagcctaagaaacagggcagtacaacggctacccgaccccctagagcactgctgtgcctgaccctgaagaaccctattcggagggcatgcattagcatcgtagaatggaagcccttcgaaataatcatcctcctaaccatatttgctaactgcgtcgcacttgccatttatataccctttccagaagatgatagtaacgctaccaacagcaatcttgagcgcgtcgaatacctgttcctcataatttttacggtcgaggcctttcttaaggtcattgcctatggcctgttatttcatccaaacgcgtatctgcgtaatggatggaatctcctagactttatcattgtagtggtcggcctattttccgccatactggagcaagccactaaggcggacggcgctaatgctcttggcggaaagggagccggattcgacgtgaaggccttgcgggcatttagagtgctcaggcctctgcgtctagtcagcggcgttccttcccttcaagtggtgctcaattctatcattaaggccatggtgcctctgctgcatattgctctgctggtattgttcgtaatcatcatttatgcaattatcggcctggagctctttatgggcaagatgcataagacgtgttataaccaggaaggtatcgcagacgtacccgccgaggacgacccctccccctgcgccctggagactggtcacgggcgccagtgtcagaatggaactgtttgtaaacctggttgggacggccctaagcacgggattacgaacttcgataattttgcattcgctatgctgacagtcttccagtgtattaccatggagggatggactgacgtgctgtactgggtcaatgacgccgtgggtagagattggccctggatctacttcgtcactctaatcattataggttctttctttgtcctcaaccttgttctgggcgtgttatcaggcgagttctctaaagagagagagaaagcgaaggctaggggcgacttccagaagctgcgtgagaagcaacagcttgaggaagacctgaaagggtacctcgattggatcacccaggcagaagatattgaccccgagaacgaagatgagggtatggatgaggagaagcccagaaacatgtcaatgccaactagcgaaaccgaaagtgtgaatactgaaaacgtggccggtggggatatagaaggagaaaactgcggcgcgagactggcacacaggatttctaagtctaaattttcacgctactggcgaaggtggaaccgcttttgcaggaggaaatgccgtgcagccgtgaaatcaaacgtcttttattggctcgtaatctttcttgtattccttaacacgttaactatcgctagcgagcattataaccagccaaactggctcaccgaggtgcaggacacggccaataaggcccttctggccctgtttaccgccgagatgttactgaagatgtactctctgggtctgcaagcgtatttcgtcagcctcttcaaccggtttgattgctttgtggtgtgcgggggtatcctcgaaaccatcctggtcgagactaagataatgagccctctcgggattagcgtgctgagatgcgtgagattgcttcgaatttttaagatcacccgatactggaatagcttgtcaaatctcgttgctagcctgttgaactcggtccgcagcatagccagcttacttcttctgctctttttattcatcataatattttccctgttgggcatgcagttgttcggcggcaagtttaacttcgacgagatgcagaccagacggtctacattcgataactttcctcagtccctcttgaccgtctttcagattctgaccggggaggactggaacagcgtgatgtatgacggcataatggcctacggcggtccgtcttttcctggcatgctcgtctgtatttatttcatcatactgtttatctgtggaaattacatcctgctgaacgtcttcctcgccatcgccgtggataatctggctgacgctgagagcctgacatccgcccagaaagaggaagaggaagaaaaagaacgtaaaaaacttgccagaactgcgtctcccgaaaagaagcaggagctggtagagaagccagccgtcggtgagagcaaagaagaaaagattgagttgaagtctatcaccgccgatggggagagccctcccgccactaagattaatatggacgacctccagcctaacgagaatgaggataagtctccatatcccaatccagagaccactggagaggaggatgaggaggaaccagagatgccagtcggcccccgcccaagacccctgagtgagctgcaccttaaagagaaggccgttccgatgcctgaagccagtgcctttttcattttcagtagcaacaatcgcttcagactgcaatgccaccggatagtgaacgacacaattttcaccaacctgatacttttttttatcttattgtcttctatttcactggccgctgaagatcccgtgcaacatacctcttttcgcaatcatatacttttttactttgatatcgttttcacaacaatcttcactatagaaatcgcattgaagatcctggggaatgccgactacgtgtttaccagcattttcactctggagattattctgaaaatgactgcttacggagcttttctgcacaagggctcgttctgtcgaaattatttcaacattcttgatctattagtcgtgagcgtcagtttgatttccttcggcattcagtcttcggccatcaatgtggttaagattctgcgagtgctcagagtgctgagacctctgcgcgcaattaatcgcgccaagggcctcaaacatgtggtgcagtgtgtcttcgtggcaatccggacaatcggcaatatcgtcatcgttaccaccctgctccagttcatgtttgcctgtatcggcgtccagctgtttaaaggaaagctttacacctgtagcgattcctcaaagcaaaccgaagcagagtgtaagggaaattatatcacgtacaaagacggcgaagttgatcatcctatcatccagccgcgatcctgggagaattctaagtttgatttcgacaatgtgctagctgcaatgatggcgcttttcactgttagcacctttgagggctggccggagctcctatatcgaagtattgactcgcacacagaggataagggacctatctataactacagggtggagataagcatttttttcataatatacatcattataatcgccttctttatgatgaacatttttgtgggtttcgtaattgtgacgttccaagaacagggagagcaagagtacaaaaattgcgaactggataaaaaccagcgccagtgcgtggagtacgcgttaaaagcccgcccacttaggcggtatataccaaaaaatcaacaccaatataaagtttggtacgtggtgaattcaacttactttgagtacctgatgtttgtccttatcctgttgaatacaatctgcctcgcgatgcagcattacggacagtcatgcctttttaagatcgctatgaacattttaaatatgttgtttacgggcttgtttacggttgagatgatactgaaactgattgccttcaaacctaagcactatttctgcgacgcatggaatacctttgatgcacttatcgtggtgggctctattgttgatatcgcaataacagaagtgaatcccgctgagcatacccagtgcagcccttccatgaatgctgaggagaattctcggatttccatcacttttttcaggctgttccgcgtgatgaggctcgttaaacttcttagtagaggagagggcattcgcacactgctctggacctttattaaatccttccaagccctgccttacgtagccctgcttatcgtgatgctgtttttcatttatgccgtaattggcatgcaggtcttcggcaagattgccttaaatgataccaccgaaattaaccgtaataacaatttccaaaccttcccacaggctgttcttctcctctttcgatgcgcgaccggagaggcctggcaggacatcatgctggcatgcatgcctgggaagaaatgcgcgcccgagtccgaaccaagtaatagcacggaaggggagactccctgcggcagcagctttgccgtcttctactttatcagcttttacatgctgtgtgcatttcttattatcaacctgttcgtcgccgttatcatggataatttcgactatctgacaagagactggagcattctggggccccatcatctcgatgaattcaaacgtatttgggctgaatacgatcctgaagccaaggggcggataaaacatcttgatgtggtgaccctcctgcgccgcattcagccccctcttggctttggcaaactatgtccccatagggtggcctgcaaacgtctggtgtctatgaacatgccgctgaacagcgacggaaccgtgatgtttaacgctacactgttcgccctggttaggaccgccctgaggatcaaaactgagggaaacctcgaacaggccaatgaggagctgcgggcgattatcaagaagatctggaagcgcaccagtatgaaactgttggaccaggtggtgccaccagctggagatgacgaagtgactgtgggcaaattctatgccacctttcttatccaagaatactttcggaagtttaagaaacgcaaagaacagggcctagtggggaaaccttcccagagaaacgctcttagtctgcaggctgggctcaggactttacacgatataggccctgagatcagaagggctatcagtggcgatctgactgcagaagaggagctcgacaaagctatgaaggaagctgtgagcgccgcctcggaggacgacatttttaggagagctgggggcctgttcggaaatcatgtctcttactaccagtccgatggaaggagtgcttttccacagacgtttaccactcagagaccgctacacatcaataaggctggctctagtcagggcgatactgagtcccccagccacgaaaagctggtcgactcaacattcacgcctagttcctactcctcaaccggttccaacgctaacataaacaatgccaacaataccgccctgggaaggctgccccgcccagctggctacccctctactgtctcaaccgtggaaggtcacggaccccctctgagcccagctattcgagtccaggaagtggcgtggaagctgtcttccaatcggtgtcacagtagggagagccaggcagccatggccggacaagaggaaactagccaggacgagacttatgaggttaaaatgaatcacgacacggaagcgtgttctgagccctccctcttgagtaccgagatgctttcgtatcaagacgatgagaatcggcaattgacgttgccagaagaggacaagagggacattcggcagagccctaagcgcggcttcctccggtctgccagcttgggacggagggcgtcttttcatctcgaatgtttgaagcgacaaaaggaccggggcggtgatatctcccaaaagacggtcctgcctttgcaccttgtccaccaccaggctctcgccgtggcaggcctctcccccctgttacagagaagccatagccccgctagcttccctagacccttcgccacaccacctgcgacgcccggttctcgcggttggcctccccagccggtgccaacattgcgcctggagggtgtagagagttcagaaaaactgaacagttcatttccttccattcattgcggtagctgggctgagacgactcccgggggcggcggcagctctgctgcccggcgcgtgcgccccgtgtcattaatggtgccaagccaggccggtgctcccgggcgccaattccacggtagcgcatctagcctggtggaggccgtcctgatctcagaagggttgggacagttcgcacaggaccccaagtttatcgaagtgacaacacaggagttggctgatgcctgtgacatgacaattgaggagatggagagcgctgccgacaatatcctgtctggtggagccccacagtcccccaatggagcccttctccccttcgtgaattgtagagatgccggacaggatcgcgccggcggtgaggaggacgccggctgtgtgagagctcgcggacgcccttcagaggaagagcttcaggactctagggtctacgtgtcatctctctag

SEQ ID NO: 46913 - DNA, 6477 bp, Artificial Sequence
  derived and/or modified sequence
atggtgaacgagaacacgcgaatgtatatcccagaggagaaccatcaaggcagtaattacgggagtccaagacctgctcatgctaacatgaacgcaaatgcggcagcgggtctggccccagagcacatccctacgcccggagccgctcttagttggcaagccgctatcgacgccgcacgtcaggcaaagctaatgggctctgccggaaacgccactatatctactgtctcctctactcaaagaaagagacaacagtacgggaagcccaaaaagcaaggaagcactaccgccactagaccaccaagggccctcctgtgtctgaccctcaaaaatccaatcagacgagcctgcatcagcatagttgagtggaaaccattcgaaatcatcatcctgctgaccatctttgcaaattgtgtcgccctcgccatatatattcccttcccagaagatgactctaacgcaactaactcaaatctagagagggtcgaatacctgtttctcatcatttttacagtcgaggcattcctgaaggtgattgcttacggcctcctcttccaccctaatgcctatttgaggaatgggtggaacttgcttgatttcattatcgtggttgtgggactgttcagcgcaatcctggaacaggcgacaaaggctgatggcgcaaacgcgctggggggaaagggcgctgggtttgacgtcaaggccctgcgcgcattccgagtactcaggcctctccgcctggtgagcggggtcccatcactgcaggtggtgctgaactcaatcatcaaggctatggtgccgctgctgcatatcgccttattggtgttatttgtgataataatttatgcgatcatcgggcttgagctgttcatgggaaagatgcacaagacctgctacaaccaagagggcatcgctgacgtccccgcagaggatgatcccagtccgtgcgcccttgagactggacatggcagacagtgccaaaatggaacagtttgcaaacctggatgggacggccctaaacacgggatcaccaattttgataacttcgcttttgccatgttgactgtgttccagtgtatcaccatggagggatggaccgacgtgctttactgggtcaatgacgccgtgggtagagattggccatggatttacttcgtaacgctcattattatcggctctttcttcgtattaaatctggtactgggcgttctgagtggagaattttccaaagagagagagaaagctaaagcacggggtgacttccagaagctccgggaaaagcaacagctggaagaggatctcaaaggatatctagattggatcactcaggcggaagatatcgaccccgaaaacgaggacgagggcatggacgaggagaagccgagaaatatgtcaatgccaacaagtgagactgaaagcgttaataccgaaaacgtggcaggtggggacattgaaggggaaaactgtggagctaggctggcccatcgtattagcaaaagtaaattcagtcggtactggagaagatggaacaggttctgcaggaggaagtgcagggccgctgttaaatccaatgtgttctattggctggtcatattcctggtatttttgaacaccctcactattgcgtccgaacactacaatcagccaaattggctgactgaagtgcaggacacagcaaataaagcactattagccctgtttaccgcagaaatgttactgaagatgtacagcctcggcttacaggcatattttgtgagcctgtttaatcggtttgattgcttcgtggtgtgtggcggaatcctcgagacaattctagtcgaaaccaagatcatgagtccactcggcataagcgtgctgcgttgcgtgagacttttgaggatctttaaaatcacacggtactggaattccctgtctaaccttgtggcctccctgctaaactctgtcaggagcatcgcgagtttattgctcctgctgtttttattcatcatcattttttctcttctaggtatgcagctgtttggtgggaaatttaactttgatgaaatgcagacgagaaggagcacgttcgacaacttcccccagagcctgttgactgtgtttcaaatcctgaccggagaggactggaacagcgtgatgtatgacggtataatggcttacggaggccctagcttcccagggatgcttgtatgcatctatttcatcattcttttcatctgtggtaattacattctactcaatgtcttcttggccatcgctgtggacaatttggccgacgctgaatcacttacatctgctcagaaagaggaagaggaggagaaagagcgaaagaagcttgccaggacagccagccccgagaagaagcaagagctggttgagaaacctgccgtgggtgaatcaaaagaagagaagatagagctgaagagcatcaccgcagatggagaaagtcctcccgcaaccaagataaacatggatgatcttcaaccgaacgagaacgaggacaagtccccctacccaaatccagagaccacaggggaggaggacgaagaagagcccgaaatgccagtgggacccagaccaaggccattgtctgagctacacctgaaagagaaagccgtgcctatgccagaggcatccgcgttctttatcttttctagcaataatagatttcggctgcagtgtcatagaattgttaatgatactatcttcactaacctcatactgttcttcatactgctttctagcattagtctggccgcagaagacccagtacagcacacttctttcagaaatcatatcctgttctacttcgatatcgtttttaccaccatattcacgatcgaaatcgccctgaagattctgggcaacgccgattatgtctttacatcaatattcacccttgagatcattctgaagatgacagcttacggtgcctttctgcacaagggctccttctgccgaaattattttaatattttggacttgcttgtggtctcggtgtcactcatcagcttcggtattcaatcttccgcaattaatgttgtgaaaatcctgagggtgcttagagtcctcagacccctcagagcgattaatcgggctaagggtctgaaacacgtggtgcagtgcgtctttgttgctattagaacgataggaaacatagtgatcgtgacaacgctgttgcagttcatgttcgcctgtataggagtacagcttttcaaaggaaaactgtacacttgttctgacagtagtaaacagaccgaggccgagtgcaaagggaactatattacatacaaagacggagaggtcgatcaccccataatccagcccaggtcgtgggaaaattccaagttcgactttgataatgtgctggcggctatgatggcactctttaccgtttccacctttgaaggatggcccgaactgctgtaccggtctatcgactctcacactgaggacaaaggacctatttacaactatagggtggaaattagtattttctttatcatttacatcattatcatcgcgttctttatgatgaatatctttgtggggttcgtgatcgtgacttttcaggaacagggagagcaagaatataaaaactgcgagctggacaagaatcaaagacagtgcgtggagtacgccctgaaagctcgacccctccgcaggtatatacccaaaaatcaacaccagtataaggtgtggtatgttgtaaacagtacatacttcgagtacttaatgttcgtcctgatcttgctcaacactatttgcctggctatgcagcattatgggcaatcttgcttgttcaagatcgccatgaacatacttaacatgctgtttaccgggctcttcactgtggaaatgatcctcaaactgatcgccttcaaaccaaagcactatttttgtgacgcctggaatacattcgacgccctgatcgtcgtggggtctatcgtggatattgccattactgaagtcaaccccgcagagcatacccagtgctctcccagcatgaacgccgaggaaaattccaggatctcaattacctttttccgcctgttcagagttatgagacttgtcaaactcttaagcagaggcgaaggcattagaactctgctctggacctttatcaaatcattccaagctctcccatatgtcgccctactgatcgtgatgctgtttttcatctacgcagtgatcggcatgcaggtgttcgggaaaatcgctttaaacgatacaaccgaaatcaatcgtaataataactttcagaccttcccccaggcagtgttactcctcttccgctgcgcaactggggaggcttggcaggacatcatgcttgcttgtatgcctgggaagaagtgtgctcctgaatctgagccaagtaactcaaccgagggagaaactccctgtggatcctcttttgccgtgttttactttatctcattctatatgctctgtgcgttcctcatcatcaatctgtttgtggccgtgattatggacaactttgactatctgacaagggattggagcattctcgggcctcaccacttagacgagtttaaacggatctgggccgaatatgatcccgaggcgaagggacggatcaaacatcttgacgttgtgaccctgctgagaagaatccagccacccctaggtttcggaaagttatgcccccacagggtcgcctgcaagaggctggtgtcaatgaacatgccactgaactctgacggcaccgtgatgtttaacgccaccctcttcgctcttgtcaggaccgcccttcggatcaagaccgaaggcaatctagagcaggccaatgaagaactgcgtgcaattattaaaaaaatatggaaaaggacctctatgaagctcctggaccaggtggtgccccctgccggagatgatgaggtcaccgtaggcaagttttatgcaacgtttctgatacaggaatacttccgcaagttcaaaaaaagaaaggagcagggactcgttggcaaaccatcccagcggaatgccctttccttacaggctggactcaggaccctacatgatataggtcctgagatccggagggccatttctggcgacttgaccgctgaagaagagctggataaagcaatgaaggaagccgtgagtgctgctagcgaggatgatatttttcgtcgggctgggggtctttttggaaatcacgtgtcatactatcaaagtgatgggaggtcggcattcccccagacattcacaactcagcggccactgcacattaataaggcaggttcatcccagggcgacacagagagcccttcacatgagaaactggtcgatagtactttcacgccctcatcctacagcagcacagggagcaatgcaaatatcaataatgcaaataatactgctcttgggagacttcctcggccagctggctacccctccaccgtctctacagtggagggtcatggccctcctctgtctccagcgattcgcgtccaggaggtggcctggaagctgtcttccaatcggtgtcactcgagggagagccaggctgcaatggccggtcaggaggaaactagccaggacgagacttacgaagtgaagatgaatcatgatacagaagcttgcagcgagccatctcttctgtccacggagatgctgtcctaccaagacgacgagaatagacaactgacactgccggaagaggataaacgagatatccggcagtctccaaagcgaggtttccttcgttctgccagcctagggcgtcgtgcctcttttcacctagaatgtctcaaacgccagaaggaccgcggaggggatataagccagaaaaccgtcctccccctgcatctagtccaccaccaggctcttgccgtcgctggcctgtcgccgttactgcaaaggtctcactccccagcgtcttttcccaggcccttcgcgacaccccctgctactccaggctcaagaggctggccgcctcagccagtgcctaccttgaggctggagggcgtggaaagtagtgaaaaactcaactctagttttccatctattcactgcggctcttgggctgaaaccacccctggaggtggaggctccagtgctgctagacgagttagacctgtgtcactgatggtcccctcccaagccggagcccctggaaggcagttccatggatctgcaagctccctcgttgaggcagtattaatatctgaggggcttggccagtttgctcaggatccaaagtttattgaggtgacaactcaggagctggccgatgcctgcgacatgactattgaggagatggagagcgccgcagataatatactgtctggaggcgcaccgcagtcgccaaacggggctctgttgccctttgtgaactgccgggatgcaggtcaggatcgggctgggggtgaggaggacgcagggtgtgtgcgcgcacggggaagaccttctgaagaagaactacaagattcccgtgtctacgtgtcgagtctgtac

SEQ ID NO: 46914 - DNA, 6571 bp, Artificial Sequence
  derived and/or modified sequence
atggtcaatgagaatacgaggatgtacattccagaggaaaaccaccaaggttccaactatgggagcccacgccccgcccatgccaacatgaatgccaatgcggcagcggggctggcccctgagcacatccccaccccgggggctgccctgtcgtggcaggcggccatcgacgcagcccggcaggctaagctgatgggcagcgctggcaatgcgaccatctccacagtcagctccacgcagcggaagcggcagcaatatgggaaacccaagaagcagggcagcaccacggccacacgcccgccccgagccctgctctgcctgaccctgaagaaccccatccggagggcctgcatcagcattgtcgaatggaaaccatttgaaataattattttactgactatttttgccaattgtgtggccttagcgatctatattccctttccagaagatgattccaacgccaccaattccaacctggaacgagtggaatatctctttctcataatttttacggtggaagcgtttttaaaagtaatcgcctatggactcctctttcaccccaatgcctacctccgcaacggctggaacctactagattttataattgtggttgtggggctttttagtgcaattttagaacaagcaaccaaagcagatggggcaaacgctctcggagggaaaggggccggatttgatgtgaaggcgctgagggccttccgcgtgctgcgccccctgcggctggtgtccggagtcccaagtctccaggtggtcctgaattccatcatcaaggccatggtccccctgctgcacatcgccctgcttgtgctgtttgtcatcatcatctacgccatcatcggcttggagctcttcatggggaagatgcacaagacctgctacaaccaggagggcatagcagatgttccagcagaagatgacccttccccttgtgcgctggaaacgggccacgggcggcagtgccagaacggcacggtgtgcaagcccggctgggatggtcccaagcacggcatcaccaactttgacaactttgccttcgccatgctcacggtgttccagtgcatcaccatggagggctggacggacgtgctgtactgggtcaatgatgccgtaggaagggactggccctggatctattttgttacactaatcatcatagggtcattttttgtacttaacttggttctcggtgtgcttagcggagagttttccaaagagagggagaaggccaaggcccggggagatttccagaagctgcgggagaagcagcagctagaagaggatctcaaaggctacctggattggatcactcaggccgaagacatcgatcctgagaatgaggacgaaggcatggatgaggagaagccccgaaacatgagcatgcccaccagtgagaccgagtccgtcaacaccgaaaacgtggctggaggtgacatcgagggagaaaactgcggggccaggctggcccaccggatctccaagtcaaagttcagccgctactggcgccggtggaatcggttctgcagaaggaagtgccgcgccgcagtcaagtctaatgtcttctactggctggtgattttcctggtgttcctcaacacgctcaccattgcctctgagcactacaaccagcccaactggctcacagaagtccaagacacggcaaacaaggccctgctggccctgttcacggcagagatgctcctgaagatgtacagcctgggcctgcaggcctacttcgtgtccctcttcaaccgctttgactgcttcgtcgtgtgtggcggcatcctggagaccatcctggtggagaccaagatcatgtccccactgggcatctccgtgctcagatgcgtccggctgctgaggattttcaagatcacgaggtactggaactccttgagcaacctggtggcatccttgctgaactctgtgcgctccatcgcctccctgctccttctcctcttcctcttcatcatcatcttctccctcctggggatgcagctctttggaggaaagttcaactttgatgagatgcagacccggaggagcacattcgataacttcccccagtccctcctcactgtgtttcagatcctgaccggggaggactggaattcggtgatgtatgatgggatcatggcttatggcggcccctcttttccagggatgttagtctgtatttacttcatcatcctcttcatctgtggaaactatatcctactgaatgtgttcttggccattgctgtggacaacctggctgatgctgagagcctcacatctgcccaaaaggaggaggaagaggagaaggagagaaagaagctggccaggactgccagcccagagaagaaacaagagttggtggagaagccggcagtgggggaatccaaggaggagaagattgagctgaaatccatcacggctgacggagagtctccacccgccaccaagatcaacatggatgacctccagcccaatgaaaatgaggataagagcccctaccccaacccagaaactacaggagaagaggatgaggaggagccagagatgcctgtcggccctcgcccacgaccactctctgagcttcaccttaaggaaaaggcagtgcccatgccagaagccagcgcgtttttcatcttcagctctaacaacaggtttcgcctccagtgccaccgcattgtcaatgacacgatcttcaccaacctgatcctcttcttcattctgctcagcagcatttccctggctgctgaggacccggtccagcacacctccttcaggaaccatattctgttttattttgatattgtttttaccaccattttcaccattgaaattgctctgaagatcctaggcaatgcagactatgtcttcactagtatctttacattagaaattatccttaagatgactgcttatggggctttcttgcacaagggttctttctgccggaactacttcaacatcctggacctgctggtggtcagcgtgtccctcatctcctttggcatccagtccagtgcaatcaatgtcgtgaagatcttgcgagtcctgcgagtactcaggcccctgagggccatcaacagggccaaggggctaaagcatgtggttcagtgtgtgtttgtcgccatccggaccatcgggaacatcgtgattgtcaccaccctgctgcagttcatgtttgcctgcatcggggtccagctcttcaagggaaagctgtacacctgttcagacagttccaagcagacagaggcggaatgcaagggcaactacatcacgtacaaagacggggaggttgaccaccccatcatccaaccccgcagctgggagaacagcaagtttgactttgacaatgttctggcagccatgatggccctcttcaccgtctccaccttcgaagggtggccagagctgctgtaccgctccatcgactcccacacggaagacaagggccccatctacaactaccgtgtggagatctccatcttcttcatcatctacatcatcatcatcgccttcttcatgatgaacatcttcgtgggcttcgtcatcgtcacctttcaggagcagggggagcaggagtacaagaactgtgagctggacaagaaccagcgacagtgcgtggaatacgccctcaaggcccggcccctgcggaggtacatccccaagaaccagcaccagtacaaagtgtggtacgtggtcaactccacctacttcgagtacctgatgttcgtcctcatcctgctcaacaccatctgcctggccatgcagcactacggccagagctgcctgttcaaaatcgccatgaacatcctcaacatgctcttcactggcctcttcaccgtggagatgatcctgaagctcattgccttcaaacccaagcactatttctgtgatgcatggaatacatttgacgccttgattgttgtgggtagcattgttgatatagcaatcaccgaggtaaacccagctgaacatacccaatgctctccctctatgaacgcagaggaaaactcccgcatctccatcaccttcttccgcctgttccgggtcatgcgtctggtgaagctgctgagccgtggggagggcatccggacgctgctgtggaccttcatcaagtccttccaggccctgccctatgtggccctcctgatcgtgatgctgttcttcatctacgcggtgatcgggatgcaggtgtttgggaaaattgccctgaatgataccacagagatcaaccggaacaacaactttcagaccttcccccaggccgtgctgctcctcttcaggtgtgccaccggggaggcctggcaggacatcatgctggcctgcatgccaggcaagaagtgtgccccagagtccgagcccagcaacagcacggagggtgaaacaccctgtggtagcagctttgctgtcttctacttcatcagcttctacatgctctgtgccttcctgatcatcaacctctttgtagctgtcatcatggacaactttgactacctgacaagggactggtccatccttggtccccaccacctggatgagtttaaaagaatctgggcagagtatgaccctgaagccaagggtcgtatcaaacacctggatgtggtgaccctcctccggcggattcagccgccactaggttttgggaagctgtgccctcaccgcgtggcttgcaaacgcctggtctccatgaacatgcctctgaacagcgacgggacagtcatgttcaatgccaccctgtttgccctggtcaggacggccctgaggatcaaaacagaagggaacctagaacaagccaatgaggagctgcgggcgatcatcaagaagatctggaagcggaccagcatgaagctgctggaccaggtggtgccccctgcaggtgatgatgaggtcaccgttggcaagttctacgccacgttcctgatccaggagtacttccggaagttcaagaagcgcaaagagcagggccttgtgggcaagccctcccagaggaacgcgctgtctctgcaggctggcttgcgcacactgcatgacatcgggcctgagatccgacgggccatctctggagatctcaccgctgaggaggagctggacaaggccatgaaggaggctgtgtccgctgcttctgaagatgacatcttcaggagggccggtggcctgttcggcaaccacgtcagctactaccaaagcgacggccggagcgccttcccccagaccttcaccactcagcgcccgctgcacatcaacaaggcgggcagcagccagggcgacactgagtcgccatcccacgagaagctggtggactccaccttcaccccgagcagctactcgtccaccggctccaacgccaacatcaacaacgccaacaacaccgccctgggtcgcctccctcgccccgccggctaccccagcacggtcagcactgtggagggccacgggccccccttgtcccctgccatccgggtgcaggaggtggcgtggaagctcagctccaacaggtgccactcccgggagagccaggcagccatggcgggtcaggaggagacgtctcaggatgagacctatgaagtgaagatgaaccatgacacggaggcctgcagtgagcccagcctgctctccacagagatgctctcctaccaggatgacgaaaatcggcaactgacgctcccagaggaggacaagagggacatccggcaatctccgaagaggggtttcctccgctctgcctcactaggtcgaagggcctccttccacctggaatgtctgaagcgacagaaggaccgagggggagacatctctcagaagacagtcctgcccttgcatctggttcatcatcaggcattggcagtggcaggcctgagccccctcctccagagaagccattcccctgcctcattccctaggccttttgccaccccaccagccacacctggcagccgaggctggcccccacagcccgtccccaccctgcggcttgagggggtcgagtccagtgagaaactcaacagcagcttcccatccatccactgcggctcctgggctgagaccacccccggtggcgggggcagcagcgccgcccggagagtccggcccgtctccctcatggtgcccagccaggctggggccccagggaggcagttccacggcagtgccagcagcctggtggaagcggtcttgatttcagaaggactggggcagtttgctcaagatcccaagttcatcgaggtcaccacccaggagctggccgacgcctgcgacatgaccatagaggagatggagagcgcggccgacaacatcctcagcgggggcgccccacagagccccaatggcgccctcttaccctttgtgaactgcagggacgcggggcaggaccgagccgggggcgaagaggacgcgggctgtgtgcgcgcgcggggtcgaccgagtgaggaggagctccaggacagcagggtctacgtcagcagcctgtagtgggcgctgccagatgcgggcttttttttatttgtttcaatgttcctaatgggttcgtttcagaagtgcctcactgttctcgtgacctggagtt

SEQ ID NO: 46915 - DNA, 6477 bp, Artificial Sequence
  derived and/or modified sequence
atggtgaacgagaacaccagaatgtacatccccgaggagaaccaccagggcagcaactacggcagccccagacccgcccacgccaacatgaacgccaacgccgccgccggcctggcccccgagcacatccccacccccggcgccgccctgagctggcaggccgccatcgacgccgccagacaggccaagctgatgggcagcgccggcaacgccaccatcagcaccgtgagcagcacccagagaaagagacagcagtacggcaagcccaagaagcagggcagcaccaccgccaccagaccccccagagccctgctgtgcctgaccctgaagaaccccatcagaagagcctgcatcagcatcgtggagtggaagcccttcgagatcatcatcctgctgaccatcttcgccaactgcgtggccctggccatctacatccccttccccgaggacgacagcaacgccaccaacagcaacctggagagagtggagtacctgttcctgatcatcttcaccgtggaggccttcctgaaggtgatcgcctacggcctgctgttccaccccaacgcctacctgagaaacggctggaacctgctggacttcatcatcgtggtggtgggcctgttcagcgccatcctggagcaggccaccaaggccgacggcgccaacgccctgggcggcaagggcgccggcttcgacgtgaaggccctgagagccttcagagtgctgagacccctgagactggtgagcggcgtgcccagcctgcaggtggtgctgaacagcatcatcaaggccatggtgcccctgctgcacatcgccctgctggtgctgttcgtgatcatcatctacgccatcatcggcctggagctgttcatgggcaagatgcacaagacctgctacaaccaggagggcatcgccgacgtgcccgccgaggacgaccccagcccctgcgccctggagaccggccacggcagacagtgccagaacggcaccgtgtgcaagcccggctgggacggccccaagcacggcatcaccaacttcgacaacttcgccttcgccatgctgaccgtgttccagtgcatcaccatggagggctggaccgacgtgctgtactgggtgaacgacgccgtgggcagagactggccctggatctacttcgtgaccctgatcatcatcggcagcttcttcgtgctgaacctggtgctgggcgtgctgagcggcgagttcagcaaggagagagagaaggccaaggccagaggcgacttccagaagctgagagagaagcagcagctggaggaggacctgaagggctacctggactggatcacccaggccgaggacatcgaccccgagaacgaggacgagggcatggacgaggagaagcccagaaacatgagcatgcccaccagcgagaccgagagcgtgaacaccgagaacgtggccggcggcgacatcgagggcgagaactgcggcgccagactggcccacagaatcagcaagagcaagttcagcagatactggagaagatggaacagattctgcagaagaaagtgcagagccgccgtgaagagcaacgtgttctactggctggtgatcttcctggtgttcctgaacaccctgaccatcgccagcgagcactacaaccagcccaactggctgaccgaggtgcaggacaccgccaacaaggccctgctggccctgttcaccgccgagatgctgctgaagatgtacagcctgggcctgcaggcctacttcgtgagcctgttcaacagattcgactgcttcgtggtgtgcggcggcatcctggagaccatcctggtggagaccaagatcatgagccccctgggcatcagcgtgctgagatgcgtgagactgctgagaatcttcaagatcaccagatactggaacagcctgagcaacctggtggccagcctgctgaacagcgtgagaagcatcgccagcctgctgctgctgctgttcctgttcatcatcatcttcagcctgctgggcatgcagctgttcggcggcaagttcaacttcgacgagatgcagaccagaagaagcaccttcgacaacttcccccagagcctgctgaccgtgttccagatcctgaccggcgaggactggaacagcgtgatgtacgacggcatcatggcctacggcggccccagcttccccggcatgctggtgtgcatctacttcatcatcctgttcatctgcggcaactacatcctgctgaacgtgttcctggccatcgccgtggacaacctggccgacgccgagagcctgaccagcgcccagaaggaggaggaggaggagaaggagagaaagaagctggccagaaccgccagccccgagaagaagcaggagctggtggagaagcccgccgtgggcgagagcaaggaggagaagatcgagctgaagagcatcaccgccgacggcgagagcccccccgccaccaagatcaacatggacgacctgcagcccaacgagaacgaggacaagagcccctaccccaaccccgagaccaccggcgaggaggacgaggaggagcccgagatgcccgtgggccccagacccagacccctgagcgagctgcacctgaaggagaaggccgtgcccatgcccgaggccagcgccttcttcatcttcagcagcaacaacagattcagactgcagtgccacagaatcgtgaacgacaccatcttcaccaacctgatcctgttcttcatcctgctgagcagcatcagcctggccgccgaggaccccgtgcagcacaccagcttcagaaaccacatcctgttctacttcgacatcgtgttcaccaccatcttcaccatcgagatcgccctgaagatcctgggcaacgccgactacgtgttcaccagcatcttcaccctggagatcatcctgaagatgaccgcctacggcgccttcctgcacaagggcagcttctgcagaaactacttcaacatcctggacctgctggtggtgagcgtgagcctgatcagcttcggcatccagagcagcgccatcaacgtggtgaagatcctgagagtgctgagagtgctgagacccctgagagccatcaacagagccaagggcctgaagcacgtggtgcagtgcgtgttcgtggccatcagaaccatcggcaacatcgtgatcgtgaccaccctgctgcagttcatgttcgcctgcatcggcgtgcagctgttcaagggcaagctgtacacctgcagcgacagcagcaagcagaccgaggccgagtgcaagggcaactacatcacctacaaggacggcgaggtggaccaccccatcatccagcccagaagctgggagaacagcaagttcgacttcgacaacgtgctggccgccatgatggccctgttcaccgtgagcaccttcgagggctggcccgagctgctgtacagaagcatcgacagccacaccgaggacaagggccccatctacaactacagagtggagatcagcatcttcttcatcatctacatcatcatcatcgccttcttcatgatgaacatcttcgtgggcttcgtgatcgtgaccttccaggagcagggcgagcaggagtacaagaactgcgagctggacaagaaccagagacagtgcgtggagtacgccctgaaggccagacccctgagaagatacatccccaagaaccagcaccagtacaaggtgtggtacgtggtgaacagcacctacttcgagtacctgatgttcgtgctgatcctgctgaacaccatctgcctggccatgcagcactacggccagagctgcctgttcaagatcgccatgaacatcctgaacatgctgttcaccggcctgttcaccgtggagatgatcctgaagctgatcgccttcaagcccaagcactacttctgcgacgcctggaacaccttcgacgccctgatcgtggtgggcagcatcgtggacatcgccatcaccgaggtgaaccccgccgagcacacccagtgcagccccagcatgaacgccgaggagaacagcagaatcagcatcaccttcttcagactgttcagagtgatgagactggtgaagctgctgagcagaggcgagggcatcagaaccctgctgtggaccttcatcaagagcttccaggccctgccctacgtggccctgctgatcgtgatgctgttcttcatctacgccgtgatcggcatgcaggtgttcggcaagatcgccctgaacgacaccaccgagatcaacagaaacaacaacttccagaccttcccccaggccgtgctgctgctgttcagatgcgccaccggcgaggcctggcaggacatcatgctggcctgcatgcccggcaagaagtgcgcccccgagagcgagcccagcaacagcaccgagggcgagaccccctgcggcagcagcttcgccgtgttctacttcatcagcttctacatgctgtgcgccttcctgatcatcaacctgttcgtggccgtgatcatggacaacttcgactacctgaccagagactggagcatcctgggcccccaccacctggacgagttcaagagaatctgggccgagtacgaccccgaggccaagggcagaatcaagcacctggacgtggtgaccctgctgagaagaatccagccccccctgggcttcggcaagctgtgcccccacagagtggcctgcaagagactggtgagcatgaacatgcccctgaacagcgacggcaccgtgatgttcaacgccaccctgttcgccctggtgagaaccgccctgagaatcaagaccgagggcaacctggagcaggccaacgaggagctgagagccatcatcaagaagatctggaagagaaccagcatgaagctgctggaccaggtggtgccccccgccggcgacgacgaggtgaccgtgggcaagttctacgccaccttcctgatccaggagtacttcagaaagttcaagaagagaaaggagcagggcctggtgggcaagcccagccagagaaacgccctgagcctgcaggccggcctgagaaccctgcacgacatcggccccgagatcagaagagccatcagcggcgacctgaccgccgaggaggagctggacaaggccatgaaggaggccgtgagcgccgccagcgaggacgacatcttcagaagagccggcggcctgttcggcaaccacgtgagctactaccagagcgacggcagaagcgccttcccccagaccttcaccacccagagacccctgcacatcaacaaggccggcagcagccagggcgacaccgagagccccagccacgagaagctggtggacagcaccttcacccccagcagctacagcagcaccggcagcaacgccaacatcaacaacgccaacaacaccgccctgggcagactgcccagacccgccggctaccccagcaccgtgagcaccgtggagggccacggcccccccctgagccccgccatcagagtgcaggaggtggcctggaagctgagcagcaacagatgccacagcagagagagccaggccgccatggccggccaggaggagaccagccaggacgagacctacgaggtgaagatgaaccacgacaccgaggcctgcagcgagcccagcctgctgagcaccgagatgctgagctaccaggacgacgagaacagacagctgaccctgcccgaggaggacaagagagacatcagacagagccccaagagaggcttcctgagaagcgccagcctgggcagaagagccagcttccacctggagtgcctgaagagacagaaggacagaggcggcgacatcagccagaagaccgtgctgcccctgcacctggtgcaccaccaggccctggccgtggccggcctgagccccctgctgcagagaagccacagccccgccagcttccccagacccttcgccaccccccccgccacccccggcagcagaggctggcccccccagcccgtgcccaccctgagactggagggcgtggagagcagcgagaagctgaacagcagcttccccagcatccactgcggcagctgggccgagaccacccccggcggcggcggcagcagcgccgccagaagagtgagacccgtgagcctgatggtgcccagccaggccggcgcccccggcagacagttccacggcagcgccagcagcctggtggaggccgtgctgatcagcgagggcctgggccagttcgcccaggaccccaagttcatcgaggtgaccacccaggagctggccgacgcctgcgacatgaccatcgaggagatggagagcgccgccgacaacatcctgagcggcggcgccccccagagccccaacggcgccctgctgcccttcgtgaactgcagagacgccggccaggacagagccggcggcgaggaggacgccggctgcgtgagagccagaggcagacccagcgaggaggagctgcaggacagcagagtgtacgtgagcagcctgtag

SEQ ID NO: 46916 - protein, 2157 aa, Artificial Sequence
  derived and/or modified sequence
MVNENTRMYIPEENHQGSNYGSPRPAHANMNANAAAGLAPEHIPTPGAALSWQAAIDAARQAKLMGSAGNATISTVSSTQRKRQQYGKPKKQGSTTATRPPRALLCLTLKNPIRRACISIVEWKPFEIIILLTIFANCVALAIYIPFPEDDSNATNSNLERVEYLFLIIFTVEAFLKVIAYGLLFHPNAYLRNGWNLLDFIIVVVGLFSAILEQATKADGANALGGKGAGFDVKALRAFRVLRPLRLVSGVPSLQVVLNSIIKAMVPLLHIALLVLFVIIIYAIIGLELFMGKMHKTCYNQEGIADVPAEDDPSPCALETGHGRQCQNGTVCKPGWDGPKHGITNFDNFAFAMLTVFQCITMEGWTDVLYWVNDAVGRDWPWIYFVTLIIIGSFFVLNLVLGVLSGEFSKEREKAKARGDFQKLREKQQLEEDLKGYLDWITQAEDIDPENEDEGMDEEKPRNMSMPTSETESVNTENVAGGDIEGENCGARLAHRISKSKFSRYWRRWNRFCRRKCRAAVKSNVFYWLVIFLVFLNTLTIASEHYNQPNWLTEVQDTANKALLALFTAEMLLKMYSLGLQAYFVSLFNRFDCFVVCGGILETILVETKIMSPLGISVLRCVRLLRIFKITRYWNSLSNLVASLLNSVRSIASLLLLLFLFIIIFSLLGMQLFGGKFNFDEMQTRRSTFDNFPQSLLTVFQILTGEDWNSVMYDGIMAYGGPSFPGMLVCIYFIILFICGNYILLNVFLAIAVDNLADAESLTSAQKEEEEEKERKKLARTASPEKKQELVEKPAVGESKEEKIELKSITADGESPPATKINMDDLQPNENEDKSPYPNPETTGEEDEEEPEMPVGPRPRPLSELHLKEKAVPMPEASAFFIFSSNNRFRLQCHRIVNDTIFTNLILFFILLSSISLAAEDPVQHTSFRNHILFYFDIVFTTIFTIEIALKMTAYGAFLHKGSFCRNYFNILDLLVVSVSLISFGIQSSAINVVKILRVLRVLRPLRAINRAKGLKHVVQCVFVAIRTIGNIVIVTTLLQFMFACIGVQLFKGKLYTCSDSSKQTEAECKGNYITYKDGEVDHPIIQPRSWENSKFDFDNVLAAMMALFTVSTFEGWPELLYRSIDSHTEDKGPIYNYRVEISIFFIIYIIIIAFFMMNIFVGFVIVTFQEQGEQEYKNCELDKNQRQCVEYALKARPLRRYIPKNQHQYKVWYVVNSTYFEYLMFVLILLNTICLAMQHYGQSCLFKIAMNILNMLFTGLFTVEMILKLIAFKPKGYFSDPWNVFDFLIVIGSIIDVILSETNPAEHTQCSPSMNAEENSRISITFFRLFRVMRLVKLLSRGEGIRTLLWTFIKSFQALPYVALLIVMLFFIYAVIGMQVFGKIALNDTTEINRNNNFQTFPQAVLLLFRCATGEAWQDIMLACMPGKKCAPESEPSNSTEGETPCGSSFAVFYFISFYMLCAFLIINLFVAVIMDNFDYLTRDWSILGPHHLDEFKRIWAEYDPEAKGRIKHLDVVTLLRRIQPPLGFGKLCPHRVACKRLVSMNMPLNSDGTVMFNATLFALVRTALRIKTEEGPSPSEAHQGAEDPFRPAGNLEQANEELRAIIKKIWKRTSMKLLDQVVPPAGDDEVTVGKFYATFLIQEYFRKFKKRKEQGLVGKPSQRNALSLQAGLRTLHDIGPEIRRAISGDLTAEEELDKAMKEAVSAASEDDIFRRAGGLFGNHVSYYQSDGRSAFPQTFTTQRPLHINKAGSSQGDTESPSHEKLVDSTFTPSSYSSTGSNANINNANNTALGRLPRPAGYPSTVSTVEGHGPPLSPAIRVQEVAWKLSSNRCHSRESQAAMAGQEETSQDETYEVKMNHDTEACSEPSLLSTEMLSYQDDENRQLTLPEEDKRDIRQSPKRGFLRSASLGRRASFHLECLKRQKDRGGDISQKTVLPLHLVHHQALAVAGLSPLLQRSHSPASFPRPFATPPATPGSRGWPPQPVPTLRLEGVESSEKLNSSFPSIHCGSWAETTPGGGGSSAARRVRPVSLMVPSQAGAPGRQFHGSASSLVEAVLISEGLGQFAQDPKFIEVTTQELADACDMTIEEMESAADNILSGGAPQSPNGALLPFVNCRDAGQDRAGGEEDAGCVRARGRPSEEELQDSRVYVSSL

SEQ ID NO: 46917 - DNA, 13537 bp, Artificial Sequence
  derived and/or modified sequence
ttattttttcaaatggtgtagccgccggaggtgcggtgctcagttcttggaaggggcccggatgtactgaggatgcgttacagtttcactcgaggaggcagtagtggaaaggagcagtttttggggtttgatgccataatgggaatcaggtaatcgtcggcggggaagaagaaacgctgcagaccacggcttcctcgaatcttgcgcgaaagccgccggcctcggaggagggattaatccagacccgccggggggtgttttcacatttcttcctcttcgtggctgctcctcctattaaaaccatttttggtccatggtcaatgagaatacgaggatgtacattccagaggaaaaccaccaaggttccaactatgggagcccacgccccgcccatgccaacatgaatgccaatgcggcagcggggctggcccctgagcacatccccaccccgggggctgccctgtcgtggcaggcggccatcgacgcagcccggcaggctaagctgatgggcagcgctggcaatgcgaccatctccacagtcagctccacgcagcggaagcggcagcaatatgggaaacccaagaagcagggcagcaccacggccacacgcccgccccgagccctgctctgcctgaccctgaagaaccccatccggagggcctgcatcagcattgtcgaatggaaaccatttgaaataattattttactgactatttttgccaattgtgtggccttagcgatctatattccctttccagaagatgattccaacgccaccaattccaacctggaacgagtggaatatctctttctcataatttttacggtggaagcgtttttaaaagtaatcgcctatggactcctctttcaccccaatgcctacctccgcaacggctggaacctactagattttataattgtggttgtggggctttttagtgcaattttagaacaagcaaccaaagcagatggggcaaacgctctcggagggaaaggggccggatttgatgtgaaggcgctgagggccttccgcgtgctgcgccccctgcggctggtgtccggagtcccaagtctccaggtggtcctgaattccatcatcaaggccatggtccccctgctgcacatcgccctgcttgtgctgtttgtcatcatcatctacgccatcatcggcttggagctcttcatggggaagatgcacaagacctgctacaaccaggagggcatagcagatgttccagcagaagatgacccttccccttgtgcgctggaaacgggccacgggcggcagtgccagaacggcacggtgtgcaagcccggctgggatggtcccaagcacggcatcaccaactttgacaactttgccttcgccatgctcacggtgttccagtgcatcaccatggagggctggacggacgtgctgtactgggtcaatgatgccgtaggaagggactggccctggatctattttgttacactaatcatcatagggtcattttttgtacttaacttggttctcggtgtgcttagcggagagttttccaaagagagggagaaggccaaggcccggggagatttccagaagctgcgggagaagcagcagctagaagaggatctcaaaggctacctggattggatcactcaggccgaagacatcgatcctgagaatgaggacgaaggcatggatgaggagaagccccgaaacatgagcatgcccaccagtgagaccgagtccgtcaacaccgaaaacgtggctggaggtgacatcgagggagaaaactgcggggccaggctggcccaccggatctccaagtcaaagttcagccgctactggcgccggtggaatcggttctgcagaaggaagtgccgcgccgcagtcaagtctaatgtcttctactggctggtgattttcctggtgttcctcaacacgctcaccattgcctctgagcactacaaccagcccaactggctcacagaagtccaagacacggcaaacaaggccctgctggccctgttcacggcagagatgctcctgaagatgtacagcctgggcctgcaggcctacttcgtgtccctcttcaaccgctttgactgcttcgtcgtgtgtggcggcatcctggagaccatcctggtggagaccaagatcatgtccccactgggcatctccgtgctcagatgcgtccggctgctgaggattttcaagatcacgaggtactggaactccttgagcaacctggtggcatccttgctgaactctgtgcgctccatcgcctccctgctccttctcctcttcctcttcatcatcatcttctccctcctggggatgcagctctttggaggaaagttcaactttgatgagatgcagacccggaggagcacattcgataacttcccccagtccctcctcactgtgtttcagatcctgaccggggaggactggaattcggtgatgtatgatgggatcatggcttatggcggcccctcttttccagggatgttagtctgtatttacttcatcatcctcttcatctgtggaaactatatcctactgaatgtgttcttggccattgctgtggacaacctggctgatgctgagagcctcacatctgcccaaaaggaggaggaagaggagaaggagagaaagaagctggccaggactgccagcccagagaagaaacaagagttggtggagaagccggcagtgggggaatccaaggaggagaagattgagctgaaatccatcacggctgacggagagtctccacccgccaccaagatcaacatggatgacctccagcccaatgaaaatgaggataagagcccctaccccaacccagaaactacaggagaagaggatgaggaggagccagagatgcctgtcggccctcgcccacgaccactctctgagcttcaccttaaggaaaaggcagtgcccatgccagaagccagcgcgtttttcatcttcagctctaacaacaggtttcgcctccagtgccaccgcattgtcaatgacacgatcttcaccaacctgatcctcttcttcattctgctcagcagcatttccctggctgctgaggacccggtccagcacacctccttcaggaaccatattctgttttattttgatattgtttttaccaccattttcaccattgaaattgctctgaagatgactgcttatggggctttcttgcacaagggttctttctgccggaactacttcaacatcctggacctgctggtggtcagcgtgtccctcatctcctttggcatccagtccagtgcaatcaatgtcgtgaagatcttgcgagtcctgcgagtactcaggcccctgagggccatcaacagggccaaggggctaaagcatgtggttcagtgtgtgtttgtcgccatccggaccatcgggaacatcgtgattgtcaccaccctgctgcagttcatgtttgcctgcatcggggtccagctcttcaagggaaagctgtacacctgttcagacagttccaagcagacagaggcggaatgcaagggcaactacatcacgtacaaagacggggaggttgaccaccccatcatccaaccccgcagctgggagaacagcaagtttgactttgacaatgttctggcagccatgatggccctcttcaccgtctccaccttcgaagggtggccagagctgctgtaccgctccatcgactcccacacggaagacaagggccccatctacaactaccgtgtggagatctccatcttcttcatcatctacatcatcatcatcgccttcttcatgatgaacatcttcgtgggcttcgtcatcgtcacctttcaggagcagggggagcaggagtacaagaactgtgagctggacaagaaccagcgacagtgcgtggaatacgccctcaaggcccggcccctgcggaggtacatccccaagaaccagcaccagtacaaagtgtggtacgtggtcaactccacctacttcgagtacctgatgttcgtcctcatcctgctcaacaccatctgcctggccatgcagcactacggccagagctgcctgttcaaaatcgccatgaacatcctcaacatgctcttcactggcctcttcaccgtggagatgatcctgaagctcattgccttcaaacccaagggttactttagtgatccctggaatgtttttgacttcctcatcgtaattggcagcataattgacgtcattctcagtgagactaatccagctgaacatacccaatgctctccctctatgaacgcagaggaaaactcccgcatctccatcaccttcttccgcctgttccgggtcatgcgtctggtgaagctgctgagccgtggggagggcatccggacgctgctgtggaccttcatcaagtccttccaggccctgccctatgtggccctcctgatcgtgatgctgttcttcatctacgcggtgatcgggatgcaggtgtttgggaaaattgccctgaatgataccacagagatcaaccggaacaacaactttcagaccttcccccaggccgtgctgctcctcttcaggtgtgccaccggggaggcctggcaggacatcatgctggcctgcatgccaggcaagaagtgtgccccagagtccgagcccagcaacagcacggagggtgaaacaccctgtggtagcagctttgctgtcttctacttcatcagcttctacatgctctgtgccttcctgatcatcaacctctttgtagctgtcatcatggacaactttgactacctgacaagggactggtccatccttggtccccaccacctggatgagtttaaaagaatctgggcagagtatgaccctgaagccaagggtcgtatcaaacacctggatgtggtgaccctcctccggcggattcagccgccactaggttttgggaagctgtgccctcaccgcgtggcttgcaaacgcctggtctccatgaacatgcctctgaacagcgacgggacagtcatgttcaatgccaccctgtttgccctggtcaggacggccctgaggatcaaaacagaagagggacccagcccatcagaggcccaccaaggggctgaggatcctttccgccctgcagggaacctagaacaagccaatgaggagctgcgggcgatcatcaagaagatctggaagcggaccagcatgaagctgctggaccaggtggtgccccctgcaggtgatgatgaggtcaccgttggcaagttctacgccacgttcctgatccaggagtacttccggaagttcaagaagcgcaaagagcagggccttgtgggcaagccctcccagaggaacgcgctgtctctgcaggctggcttgcgcacactgcatgacatcgggcctgagatccgacgggccatctctggagatctcaccgctgaggaggagctggacaaggccatgaaggaggctgtgtccgctgcttctgaagatgacatcttcaggagggccggtggcctgttcggcaaccacgtcagctactaccaaagcgacggccggagcgccttcccccagaccttcaccactcagcgcccgctgcacatcaacaaggcgggcagcagccagggcgacactgagtcgccatcccacgagaagctggtggactccaccttcaccccgagcagctactcgtccaccggctccaacgccaacatcaacaacgccaacaacaccgccctgggtcgcctccctcgccccgccggctaccccagcacggtcagcactgtggagggccacgggccccccttgtcccctgccatccgggtgcaggaggtggcgtggaagctcagctccaacaggtgccactcccgggagagccaggcagccatggcgggtcaggaggagacgtctcaggatgagacctatgaagtgaagatgaaccatgacacggaggcctgcagtgagcccagcctgctctccacagagatgctctcctaccaggatgacgaaaatcggcaactgacgctcccagaggaggacaagagggacatccggcaatctccgaagaggggtttcctccgctctgcctcactaggtcgaagggcctccttccacctggaatgtctgaagcgacagaaggaccgagggggagacatctctcagaagacagtcctgcccttgcatctggttcatcatcaggcattggcagtggcaggcctgagccccctcctccagagaagccattcccctgcctcattccctaggccttttgccaccccaccagccacacctggcagccgaggctggcccccacagcccgtccccaccctgcggcttgagggggtcgagtccagtgagaaactcaacagcagcttcccatccatccactgcggctcctgggctgagaccacccccggtggcgggggcagcagcgccgcccggagagtccggcccgtctccctcatggtgcccagccaggctggggccccagggaggcagttccacggcagtgccagcagcctggtggaagcggtcttgatttcagaaggactggggcagtttgctcaagatcccaagttcatcgaggtcaccacccaggagctggccgacgcctgcgacatgaccatagaggagatggagagcgcggccgacaacatcctcagcgggggcgccccacagagccccaatggcgccctcttaccctttgtgaactgcagggacgcggggcaggaccgagccgggggcgaagaggacgcgggctgtgtgcgcgcgcggggtcgaccgagtgaggaggagctccaggacagcagggtctacgtcagcagcctgtagtgggcgctgccagatgcgggcttttttttatttgtttcaatgttcctaatgggttcgtttcagaagtgcctcactgttctcgtgacctggagttaaccggaacagcgtcttcattcatttctgttgggaccagacgcggagcctgggtgcgcgagccgccctccgggaggaaggcgcccggctgcgtctgcagaggcggggagaggaggcggcgagggtcccggggcgcgaggaaggcgcctgccctctcccagctcgcaggccccgggcccggccgcgcctccgcggggagagcaccccggcttcccgcgcgccctcaccaaaaggaccctacagcaaacgggtgtctttcgactctgcttgtagaaaccatttgcacatattctgtacgagcctcgctgtctccctagagccagggccctgcggatttggagaagggagcggggcaggacttccaggaggaccccaacccggcccggagagggaggaggaggcctccaggggcgcggagctctggggatgggcgtcgggccggcagtggtgcggctcactccgtccctgcccacctgcgacgggatcccccgaccggcacgggccacgccgagctcccggccagccgccggcccgcaggcagcgcgagggaggagctgcgccgccggctccgcccaaccaggtggtgctgagcttccgctgagcgctcttttgttttgtggtttgacacttttcttgacagcatgttgcagtttcttttcggttttggttttttttaaatgttttattttgctttcccagcgggaggggaggaagaagagtgtttacaaagtcctgtagccccctcacctttctgttttcacttttgccaatgtacatcgggtttggttttcttgtattatttaaacggttgtggtttcctttttccacggaggttcaatagaagccgctgcaggagagttttaccaaccattgtgtatgcccaataatttgttatcatttccttaggtagtaacctatttttgttctggtttggttcggttatctaatggaaaggtaactggcaatgcacttgatgtggtcttgcacatgtgggtgatagagttgggttcctttttatgctgggtgtacaggtgggtttgggagagaggagcatgcgcgagagagtctccgagtgtgtgcgacgcgtgtgtgtgtggtgggttgtctgtgtgcatatgtcctgcccgtgtatatgcacccacaccatgtgcccgtgcacaccagtgactacgcagtcccccctttctggtttagctgtgggaagatctgaatctggggccgtttgaaagcaaaaacaaaccactgtctctgcttctgaaacgggaatcagtaactctttgcattttctgtcccacaagatatgcaaaaacaatgcaataatattcatttaaaaatacaattgtgagttgtgttggcattaaaactgtattttaaaaaaagacagaaatttaagggaaaaacacaagaaggcattttgcttcaatatattccgtgtaatgttttattgcattgataatgtttctgttgaagaaaccgttatacttgaattcaggtcagtttcagtatttttcaaatatttttttaaaactgaattgcaattgtgccaagcgaatataatgaattgaattaagttggttttcggattcacttcttgtatattttgctgcatgtaaagtaaatcattttgtatttggagtgtgacaagctttacctttgaactcaagtgcttttctatatgtggttgggggaaagggaacaagttttctttagtttgcacaatgagcaaaggtatcaccagtgtagtcattattctgctctccacaaacaggtttggacattactgttttgcatatcttgtgtttgcttacatttccctcaatttttccaaaatcgtttgctgggtatgtttgtaccgcctcttgctgtgagagaccaggacctattttattccagtcttcactctgtccactctgctctggtcatctgatttggtacttctccaagaacagcccttcactgtgaggtgcagggaggcgttctgatgagccctcagtcactgggccgtcatccgcatcccccatggaagaggtagctggctttcccttcccttccaccacacggaattttctctttggcttccttaggaaagtgtacactaaccgggaggataaaattaaagtcaggctgcttggagggaggggcatcctcacttccggattcttgttgctctacccaacaaggacagcaggggctcgagaaaggaactggtgaaaccctgatccatctgaaagtcaactctgcgtgctcctttctccatcccttcctcactctggagcagcctttccttcaggcttgccctaatgtttgggctgccggggagggggccaggacaagggaagaggcatccggagctcacagtgggggtgggaacagatttttgtgggggcatctctaatgctcacttatatctccctagaacatcactcttttggtgctgtgtccttcaaatgtatgtcaacagtggtggctgaaaagggactgctttggggaaaacaggacccaaccattcacccagaattgacccattaaatctcttccagtcctagtgttccctgagcccctcttggcacatatataagtaagctagaaattacaataagggacagtccattcctctatgacagcttgctggactgattcatgacaaagtggagaaatgtactcaatactccccggttaacacagtctagaaacagagtttctttatggatatccacacccaagtcatccaaactttcttgattccttttcactgccatcaaggtcctctagaaattgagtttaggtatcatcctttgaaaagttcccaagatttctaccaggaggtacacacaggcgttccctgtctagggcaggaggactatcctagcttgaccttctgatccactagaataagactggcgtatgatgcctgtcatcagaacagactggcacaagtagtgacatcaatgaaccacagcacaatcttccaagtgatgtctactctccacctaaaatggaattttccccatgaccttgtaaaacataattgtcacatcttccatacccctcctgacagcccccaagtgtcaggagaaaacagtcaggggctaagggcccaagggacttgaagaaacaacagtttaaggtctgcagtttggtcaacttaattcttgtcctccgaccagccctgcctctttcatttccagaccttggagaatttttcccagctttgattcagaaggtactagttataacccctttccttcttcttaatccaataggcctcactctcactgggaaatccactcaaaggaacaaggcaatgtctctcattctatttcccagttccaaattccaggtgcttgtctggagtgaagctacccgttactttctcccagcttttctccacccagcatgtctcctgcccatgcagctgaagacagtggggcaacctcaggagaagcagacctttccatgcccaagttcatctcctgagcaacagtgacacctagaaaatgaggactttggaagtcacccaaaagatggtggctactttatggagtcctgaagatacacagccaccactcctaaaggcaaagaaagaaaacacgaatgtaggtcagggatagagtggaaccctggtcatcggggtttttagcctcatcgtgggaaaggtggtaaaggaggatgatggcatctccatccctagaggccaagaattgaaatatcattgtcaaggattagaaacaattcagcaaagaggccacaaaaagggcctgctgactcccagaagacctctttaaaccccaggggaggcaaatacttgctgatggagtctgggccgtttccatattttaaagaagacctgcctctggggcaaatgtcagcacagagaggactgggaggagaatggaggcaagaaaagggcatattttgactccctctgtgcctcttcccagttcatggaaggatgtgttcagcttacccacccacagtgaccagtgtggtggagccgctgacatctcaaggatctatttgggaaggtgagaagagtactcattccatctgggggtgttgttccagccacatcagcctacctggtgggatgtgggggtgtctgccaccctgtcccccctctgctgatgtccctcccctcaggctgtccaggtgccacctgacacaggctgctgtgcaaagacaggcggggaagcccaaacctcactcccagggaggccctcagccgccagagtccaggttctccagaggctacgatttgaggaggttgagggggaagacaggagggaaagaaaagtcctacaactgtcaggaatggggcacctttccctgtccctaagcaaagctccctcttcccactgccctccccagccccagctccctgtcctccccaacacctagtgagaaagacggtgcgtggaagggagtcccatgggcagatgcttacacgacctctttgtgaagcctcttctgggtttaacttcattcatcaatttattcttatgtcaaagcaatgaaacttttctttctggagccagataccaatacaacaggtgaacgggtttctgccacatctctacattgacgggggatgcttgaacaacccccctcactacacagacacacaccgttaaggcacaagggctggggttgagctctagatgagggactttcctgctcctgcaagggtgagcactgtatacacagacaaggagggtgcagtagagtgactcccttggatggaagtagtaccatcagaacctactattattatgacataaattctatttacatacattgagagaatactacaatcaacactttttcctgggatgactttaagaggtttgagccacagcacctgaagtggcaaagatccatggtctttgtagggtattagagaactcttccagtcacctctgaaagcactctagatcttgcagctgagtggatgaagtgtaacaaatctgttgcacgctgagaggagtcagaattagcatttttcatgaaagttccccacgtctctactaagaatgaggaagaaaagactaagactaggtaattacacagaggcttgaaatgttacatcaccagagccaagtcctctcccttcagatcagttactggctgctacacagggacacccccaccttttcagggcatcccatgcactccacttctcaggatctaaggaatttgactttgtagggatcccagaaagggcactgtgccacttcccctggtgtgaatcagacatacattgtacattcatttctaaaattcactcatgcacctcaaaccaaggtcattatccaaaaaaaaaaaaaaaaagctctgggtggaagagtttgtaagttttaagagagggtcatttctatgtgaggaaatgcagaaatggacagaatgattcttattcactgtttgggtctggagaattcccattgtggaaatcttagagatctcaagtttattaccaagggaataaggaaaaaaaggtgagcaggcaccaggccaagcagtggctcccttgccaaggaacctgaggctgcaggtttcagggacccccttgaagaaacctctcctggccattggccaggagaaaagagaagtctctcctgtagagtcacaagagaagcaaaagagggtgggtcactgggtcctggacatagcccccaaccccaagacttcccaatatggagaaactacaccaatgtttaaaaggggaaaaggaaagaacttgtacatcaagggaagatgatttgtaaacacacagtcctgtgcagaaagatccccttcaggaggtgtctccagcatcccaaagctgtgcgcaccttctcttttcctgcctcaggccacctatgcatccagctgcagcccatacccacacctgaaatccatctcttgaatcccagccaggttatataccaccccattgccatgtcctgtcctggccagaatgcatgctgttcccccaagcctcgtgggagtgaggccatgggaaacagagatgagcatgtctggacaagtctgtgatggtagtggatgagaataacccatggcaaaacacgcacattcattaagaaatagggcgacagattccccgttggtgaagcactgaaaggtctattactctcataatattgctgttttattttaatccaccagagctaccatgcaaaactttcctcctgtgaaacgctccagataaagctcctctaatctccccttccctcatgtcctccagctcaaacccaccttcatcccccaaaccaatctgtatcatgcctgttatcagagaggcacagaaagatgggcagtgcctccgttgtcaccattccccacacccctacacacccccacaccctcccctccaggctccacgacttcacagtcttactgttgtaaatatcattgtacagtttgtaatcctcaaataatcccattgtcagaggcctcgcctgatgggccttctcaccctcgagaaaggccagggaatctagaaggggcaacccttcaaggagagcttcagggtcatctctgtgtgagacactattgtatattcctgtaagattgcatttttatctaaggaatgatgttatttaaaaaacaaacaaaaaacacaaaaaataagaattgcaaataaatttcttaacaatgtct

SEQ ID NO: 46918 - DNA, 6474 bp, Artificial Sequence
  derived and/or modified sequence
atggtgaacgagaacacccgcatgtacattccggaagaaaatcaccagggcagtaactatggttcgccccgaccagcacacgccaatatgaacgcaaacgcggcggccggcttggctccagaacacatacccactccgggggcggccctgtcctggcaggctgctatcgatgctgcacggcaggcgaagcttatgggtagtgcagggaacgccacaataagcaccgtgtcatctactcagaggaagaggcaacaatacggcaagccgaagaaacaagggtcaacaactgccacccgccctccccgtgctctgctgtgtctgacactcaagaatcccatccgccgcgcctgcatttcgatcgtggagtggaaaccctttgagatcataatcctgttgactatattcgcgaattgtgttgcactcgccatttacataccgttcccggaggacgattctaacgcaactaactctaatctggaacgcgtggaatatctatttctgattatctttacagttgaagctttcctcaaggttatagcctacggacttctgttccaccctaatgcatatctgcgcaatggttggaacctgttggattttatcatcgtcgtcgtgggtcttttttcggcgatcctggagcaagcaaccaaggctgacggggccaacgctcttggcggcaaaggcgctgggttcgacgtcaaagctttgcgggcattcagggttctcaggccattacggctggtttcaggagtgccttcactgcaggtcgtgctaaactctattatcaaggctatggtgcccctactgcacattgccctcctagtcctgtttgtaattataatatacgctatcattggactggagttatttatgggcaaaatgcataaaacctgttacaaccaagagggtatcgccgacgtgcctgccgaggatgacccatcgccctgtgccctcgagacaggacacggcaggcagtgccagaatggcaccgtgtgcaagcccggctgggatggtcccaaacatggaattacgaatttcgacaatttcgctttcgcgatgctcacagtgtttcagtgtattaccatggagggctggaccgatgtactttattgggtcaacgatgccgtcggccgggattggccctggatctacttcgtgacattgatcattatcggaagcttcttcgtgctgaacctggtcctgggcgtgctatcgggggagttctccaaggaaagggagaaagcgaaagccagaggagattttcaaaagctgcgggagaaacaacagttggaagaggatctgaaaggctatctagattggataacccaagctgaagacattgatcctgagaatgaagacgagggcatggatgaagagaaacctagaaatatgtcaatgccaacgtcagagacggaaagcgtgaacacagaaaatgtggcggggggcgacatagagggcgagaattgtggcgcacgtctggcccatcggatctccaaatccaagttcagtaggtattggcgaagatggaacaggttttgccgaagaaaatgtcgcgctgcggtgaaatcaaacgtcttctactggctggtcatcttcctggtgttccttaatactttgaccatagccagtgaacattacaatcagcctaattggttgacagaagtgcaggatactgccaataaggccctgctggctttgtttaccgccgaaatgctgttgaagatgtactccctgggcctgcaggcttactttgtgagcctctttaacagatttgactgtttcgttgtctgtggaggaattctggagacaatcctggtggagactaagatcatgagcccactcgggatttccgtcctgcgatgcgtccgtttgctgcggatcttcaagattactcgatattggaactctttatccaacctcgtcgcaagtctgttgaattctgttcgctcaattgcctccttgctgctgctgttgtttctgtttatcattattttctcactcctaggcatgcagctctttggaggtaaatttaactttgacgagatgcagactcggaggtccacctttgataacttcccccaatctctactgaccgtgtttcagattttaacaggagaagattggaattctgtaatgtacgacggaattatggcatacggaggcccctcatttcccgggatgctggtctgtatctacttcatcatacttttcatatgtggaaactacattttacttaatgtgttcctcgctatcgctgtcgataacctcgccgacgctgaatccctcaccagtgcccagaaggaggaagaggaggaaaaagaaagaaagaagttggctcggaccgcttcgcctgagaagaagcaggagctcgttgaaaagcctgcagtgggcgaaagcaaggaggaaaagatagaattgaagtccatcaccgccgacggggagtcgccacccgctaccaaaatcaatatggacgatctacagccaaacgaaaatgaggacaaatctccataccccaatccagaaacaacgggcgaggaagacgaagaggaacccgaaatgcccgtgggcccgcgaccgcggccactttctgaacttcacctgaaagaaaaagccgtccctatgcctgaagcctctgcctttttcatcttctcctccaacaacaggttccggttacagtgccaccgaatagttaatgatacaattttcacaaatcttatcttattttttatcctcctctcttctatttcactggccgcagaggaccctgtacaacatacgtcttttcgaaatcacatcctgttttactttgatatcgtgtttaccacgatttttaccattgagattgcattgaagatgaccgcctacggggccttcctgcataagggcagcttttgtaggaactactttaatatcctggacttactggtggtgtcagtatctctcatctcctttgggatccagtccagtgcaatcaatgtggtcaagatccttcgcgtgcttagagttcttagacctctcagagccatcaacagggccaagggactgaagcatgtcgtccagtgcgtcttcgttgccatacggacaattggtaatatcgtcatcgtaacaacactcctgcaattcatgtttgcctgcatcggggtccagctcttcaagggaaaactgtacacctgtagcgattcctcaaagcagaccgaagcagaatgtaaggggaactacatcacttacaaggacggagaagtggatcacccgattatccagccccggagctgggaaaactcaaaattcgacttcgacaacgtgctggccgcaatgatggctctctttacggtgagtaccttcgaagggtggcctgaactcctgtatcggagcattgattcacacaccgaagataagggtcctatatataattaccgggtggagatttccatctttttcattatctatattatcatcatcgccttcttcatgatgaatatcttcgtgggttttgtaattgtgacgttccaggaacagggcgagcaagagtacaaaaattgtgagctcgataagaaccagaggcaatgcgtcgaatacgccctgaaggctcgaccgttacgccggtatataccaaagaaccaacatcagtacaaggtgtggtatgtggtgaattctacctactttgagtaccttatgttcgtgctgattctgctcaacaccatatgcctggcaatgcaacattacggccagagctgcctctttaaaatcgcgatgaacattttgaatatgttgtttaccggattgtttacagtcgagatgattttgaaactgattgcttttaaacccaaggggtacttctccgatccctggaacgtgttcgattttttgatcgtcatcggtagcattatcgatgtgatactaagtgagactaaccccgcagaacacactcagtgttcccctagcatgaacgccgaggagaacagcaggatctcgattacattcttcaggctcttcagggtgatgaggctcgtgaaattactatccaggggcgagggtatccggaccttgctatggacatttataaagagcttccaggccttgccttacgtcgctctgcttatcgtgatgctgtttttcatatatgctgttatcggaatgcaggtcttcggaaaaattgcgctgaacgacacaaccgagatcaacagaaataacaacttccagacctttcctcaggccgtcctgttgctattcaggtgtgccacaggggaggcctggcaggacattatgcttgcctgcatgcccggcaagaagtgcgcccctgagagcgaaccctctaactccactgagggcgaaactccctgtgggtccagcttcgctgtgttttacttcatatccttttacatgctctgtgcattcttgatcatcaacctgttcgtggctgtcataatggacaacttcgattatcttacccgcgactggtcgattctagggcctcatcatctggatgagttcaaacgtatatgggctgaatatgatccagaagcaaaaggccgcatcaagcacttggacgtcgtgactctgttgcgccgaattcagcctcccctcgggtttgggaaattatgcccccaccgggttgcctgcaaacgactcgttagcatgaatatgcccctcaacagcgacggaaccgtcatgttcaacgccacattattcgccctcgtgagaaccgcactgcggatcaagaccgaagaggggccttctccttcagaggcccaccagggagcagaggacccattccgccctgctgggaacctagaacaggctaatgaagagctcagggccatcatcaagaagatctggaaacggacctcgatgaaactgctggaccaggtggtcccaccagcaggagatgatgaagtgacagtggggaagttctatgccaccttcctgattcaggagtacttccggaagtttaagaaacggaaagaacagggactagttgggaagcccagtcagagaaatgccttatctttgcaggcgggactgcgaaccttgcatgatattgggccagagatacggcgggcgatttccggcgacctgacagctgaggaagaactcgacaaggctatgaaggaagctgtgtccgccgcttcagaagacgatatattcagacgggcagggggcttgttcggaaaccacgtgagttactatcagtctgatggcaggtcagcattcccacagacctttacaacgcagcgccctctccacatcaataaggcgggtagttcccagggcgatacggaatctccctctcatgagaagctagtcgattcgacttttaccccttcctcatactctagcacaggtagcaacgccaacatcaacaatgccaacaacacagcacttgggcggttaccacggcccgccggataccccagcactgtgagtacggttgaaggacatggcccgccactttcaccagcaattcgcgtacaagaagttgcatggaagctgagctccaaccgctgtcacagccgggaatcgcaggcagcaatggctggccaggaggagacaagtcaggatgaaacatatgaagttaagatgaatcacgacacagaggcctgtagcgaaccttctcttctgagcactgaaatgctcagttaccaggatgatgaaaaccggcaactgacccttccggaagaagataagagggatatcaggcagagccccaaacgggggtttttgcgcagtgcttcgctaggacgacgagcttcatttcatcttgaatgtttaaagcgccaaaaggatcgaggaggcgatatttcgcagaaaactgttctccccctccacctcgtccatcaccaggctttggcagtggccggcctgagccccctcttacagaggagtcatagtcctgcaagctttccacgccctttcgctacccctcccgccacacctggctccaggggttggccaccacagcccgtaccaactctgagactggagggcgtggaaagttctgagaagctgaattcatcctttccttctatacactgtggaagttgggccgaaactacgcctggcggaggtggctcttccgccgctaggagagttcgcccagttagcctgatggttccttctcaagctggcgcccctggtcgtcagttccatggaagcgcttcttctctcgttgaggctgtgctgatttccgaaggtttggggcaatttgcccaagatccaaagttcattgaagtgaccactcaggagctcgcggatgcctgcgacatgacaatcgaggagatggaatcagccgccgacaacatcctaagcggaggcgccccccaaagtcctaacggggccctgctgccatttgtgaactgcagggatgccggtcaggacagggcagggggtgaagaggacgccggatgcgtgcgggcacgagggagaccctcagaagaagagctgcaagattccagagtgtacgtcagctcactgtag

SEQ ID NO: 46919 - DNA, 6474 bp, Artificial Sequence
  derived and/or modified sequence
atggtgaatgaaaacaccaggatgtacatccctgaggagaaccaccagggcagcaactacggcagccccaggcctgcccacgccaacatgaatgccaatgctgctgctggcctggcccctgagcacatccccacccctggggccgccctgtcctggcaggccgccattgatgctgcccggcaggccaagctgatgggcagcgctggaaatgccaccatcagcacagtgagcagcacccagaggaagaggcagcagtatggcaagcccaagaagcagggcagcaccacagccacccggcccccccgggccctgctgtgcctgaccctgaagaaccccatccggcgggcctgcatcagcatcgtggagtggaagccctttgagatcatcatcctgctgaccatctttgccaactgtgtggccctggccatctacatccccttcccagaagatgacagcaatgccaccaacagcaacctggagcgggtggagtacctgttcctgatcatcttcaccgtggaggccttcctgaaggtgattgcctacggcctgctcttccaccccaatgcctacctgagaaatggctggaacctgctggacttcatcatcgtggtggtgggcctcttcagcgccatcctggagcaggccaccaaggcagatggagccaatgccctgggcggcaaaggagctggctttgatgtgaaggccctgcgggccttccgggtgctgcggcccctgcggctggtgtctggagtgcccagcctgcaggtggtgctgaacagcatcatcaaggccatggtgcccctgctgcacatcgccctgctggtgctgtttgtgatcatcatctatgccatcatcggcctggagctgttcatgggcaagatgcacaagacctgctacaaccaggagggcattgctgatgtgcctgcagaagatgaccccagcccctgtgccctggagaccggccacggccggcagtgccagaatggcaccgtgtgcaagccaggctgggatggccccaagcacggcatcaccaactttgacaactttgcctttgccatgctgactgtgttccagtgcatcaccatggagggctggacagatgtgctgtactgggtgaatgatgctgtgggccgggactggccctggatctactttgtgaccctcatcatcatcggcagcttctttgtgctgaacctggtgctgggcgtgctgtctggagagttcagcaaggagcgggagaaggccaaggcccggggggacttccagaagctgcgggagaagcagcagctggaggaggacctgaagggctacctggactggatcacccaggctgaagatattgatcctgaaaatgaagatgagggcatggatgaggagaagcccaggaacatgtccatgcccaccagcgagacagaatctgtgaacacagaaaatgtggccggcggggacatcgagggggagaactgtggggcccggctggcccaccgcatcagcaagagcaagttcagccgctactggaggcgctggaaccgcttctgcaggaggaagtgcagagctgctgtgaagagcaatgtgttctactggctggtgatcttcctggtgttcctgaacaccctgaccatcgccagcgagcactacaaccagcccaactggctgacagaggtgcaggacacagccaacaaggccctgctggccctcttcaccgctgagatgctgctgaagatgtacagcctgggcctgcaggcctactttgtgtccctcttcaacagatttgactgctttgtggtgtgtggcggcatcctggagaccatcctggtggagaccaagatcatgagccccctgggcatctctgtgctgcgctgtgtgcggctgctgcgcatcttcaagatcacccgctactggaacagcctgagcaacctggtggccagcctgctgaacagcgtgcgcagcatcgccagcctgctgctgctgctcttcctgttcatcatcatcttcagcctgctgggcatgcagctgtttggaggcaagttcaactttgatgagatgcagaccaggaggagcacctttgacaacttcccccagagcctgctgaccgtcttccagatcctgaccggggaggactggaacagcgtgatgtatgatggcatcatggcctatggaggccccagcttccctggcatgctggtgtgcatctacttcatcatcctcttcatctgtggcaactacatcctgctgaatgtgttcctggccatcgctgtggacaacctggctgatgctgagagcctgaccagcgcccagaaggaggaggaggaggagaaggagaggaagaagctggccaggacagccagccctgagaagaagcaggagctggtggagaagccagctgtgggggagagcaaggaggagaagattgagctgaagagcatcacagcagatggagagagccccccagccaccaagatcaacatggatgacctgcagcccaatgaaaatgaagacaagagcccctaccccaaccctgagaccactggagaggaggatgaggaggagcctgagatgcctgtgggcccccggccccggcccctgtctgagctgcacctgaaggagaaggctgtgcccatgcctgaggccagcgccttcttcatcttcagcagcaacaaccgcttccggctgcagtgccaccgcatcgtgaatgacaccatcttcaccaacctgatcctcttcttcatcctgctgagcagcatcagcctggccgctgaggaccctgtgcagcacaccagcttcaggaaccacatcctcttctactttgacatcgtgttcaccaccatcttcaccatcgagatcgccctgaagatgacagcctatggagccttcctgcacaagggcagcttctgcaggaactacttcaacatcctggacctgctggtggtgtctgtgtccctcatcagctttggcatccagagcagcgccatcaacgtggtgaagatcctgcgggtgctgcgggtgctgcggcccctgcgggccatcaacagagccaagggcctgaagcacgtggtgcagtgtgtgtttgtggccatccgcaccatcggcaacatcgtcatcgtgaccaccctgctgcagttcatgtttgcctgcatcggcgtgcagctgttcaagggcaagctgtacacctgcagcgacagcagcaagcagacagaagctgagtgcaagggcaactacatcacctacaaggatggagaggtggaccaccccatcatccagcccaggtcctgggagaacagcaagtttgattttgacaacgtgctggccgccatgatggccctcttcaccgtgtccacctttgagggctggccagagctgctgtaccgcagcattgacagccacacagaggacaagggccccatctacaactacagagtggagatcagcatcttcttcatcatctacatcatcatcatcgccttcttcatgatgaacatctttgtgggcttcgtcatcgtgaccttccaggagcagggcgagcaggagtacaagaactgtgagctggacaagaaccagaggcagtgtgtggagtatgccctgaaggcccggcccctgcggcgctacatccccaagaaccagcaccagtacaaggtgtggtacgtggtgaacagcacctactttgagtacctgatgtttgtgctgatcctgctgaacaccatctgcctggccatgcagcactacggccagagctgcctcttcaagatcgccatgaacatcctgaacatgctgttcaccggcctcttcaccgtggagatgatcctgaagctgattgccttcaagcccaagggctacttcagtgacccctggaatgtgtttgacttcctgattgtcatcggcagcatcattgatgtgatcctgtctgagaccaacccagctgagcacacccagtgcagccccagcatgaatgctgaggagaacagccgcatcagcatcaccttcttccgcctcttccgggtgatgaggctggtgaagctgctgagcagaggagagggcatccgcaccctgctgtggaccttcatcaagagcttccaggccctgccctacgtggccctgctgattgtgatgctgttcttcatctatgctgtgattggcatgcaggtgtttgggaagatcgccctgaatgacaccacagagatcaacagaaacaacaacttccagaccttcccccaggccgtgctgctgctcttccgctgtgccaccggggaggcctggcaggacatcatgctggcctgcatgcctgggaagaagtgtgcccctgagagcgagcccagcaacagcacagaaggagagaccccctgtggcagcagctttgctgtgttctacttcatctccttctacatgctgtgtgccttcctgatcatcaacctgtttgtggccgtcatcatggacaactttgactacctgacccgggactggagcatcctgggcccccaccacctggatgagttcaagaggatctgggccgagtatgaccctgaggccaagggccgcatcaagcacctggatgtggtgaccctgctgcggcgcatccagccccccctgggctttgggaagctgtgcccccaccgggtggcctgcaagaggctggtgtccatgaacatgcccctgaacagtgatggcaccgtgatgtttaatgccaccctgtttgccctggtgaggacagccctgcgcatcaagacagaggagggccccagccccagcgaggcccaccagggcgctgaggaccccttccggcctgctggcaacctggagcaggccaatgaggagctgcgggccatcatcaagaagatctggaagaggacctccatgaagctgctggaccaggtggtgcccccagctggagatgatgaggtgacagtgggcaagttctacgccaccttcctgatccaggagtacttcaggaagttcaagaagaggaaggagcagggcctggtgggcaagcccagccagagaaatgccctgagcctgcaggccggcctgcggaccctgcatgacatcggccctgagatcagaagagccatcagcggggacctgacagctgaggaggagctggacaaggccatgaaggaggccgtgtctgctgcctctgaagatgacatcttccggcgggccggcggcctgtttggaaatcatgtgtcctactaccagagtgatggccgcagcgccttcccccagaccttcaccacccagaggcccctgcacatcaacaaggccggcagcagccagggcgacacagagagccccagccatgagaagctggtggacagcaccttcacccccagcagctacagcagcacaggcagcaatgccaacatcaacaatgccaacaacacagccctgggccgcctgcccaggcctgctggctaccccagcacagtgtccacagtggagggccacggcccccccctgagccctgccatccgggtgcaggaggtggcctggaagctgagcagcaaccgctgccacagccgggagagccaggccgccatggccggccaggaggagaccagccaggatgagacctatgaggtgaagatgaaccacgacacagaggcctgcagcgagcccagcctgctgagcacagagatgctgagctaccaggatgatgagaaccggcagctgaccctgcctgaggaggacaagagggacatccggcagagccccaagaggggcttcctgcggagcgccagcctgggccggcgggccagcttccacctggagtgcctgaagaggcagaaggaccggggcggggacatcagccagaagacagtgctgcccctgcacctggtgcaccaccaggccctggccgtggccggcctgagccccctgctgcagaggagccacagccctgccagcttcccccggccctttgccaccccaccagccaccccaggcagccggggctggccaccccagcctgtgcccaccctgcggctggagggcgtggagagcagcgagaagctgaacagcagcttccccagcatccactgcggctcctgggccgagaccaccccaggcggcggcggcagcagcgctgcccggcgggtgcggcctgtgtccctgatggtgcccagccaggccggggcccctggccggcagttccacggcagcgccagcagcctggtggaggccgtgctgatcagcgagggcctgggccagtttgcccaggaccccaagttcatcgaggtgaccacccaggagctggctgatgcctgtgacatgaccatcgaggagatggagagcgctgctgacaacatcctgagcggcggggccccccagagccccaacggggccctgctgccctttgtgaactgcagagatgctggccaggacagagctggaggagaagaagatgctggctgtgtgcgggcccggggccggcccagcgaggaggagctgcaggacagccgggtgtatgtgagcagcctgtag

SEQ ID NO: 46920 - DNA, 6474 bp, Artificial Sequence
  derived and/or modified sequence
atggtgaacgagaacacccggatgtacatccccgaggagaaccaccaagggtccaattatggctcacccagacctgcccacgccaatatgaatgcaaatgctgcagcaggcctggcaccagagcacattcccaccccgggcgcagccctatcttggcaggccgcaatcgacgccgcaagacaggccaaactgatgggctctgcgggcaacgcaactatctctactgtgagttctacacagaggaaaagacaacagtacggcaagccaaagaagcagggttctactacagcgacaagacctccacgcgccctgctgtgtctgaccctgaagaatcctatccggagagcttgcatttcaatcgttgagtggaaacctttcgagatcatcattctactcacaatcttcgccaactgtgtggccctggcaatttacattcctttcccagaggatgactcaaacgcaaccaattcaaatctggagcgcgtagagtacctgtttctgataatctttactgtggaggctttcctcaaggttatcgcctatgggctgctgtttcatcccaacgcctacctacgcaatgggtggaatcttcttgattttataattgtcgtggtgggactgttcagcgcaattttggagcaagcaaccaaggcagatggagcgaatgctcttggagggaaaggggctggattcgacgtcaaggccctccgcgcattcagagtcctgcggcctctacgacttgtctctggggttccatccctacaagttgtgcttaatagtataataaaagcaatggtcccattactgcatatcgcacttttggtcctctttgtcatcattatctatgcaattattgggctcgagctctttatggggaagatgcataaaacctgttataatcaagaggggattgccgatgttcctgcagaggacgacccatctccctgtgctctagagaccggacatgggcggcagtgtcaaaacgggactgtgtgtaagcctggatgggacggaccaaaacacggaataaccaattttgacaatttcgcatttgctatgctgaccgtatttcagtgcatcacaatggaggggtggacagacgtcctgtactgggtcaacgacgctgttggtagggactggccgtggatttattttgtcacgctgataatcatcggttcgttttttgtactgaacctggtcctcggggtgctgtcgggcgaattctctaaggaacgcgagaaggcaaaagcgcgcggagatttccagaagctccgcgagaagcaacagttagaggaggacctgaaggggtacctggactggataactcaggctgaggacatagacccggagaacgaagatgaggggatggacgaggaaaagcctcgcaacatgtcaatgccaactagcgagaccgagtctgttaatacagagaacgtggctggcggcgatatcgagggggagaactgcggagccagactcgcccatcgaatcagcaagtctaagttctcgcggtactggcggaggtggaaccggttctgcaggcggaaatgccgcgccgcagtaaaaagcaacgtgttctactggctcgtgattttcctggtgtttcttaatacacttaccatcgcatcagaacattacaaccagcctaactggcttacggaggtccaagacacagctaacaaagcccttctcgctctcttcactgccgagatgctgcttaaaatgtattctctcggtctgcaggcgtactttgtgtccctgtttaacaggttcgactgttttgtggtttgtggtgggattttggaaacaatcttggtcgagaccaaaattatgtctccgctcggaatctcagttctcaggtgcgttcgccttctgcggatcttcaagatcacaaggtactggaactccttaagcaatctggtggcttctctgctgaactccgtcagaagcatcgcttctctgctactgcttttgttcctctttatcattatcttctctttgctcggaatgcagctattcggcggtaagtttaacttcgacgagatgcaaacccgccggagcacattcgacaattttccacaaagcctcttaacagtttttcagattttgacaggggaggattggaactcagtgatgtatgatggcatcatggcctatggcggtcctagcttccccgggatgttggtctgcatctatttcattatactgtttatttgcggcaattacatcttgcttaatgtgtttctcgcgatcgctgttgataatcttgccgatgcagagagtctgacttccgcccaaaaagaggaagaagaagagaaggagcggaaaaaactcgcgagaaccgcttctcctgagaaaaaacaggagctcgtggagaaacccgcggtgggcgagagcaaagaagaaaagattgaactgaaatccatcaccgcggatggagaatcaccaccagcaaccaaaatcaacatggacgacctacaacccaacgagaatgaagacaagtcaccttacccgaatcccgaaaccacaggagaggaggatgaagaagagcctgagatgcctgtgggacccaggccacggcctctaagtgagttgcaccttaaggagaaggctgttccaatgcctgaagcttctgctttctttattttcagttcaaacaatcggtttcggctgcagtgtcatagaatagtcaacgatacaatatttaccaatctgatcttgttcttcattttactgtcttctatatcactcgctgccgaagaccccgttcagcacacgtcctttcggaatcacatcctgttctatttcgacatcgtgtttaccactattttcaccatagagattgccttaaaaatgacagcatacggcgccttcttgcataagggttctttctgccgtaactacttcaatattcttgatctgctggtcgtctctgtgtcgctgatctcattcggcatccaatcttcagccattaatgtggtcaaaatcttaagagttctccgagtgctgcgcccactgagggcgattaatcgcgccaagggtctaaaacatgtggtgcagtgtgtatttgttgctatccgcaccatcggcaatatcgtaattgtaaccacactgttgcagttcatgtttgcatgtatcggcgtgcagctttttaaggggaaattgtacacctgctcagacagttccaaacagacagaagctgaatgtaaagggaactacatcacttacaaagatggggaagtcgatcacccaatcatccagccccgctcttgggagaactctaaatttgacttcgataacgtgttggcagcaatgatggcattatttaccgtgtcgacttttgaggggtggccggagctcttgtaccgaagcatcgatagccacacggaggacaagggacccatctacaattaccgcgtggagatatccatctttttcatcatctacattatcattattgcattttttatgatgaacatcttcgtaggtttcgttatcgtcacatttcaggagcaaggagaacaggagtataaaaattgcgagctggataagaatcagaggcagtgcgtggaatatgcactcaaggcccgccccctgaggcgctatataccaaaaaaccagcaccagtacaaggtgtggtatgtcgtcaacagtacgtacttcgaatatctgatgttcgtgttgatcttgctgaacacaatatgtctggctatgcagcactacggacagagctgtctttttaaaattgctatgaacatcctgaatatgttgttcacaggtctctttaccgttgagatgatcttaaagctcatcgcattcaagccaaagggctattttagtgacccctggaacgtgttcgactttctaatcgtgatcggctcaatcattgatgttatcctttcagagactaatcctgccgagcacacacagtgtagcccgtcaatgaacgcggaggaaaactcccgtattagcatcaccttttttcgactgttcagggtgatgcgcctggtgaaactgcttagtaggggtgagggcatccgaacgctgctgtggactttcatcaagtcctttcaggcattgccttacgtagcattgctgatagtgatgcttttcttcatttacgccgttatcggaatgcaagtgtttggaaaaattgcgttgaacgacacaaccgagattaacagaaataacaatttccagaccttcccccaggcagtattattattgttcaggtgtgcgaccggcgaagcctggcaggatataatgctcgcttgtatgcctgggaaaaagtgtgcccctgaatccgagccctcaaatagcacagaaggagagaccccttgcggctccagctttgccgtgttctacttcatcagcttctacatgttatgcgcatttctcatcatcaatcttttcgttgctgtgattatggataacttcgactatctgacccgcgactggtccattctcggaccgcaccatctagacgagtttaaaagaatttgggccgaatacgaccccgaggccaagggccggattaagcacctggacgtagtcactctcttgcggaggattcaaccccccctgggctttggcaagttgtgtccgcatagagtcgcttgcaagcggttggtctcaatgaacatgccactgaacagcgacggaactgtgatgtttaacgctactctattcgccttggtccgcaccgccctaaggattaagaccgaagaaggtccctcccctagtgaggctcaccagggcgccgaagacccattcaggcctgctggcaacctggagcaggccaatgaggaacttagggccattatcaaaaagatctggaagagaacctctatgaagctcctggatcaggtggtacctcctgccggggacgacgaagtgacggtcggtaaattctatgccacttttctgatacaagagtacttcaggaaattcaagaagagaaaggagcagggacttgtgggcaaaccctcccagagaaatgcgcttagccttcaagcaggcctccgtacactgcatgacatcggccccgaaattaggcgggccatcagcggagatctcaccgcagaggaagaactcgacaaagccatgaaagaagccgtgagcgcagctagtgaagatgatatctttcggcgcgctggaggattatttgggaaccatgtcagctactaccagagcgacggacggtcagcctttccacagacgttcacaacacaacggcccctccacatcaacaaggcaggatcatcgcagggggatactgaatctccctcacatgaaaaactggttgacagcacattcactcctagttcctatagctccaccgggagcaatgctaatatcaataacgccaataacactgctctcgggcgccttccgaggccagcaggttacccttccactgtgagcacagtggagggccacggtccaccactttcaccagctatccgtgtgcaggaggtggcatggaaattatctagtaataggtgtcacagcagagagtcacaggcagctatggcgggccaggaggaaaccagtcaggatgagacatatgaggttaaaatgaatcatgatacggaggcatgctctgagccatcactgttgtcaacagaaatgctctcgtaccaggatgatgaaaaccggcagctgacactcccagaggaggataaacgtgatatccgccagagtccaaaacgcggattcttgcggagcgccagccttggcaggcgagcatctttccatctggagtgtctgaaaagacagaaagaccgcggcggcgacatatcccaaaaaaccgtgttacctttacacttagtccaccaccaggccctagccgtcgccggcctgtcccctctattgcagagatcccactcgcctgcttcctttccacgaccattcgccaccccccctgctacacccggcagccgcggctggcccccgcagcctgtaccgactctgcggctggaaggagtggagagctccgaaaagctgaactcttcgtttccctcaatccattgcgggagctgggccgagaccactcctggcggcgggggtagcagcgcagccagacgcgtgcgccctgtttccctcatggtgccatctcaagctggcgcccccggccggcagttccacggttctgcctccagtctcgtggaagcggttcttatctcagaaggattaggccagttcgctcaggatccgaaatttattgaggtgaccacccaagagctagccgatgcatgcgacatgacgatcgaggagatggaatccgcggccgataatatccttagtggcggcgccccacagtctcctaatggtgctcttctgcctttcgtgaattgcagagatgctggacaggacagggccggaggcgaggaggacgcaggttgcgtacgtgcaagaggcaggcccagcgaagaggagttacaggacagccgggtgtacgtcagttcactctag

SEQ ID NO: 46921 - DNA, 6473 bp, Artificial Sequence
  derived and/or modified sequence
atggtgaatgagaacactcgcatgtatattccagaggagaaccatcagggcagtaactacggatcacccaggccagctcatgcaaacatgaacgcaaacgcagcggcaggccttgccccagagcatatacccacccccggagctgccctgagctggcaggcagcgattgacgctgccaggcaagctaaactcatggggagcgcagggaacgccactatatccaccgttagttccactcagcgcaaaaggcagcagtacggcaagcctaagaagcagggatctaccaccgcaactcggcctccccgtgcacttttgtgtttgacacttaaaaacccaattcggagggcctgcatctccatcgtcgaatggaaaccttttgaaatcatcatcttattaacgatctttgctaattgcgtggctctggctatctatatcccgtttcccgaggacgatagcaacgccaccaattctaacctggaacgcgtagaatacctctttctgataatctttactgtggaagccttcctgaaggttatcgcttatggtttactgtttcatcctaacgcgtatctcagaaatggatggaatttactggacttcattatcgtcgtcgtcggactcttctccgccatcttggaacaggcgaccaaagccgacggcgcaaatgctctgggaggcaagggcgctgggttcgatgtgaaggcactccgggcttttcgagtcctcagacccttgaggttggtctccggcgtaccctcgttgcaggtcgtgttaaattctataattaaggccatggtacccctcttgcacatcgcactgctcgtattatttgtgataatcatttacgctatcataggtttggagctgttcatgggcaagatgcataagacgtgttataaccaggagggaattgccgatgtgccagcagaggacgatccctccccatgcgcccttgagaccggccatggccgacagtgccagaacgggaccgtctgcaaacccggatgggacgggccaaagcacggcattactaacttcgacaatttcgccttcgccatgctcaccgtgttccaatgtatcaccatggaggggtggactgatgtactgtactgggtaaacgacgccgttggcagagactggccctggatatacttcgtcacactgatcatcattggctcattcttcgtactgaatttggtgttgggtgtactttcaggagagttctccaaagagcgggaaaaggctaaggcgagaggggatttccagaaattgcgcgagaagcagcagctcgaggaagatctgaaagggtacctcgactggataacacaggctgaagacatcgatcctgagaacgaggacgaaggaatggatgaggaaaaacccaggaatatgtcaatgccaacttccgagacggaatccgttaacaccgaaaatgtagcgggaggggacatcgaaggggaaaattgtggagctcgcttagcccacagaattagcaagtccaagttcagcagatattggcggagatggaaccgcttctgccgtcgcaaatgcagagctgccgtgaagagcaacgttttttactggttggttatctttctggtttttctaaatactttgactatcgcgagcgaacattacaatcagccgaattggctgactgaggtccaggatactgcaaataaagccctattggctttgttcacagcagagatgctcctgaagatgtactccctgggtctgcaggcctacttcgtgtcactgttcaatagattcgactgcttcgttgtgtgtggtggcatactcgagaccattcttgtggaaaccaaaatcatgtcacctttaggtatctctgtcctgcgctgcgttagattgctaaggatcttcaagataacccgctattggaactctctctcaaaccttgttgcctccctgcttaacagtgtgaggtctattgcatcgttgttgttgctattgtttctgtttatcatcattttttccctgcttggtatgcagctgtttgggggaaagttcaacttcgacgaaatgcaaactcggcgaagtacgtttgacaatttcccccagtcgctgttgacggtctttcagattctgacgggcgaggactggaacagcgtgatgtacgatggcatcatggcctatggaggaccgtcctttccgggaatgttggtctgcatctatttcatcatccttttcatctgcggcaactatattctgctaaacgtgtttctcgccatagctgttgataatttggccgatgctgagagtcttacgtctgctcaaaaggaggaggaagaagagaaggagagaaagaagctcgcaaggactgccagccctgagaagaagcaggagcttgttgaaaagcctgcggttggtgagtctaaagaggaaaaaatagaactgaagtcgatcaccgccgacggggagtcgccacccgctaccaagatcaatatggacgatctgcaacccaatgaaaatgaggacaagagcccttaccctaatcccgagactactggcgaggaggatgaggaagagcctgagatgccagttggtcctcgcccacggcctctttccgaattgcacctgaaggaaaaggctgtgcccatgcccgaggcaagtgccttctttatattttcctcaaataatcgttttagattgcagtgtcaccggatcgtgaacgacactatttttaccaacctgatcctgttttttatactcctgtccagcatcagtctggcggctgaggatccggtccagcacacctcctttaggaatcatattttgttctacttcgatatagtgttcaccactatctttaccatcgaaattgcccttaagatgacggcgtatggcgcatttctgcacaaaggtagcttctgcaggaattatttcaacatcttggatttattggttgtttctgtgagcctgatctccttcggcattcagagtagcgctataaacgtggtcaagattctgcgagtcctccgcgtattgcgcccacttagagctatcaacagggccaaaggtctgaaacacgtggtgcagtgtgtgttcgtggccatccggaccatcgggaacatcgttatcgtgacaacgctattacagtttatgttcgcatgcatcggcgtgcaactattcaagggtaagctatacacctgttctgactcaagtaaacagacagaggctgaatgcaagggaaattatatcacatataaggacggagaagtcgaccaccccattatccagccaagaagctgggagaattcaaaattcgatttcgacaatgtgctggcagctatgatggccttgttcaccgtaagcacatttgaaggttggcccgaattgctttatcgaagtattgattcacacactgaagacaaagggcctatttataattaccgagttgagattagcatattcttcatcatctacatcattattatcgcttttttcatgatgaatatcttcgtcggctttgttattgtgacattccaggaacagggagagcaggagtataaaaattgtgagctcgataaaaatcaaagacagtgcgtagagtacgctctcaaagcacgccctttgcggcgttatatacctaagaatcagcatcagtataaggtgtggtacgtggtcaatagcacctactttgaatatctgatgtttgtactcatccttctgaacacgatttgcctggccatgcaacactacggccagagctgtctgttcaaaattgctatgaatatcttgaacatgttgtttacgggcctgttcacagttgaaatgattctgaaattaatcgcatttaaacccaagggctacttctccgatccctggaacgtgtttgactttctgatcgtgatcggctctataattgatgtaatactctctgaaacgaaccccgctgagcatactcagtgctctccctccatgaatgccgaagagaactcacgaattagtataacattttttcgcctgttccgtgtcatgcggcttgtcaaactgctaagtcgcggtgagggcatccggacccttctttggactttcattaagagcttccaggctttgccgtatgtggccctcctgatagtgatgctgtttttcatctacgccgtcattgggatgcaggtctttggcaagatcgccctgaacgatacaacggagatcaatcggaacaataactttcagaccttccctcaggctgttctccttcttttccgttgcgctaccggggaagcctggcaggatattatgttggcctgtatgcctggtaaaaagtgcgctcccgaatccgaaccaagcaactctacagaaggcgaaacaccttgcgggtcttctttcgcagtgttctacttcattagcttttacatgctgtgtgcatttctgatcattaacctttttgtcgcagtaatcatggataattttgactatctaactcgagattggtctatcctggggcctcaccacctagacgagttcaaacggatttgggcagagtatgatccagaggctaagggaagaatcaagcacctggatgtagtgaccctgctgcgcagaatccagccccctctcggcttcggcaaactttgtccccaccgtgttgcttgtaagcggctagtgagcatgaacatgcccctgaactcagatgggacagttatgttcaacgctactttgttcgccctagtgcggaccgctctccgcataaaaactgaggagggccctagtccatctgaggcacaccaaggcgctgaagatccttttcggcctgcgggaaacctagagcaggctaatgaggagttgcgagctatcattaaaaagatttggaagagaacaagtatgaaactgctggatcaggtcgttccacccgctggcgatgatgaagtgaccgttggaaaattttatgcaacgtttttaatccaggaatacttccgaaagtttaagaagcgaaaggaacaaggactcgtcggcaaaccctcccagaggaatgcgttgtccctccaggccggtctacgaaccttacatgacattggaccggaaattcgcagggccattagtggggacctcaccgcagaggaagagctggacaaagcaatgaaggaagcggtgtccgccgcaagcgaggacgatatcttccggcgtgctggcggattgtttggcaatcatgtgagttattaccagagcgatggtcggagcgcatttccacagacatttactactcaacgtccattgcacataaataaggctggcagttcccagggcgatacagagtctcctagccatgaaaagttggtggattcgactttcacaccctcctcgtattcctcaaccggaagcaacgccaatattaacaacgctaataacaccgcgctgggacgcctccctcgccctgcaggctacccgagcaccgtcagcaccgtggaaggacacggaccccctctctctcctgcgattcgagttcaggaggtcgcctggaagcttagttcaaaccgctgtcattcccgggaatctcaggccgcaatggccggtcaagaagaaacttcacaagacgaaacgtatgaggtgaagatgaaccacgataccgaggcatgcagcgagccaagcttgctgtctactgaaatgctttcctatcaagacgacgaaaatagacagttaaccctgcctgaagaagacaagcgggacatccgtcagtctccaaaacggggttttctcagaagtgccagtctgggtcgcagagcctcttttcacctagagtgcttgaagcggcagaaggatagaggtggcgacatctcacagaaaacagtgctgccactgcaccttgtccaccatcaggctctcgccgtagctggcctctctcctctccttcagagaagccattccccggcatcatttcccagaccctttgctactccccctgctacccccggttctcgcggatggccaccccagcctgtgcctactttacgcttggaaggcgttgagtcaagcgaaaagttgaattcatctttcccctctatacactgcggctcttgggccgagacaaccccaggcggtggcggaagttccgcggcacggagggtgcgaccagttagccttatggtgccctcacaggcaggcgcacccggtaggcagttccacgggtccgcctctagtcttgtggaagcagttcttatttctgagggtttgggccagtttgcacaggacccaaaatttatcgaggtcacgacacaggagttggccgacgcctgcgacatgaccatcgaagagatggaatccgccgcagacaacatactttccggcggtgctccacagtcaccgaacggcgcactgctgccgtttgtgaattgccgggatgcagggcaggacagggcaggaggagaggaagatgctggatgcgtgcgagcgagagggcgaccctctgaggaggaactgcaggattcccgggtctacgtatcttcacttta

SEQ ID NO: 46922 - DNA, 6568 bp, Artificial Sequence
  derived and/or modified sequence
atggtcaatgagaatacgaggatgtacattccagaggaaaaccaccaaggttccaactatgggagcccacgccccgcccatgccaacatgaatgccaatgcggcagcggggctggcccctgagcacatccccaccccgggggctgccctgtcgtggcaggcggccatcgacgcagcccggcaggctaagctgatgggcagcgctggcaatgcgaccatctccacagtcagctccacgcagcggaagcggcagcaatatgggaaacccaagaagcagggcagcaccacggccacacgcccgccccgagccctgctctgcctgaccctgaagaaccccatccggagggcctgcatcagcattgtcgaatggaaaccatttgaaataattattttactgactatttttgccaattgtgtggccttagcgatctatattccctttccagaagatgattccaacgccaccaattccaacctggaacgagtggaatatctctttctcataatttttacggtggaagcgtttttaaaagtaatcgcctatggactcctctttcaccccaatgcctacctccgcaacggctggaacctactagattttataattgtggttgtggggctttttagtgcaattttagaacaagcaaccaaagcagatggggcaaacgctctcggagggaaaggggccggatttgatgtgaaggcgctgagggccttccgcgtgctgcgccccctgcggctggtgtccggagtcccaagtctccaggtggtcctgaattccatcatcaaggccatggtccccctgctgcacatcgccctgcttgtgctgtttgtcatcatcatctacgccatcatcggcttggagctcttcatggggaagatgcacaagacctgctacaaccaggagggcatagcagatgttccagcagaagatgacccttccccttgtgcgctggaaacgggccacgggcggcagtgccagaacggcacggtgtgcaagcccggctgggatggtcccaagcacggcatcaccaactttgacaactttgccttcgccatgctcacggtgttccagtgcatcaccatggagggctggacggacgtgctgtactgggtcaatgatgccgtaggaagggactggccctggatctattttgttacactaatcatcatagggtcattttttgtacttaacttggttctcggtgtgcttagcggagagttttccaaagagagggagaaggccaaggcccggggagatttccagaagctgcgggagaagcagcagctagaagaggatctcaaaggctacctggattggatcactcaggccgaagacatcgatcctgagaatgaggacgaaggcatggatgaggagaagccccgaaacatgagcatgcccaccagtgagaccgagtccgtcaacaccgaaaacgtggctggaggtgacatcgagggagaaaactgcggggccaggctggcccaccggatctccaagtcaaagttcagccgctactggcgccggtggaatcggttctgcagaaggaagtgccgcgccgcagtcaagtctaatgtcttctactggctggtgattttcctggtgttcctcaacacgctcaccattgcctctgagcactacaaccagcccaactggctcacagaagtccaagacacggcaaacaaggccctgctggccctgttcacggcagagatgctcctgaagatgtacagcctgggcctgcaggcctacttcgtgtccctcttcaaccgctttgactgcttcgtcgtgtgtggcggcatcctggagaccatcctggtggagaccaagatcatgtccccactgggcatctccgtgctcagatgcgtccggctgctgaggattttcaagatcacgaggtactggaactccttgagcaacctggtggcatccttgctgaactctgtgcgctccatcgcctccctgctccttctcctcttcctcttcatcatcatcttctccctcctggggatgcagctctttggaggaaagttcaactttgatgagatgcagacccggaggagcacattcgataacttcccccagtccctcctcactgtgtttcagatcctgaccggggaggactggaattcggtgatgtatgatgggatcatggcttatggcggcccctcttttccagggatgttagtctgtatttacttcatcatcctcttcatctgtggaaactatatcctactgaatgtgttcttggccattgctgtggacaacctggctgatgctgagagcctcacatctgcccaaaaggaggaggaagaggagaaggagagaaagaagctggccaggactgccagcccagagaagaaacaagagttggtggagaagccggcagtgggggaatccaaggaggagaagattgagctgaaatccatcacggctgacggagagtctccacccgccaccaagatcaacatggatgacctccagcccaatgaaaatgaggataagagcccctaccccaacccagaaactacaggagaagaggatgaggaggagccagagatgcctgtcggccctcgcccacgaccactctctgagcttcaccttaaggaaaaggcagtgcccatgccagaagccagcgcgtttttcatcttcagctctaacaacaggtttcgcctccagtgccaccgcattgtcaatgacacgatcttcaccaacctgatcctcttcttcattctgctcagcagcatttccctggctgctgaggacccggtccagcacacctccttcaggaaccatattctgttttattttgatattgtttttaccaccattttcaccattgaaattgctctgaagatgactgcttatggggctttcttgcacaagggttctttctgccggaactacttcaacatcctggacctgctggtggtcagcgtgtccctcatctcctttggcatccagtccagtgcaatcaatgtcgtgaagatcttgcgagtcctgcgagtactcaggcccctgagggccatcaacagggccaaggggctaaagcatgtggttcagtgtgtgtttgtcgccatccggaccatcgggaacatcgtgattgtcaccaccctgctgcagttcatgtttgcctgcatcggggtccagctcttcaagggaaagctgtacacctgttcagacagttccaagcagacagaggcggaatgcaagggcaactacatcacgtacaaagacggggaggttgaccaccccatcatccaaccccgcagctgggagaacagcaagtttgactttgacaatgttctggcagccatgatggccctcttcaccgtctccaccttcgaagggtggccagagctgctgtaccgctccatcgactcccacacggaagacaagggccccatctacaactaccgtgtggagatctccatcttcttcatcatctacatcatcatcatcgccttcttcatgatgaacatcttcgtgggcttcgtcatcgtcacctttcaggagcagggggagcaggagtacaagaactgtgagctggacaagaaccagcgacagtgcgtggaatacgccctcaaggcccggcccctgcggaggtacatccccaagaaccagcaccagtacaaagtgtggtacgtggtcaactccacctacttcgagtacctgatgttcgtcctcatcctgctcaacaccatctgcctggccatgcagcactacggccagagctgcctgttcaaaatcgccatgaacatcctcaacatgctcttcactggcctcttcaccgtggagatgatcctgaagctcattgccttcaaacccaagggttactttagtgatccctggaatgtttttgacttcctcatcgtaattggcagcataattgacgtcattctcagtgagactaatccagctgaacatacccaatgctctccctctatgaacgcagaggaaaactcccgcatctccatcaccttcttccgcctgttccgggtcatgcgtctggtgaagctgctgagccgtggggagggcatccggacgctgctgtggaccttcatcaagtccttccaggccctgccctatgtggccctcctgatcgtgatgctgttcttcatctacgcggtgatcgggatgcaggtgtttgggaaaattgccctgaatgataccacagagatcaaccggaacaacaactttcagaccttcccccaggccgtgctgctcctcttcaggtgtgccaccggggaggcctggcaggacatcatgctggcctgcatgccaggcaagaagtgtgccccagagtccgagcccagcaacagcacggagggtgaaacaccctgtggtagcagctttgctgtcttctacttcatcagcttctacatgctctgtgccttcctgatcatcaacctctttgtagctgtcatcatggacaactttgactacctgacaagggactggtccatccttggtccccaccacctggatgagtttaaaagaatctgggcagagtatgaccctgaagccaagggtcgtatcaaacacctggatgtggtgaccctcctccggcggattcagccgccactaggttttgggaagctgtgccctcaccgcgtggcttgcaaacgcctggtctccatgaacatgcctctgaacagcgacgggacagtcatgttcaatgccaccctgtttgccctggtcaggacggccctgaggatcaaaacagaagagggacccagcccatcagaggcccaccaaggggctgaggatcctttccgccctgcagggaacctagaacaagccaatgaggagctgcgggcgatcatcaagaagatctggaagcggaccagcatgaagctgctggaccaggtggtgccccctgcaggtgatgatgaggtcaccgttggcaagttctacgccacgttcctgatccaggagtacttccggaagttcaagaagcgcaaagagcagggccttgtgggcaagccctcccagaggaacgcgctgtctctgcaggctggcttgcgcacactgcatgacatcgggcctgagatccgacgggccatctctggagatctcaccgctgaggaggagctggacaaggccatgaaggaggctgtgtccgctgcttctgaagatgacatcttcaggagggccggtggcctgttcggcaaccacgtcagctactaccaaagcgacggccggagcgccttcccccagaccttcaccactcagcgcccgctgcacatcaacaaggcgggcagcagccagggcgacactgagtcgccatcccacgagaagctggtggactccaccttcaccccgagcagctactcgtccaccggctccaacgccaacatcaacaacgccaacaacaccgccctgggtcgcctccctcgccccgccggctaccccagcacggtcagcactgtggagggccacgggccccccttgtcccctgccatccgggtgcaggaggtggcgtggaagctcagctccaacaggtgccactcccgggagagccaggcagccatggcgggtcaggaggagacgtctcaggatgagacctatgaagtgaagatgaaccatgacacggaggcctgcagtgagcccagcctgctctccacagagatgctctcctaccaggatgacgaaaatcggcaactgacgctcccagaggaggacaagagggacatccggcaatctccgaagaggggtttcctccgctctgcctcactaggtcgaagggcctccttccacctggaatgtctgaagcgacagaaggaccgagggggagacatctctcagaagacagtcctgcccttgcatctggttcatcatcaggcattggcagtggcaggcctgagccccctcctccagagaagccattcccctgcctcattccctaggccttttgccaccccaccagccacacctggcagccgaggctggcccccacagcccgtccccaccctgcggcttgagggggtcgagtccagtgagaaactcaacagcagcttcccatccatccactgcggctcctgggctgagaccacccccggtggcgggggcagcagcgccgcccggagagtccggcccgtctccctcatggtgcccagccaggctggggccccagggaggcagttccacggcagtgccagcagcctggtggaagcggtcttgatttcagaaggactggggcagtttgctcaagatcccaagttcatcgaggtcaccacccaggagctggccgacgcctgcgacatgaccatagaggagatggagagcgcggccgacaacatcctcagcgggggcgccccacagagccccaatggcgccctcttaccctttgtgaactgcagggacgcggggcaggaccgagccgggggcgaagaggacgcgggctgtgtgcgcgcgcggggtcgaccgagtgaggaggagctccaggacagcagggtctacgtcagcagcctgtagtgggcgctgccagatgcgggcttttttttatttgtttcaatgttcctaatgggttcgtttcagaagtgcctcactgttctcgtgacctggagtt

SEQ ID NO: 46923 - DNA, 6474 bp, Artificial Sequence
  derived and/or modified sequence
atggtgaacgagaacaccagaatgtacatccccgaggagaaccaccagggcagcaactacggcagccccagacccgcccacgccaacatgaacgccaacgccgccgccggcctggcccccgagcacatccccacccccggcgccgccctgagctggcaggccgccatcgacgccgccagacaggccaagctgatgggcagcgccggcaacgccaccatcagcaccgtgagcagcacccagagaaagagacagcagtacggcaagcccaagaagcagggcagcaccaccgccaccagaccccccagagccctgctgtgcctgaccctgaagaaccccatcagaagagcctgcatcagcatcgtggagtggaagcccttcgagatcatcatcctgctgaccatcttcgccaactgcgtggccctggccatctacatccccttccccgaggacgacagcaacgccaccaacagcaacctggagagagtggagtacctgttcctgatcatcttcaccgtggaggccttcctgaaggtgatcgcctacggcctgctgttccaccccaacgcctacctgagaaacggctggaacctgctggacttcatcatcgtggtggtgggcctgttcagcgccatcctggagcaggccaccaaggccgacggcgccaacgccctgggcggcaagggcgccggcttcgacgtgaaggccctgagagccttcagagtgctgagacccctgagactggtgagcggcgtgcccagcctgcaggtggtgctgaacagcatcatcaaggccatggtgcccctgctgcacatcgccctgctggtgctgttcgtgatcatcatctacgccatcatcggcctggagctgttcatgggcaagatgcacaagacctgctacaaccaggagggcatcgccgacgtgcccgccgaggacgaccccagcccctgcgccctggagaccggccacggcagacagtgccagaacggcaccgtgtgcaagcccggctgggacggccccaagcacggcatcaccaacttcgacaacttcgccttcgccatgctgaccgtgttccagtgcatcaccatggagggctggaccgacgtgctgtactgggtgaacgacgccgtgggcagagactggccctggatctacttcgtgaccctgatcatcatcggcagcttcttcgtgctgaacctggtgctgggcgtgctgagcggcgagttcagcaaggagagagagaaggccaaggccagaggcgacttccagaagctgagagagaagcagcagctggaggaggacctgaagggctacctggactggatcacccaggccgaggacatcgaccccgagaacgaggacgagggcatggacgaggagaagcccagaaacatgagcatgcccaccagcgagaccgagagcgtgaacaccgagaacgtggccggcggcgacatcgagggcgagaactgcggcgccagactggcccacagaatcagcaagagcaagttcagcagatactggagaagatggaacagattctgcagaagaaagtgcagagccgccgtgaagagcaacgtgttctactggctggtgatcttcctggtgttcctgaacaccctgaccatcgccagcgagcactacaaccagcccaactggctgaccgaggtgcaggacaccgccaacaaggccctgctggccctgttcaccgccgagatgctgctgaagatgtacagcctgggcctgcaggcctacttcgtgagcctgttcaacagattcgactgcttcgtggtgtgcggcggcatcctggagaccatcctggtggagaccaagatcatgagccccctgggcatcagcgtgctgagatgcgtgagactgctgagaatcttcaagatcaccagatactggaacagcctgagcaacctggtggccagcctgctgaacagcgtgagaagcatcgccagcctgctgctgctgctgttcctgttcatcatcatcttcagcctgctgggcatgcagctgttcggcggcaagttcaacttcgacgagatgcagaccagaagaagcaccttcgacaacttcccccagagcctgctgaccgtgttccagatcctgaccggcgaggactggaacagcgtgatgtacgacggcatcatggcctacggcggccccagcttccccggcatgctggtgtgcatctacttcatcatcctgttcatctgcggcaactacatcctgctgaacgtgttcctggccatcgccgtggacaacctggccgacgccgagagcctgaccagcgcccagaaggaggaggaggaggagaaggagagaaagaagctggccagaaccgccagccccgagaagaagcaggagctggtggagaagcccgccgtgggcgagagcaaggaggagaagatcgagctgaagagcatcaccgccgacggcgagagcccccccgccaccaagatcaacatggacgacctgcagcccaacgagaacgaggacaagagcccctaccccaaccccgagaccaccggcgaggaggacgaggaggagcccgagatgcccgtgggccccagacccagacccctgagcgagctgcacctgaaggagaaggccgtgcccatgcccgaggccagcgccttcttcatcttcagcagcaacaacagattcagactgcagtgccacagaatcgtgaacgacaccatcttcaccaacctgatcctgttcttcatcctgctgagcagcatcagcctggccgccgaggaccccgtgcagcacaccagcttcagaaaccacatcctgttctacttcgacatcgtgttcaccaccatcttcaccatcgagatcgccctgaagatgaccgcctacggcgccttcctgcacaagggcagcttctgcagaaactacttcaacatcctggacctgctggtggtgagcgtgagcctgatcagcttcggcatccagagcagcgccatcaacgtggtgaagatcctgagagtgctgagagtgctgagacccctgagagccatcaacagagccaagggcctgaagcacgtggtgcagtgcgtgttcgtggccatcagaaccatcggcaacatcgtgatcgtgaccaccctgctgcagttcatgttcgcctgcatcggcgtgcagctgttcaagggcaagctgtacacctgcagcgacagcagcaagcagaccgaggccgagtgcaagggcaactacatcacctacaaggacggcgaggtggaccaccccatcatccagcccagaagctgggagaacagcaagttcgacttcgacaacgtgctggccgccatgatggccctgttcaccgtgagcaccttcgagggctggcccgagctgctgtacagaagcatcgacagccacaccgaggacaagggccccatctacaactacagagtggagatcagcatcttcttcatcatctacatcatcatcatcgccttcttcatgatgaacatcttcgtgggcttcgtgatcgtgaccttccaggagcagggcgagcaggagtacaagaactgcgagctggacaagaaccagagacagtgcgtggagtacgccctgaaggccagacccctgagaagatacatccccaagaaccagcaccagtacaaggtgtggtacgtggtgaacagcacctacttcgagtacctgatgttcgtgctgatcctgctgaacaccatctgcctggccatgcagcactacggccagagctgcctgttcaagatcgccatgaacatcctgaacatgctgttcaccggcctgttcaccgtggagatgatcctgaagctgatcgccttcaagcccaagggctacttcagcgacccctggaacgtgttcgacttcctgatcgtgatcggcagcatcatcgacgtgatcctgagcgagaccaaccccgccgagcacacccagtgcagccccagcatgaacgccgaggagaacagcagaatcagcatcaccttcttcagactgttcagagtgatgagactggtgaagctgctgagcagaggcgagggcatcagaaccctgctgtggaccttcatcaagagcttccaggccctgccctacgtggccctgctgatcgtgatgctgttcttcatctacgccgtgatcggcatgcaggtgttcggcaagatcgccctgaacgacaccaccgagatcaacagaaacaacaacttccagaccttcccccaggccgtgctgctgctgttcagatgcgccaccggcgaggcctggcaggacatcatgctggcctgcatgcccggcaagaagtgcgcccccgagagcgagcccagcaacagcaccgagggcgagaccccctgcggcagcagcttcgccgtgttctacttcatcagcttctacatgctgtgcgccttcctgatcatcaacctgttcgtggccgtgatcatggacaacttcgactacctgaccagagactggagcatcctgggcccccaccacctggacgagttcaagagaatctgggccgagtacgaccccgaggccaagggcagaatcaagcacctggacgtggtgaccctgctgagaagaatccagccccccctgggcttcggcaagctgtgcccccacagagtggcctgcaagagactggtgagcatgaacatgcccctgaacagcgacggcaccgtgatgttcaacgccaccctgttcgccctggtgagaaccgccctgagaatcaagaccgaggagggccccagccccagcgaggcccaccagggcgccgaggaccccttcagacccgccggcaacctggagcaggccaacgaggagctgagagccatcatcaagaagatctggaagagaaccagcatgaagctgctggaccaggtggtgccccccgccggcgacgacgaggtgaccgtgggcaagttctacgccaccttcctgatccaggagtacttcagaaagttcaagaagagaaaggagcagggcctggtgggcaagcccagccagagaaacgccctgagcctgcaggccggcctgagaaccctgcacgacatcggccccgagatcagaagagccatcagcggcgacctgaccgccgaggaggagctggacaaggccatgaaggaggccgtgagcgccgccagcgaggacgacatcttcagaagagccggcggcctgttcggcaaccacgtgagctactaccagagcgacggcagaagcgccttcccccagaccttcaccacccagagacccctgcacatcaacaaggccggcagcagccagggcgacaccgagagccccagccacgagaagctggtggacagcaccttcacccccagcagctacagcagcaccggcagcaacgccaacatcaacaacgccaacaacaccgccctgggcagactgcccagacccgccggctaccccagcaccgtgagcaccgtggagggccacggcccccccctgagccccgccatcagagtgcaggaggtggcctggaagctgagcagcaacagatgccacagcagagagagccaggccgccatggccggccaggaggagaccagccaggacgagacctacgaggtgaagatgaaccacgacaccgaggcctgcagcgagcccagcctgctgagcaccgagatgctgagctaccaggacgacgagaacagacagctgaccctgcccgaggaggacaagagagacatcagacagagccccaagagaggcttcctgagaagcgccagcctgggcagaagagccagcttccacctggagtgcctgaagagacagaaggacagaggcggcgacatcagccagaagaccgtgctgcccctgcacctggtgcaccaccaggccctggccgtggccggcctgagccccctgctgcagagaagccacagccccgccagcttccccagacccttcgccaccccccccgccacccccggcagcagaggctggcccccccagcccgtgcccaccctgagactggagggcgtggagagcagcgagaagctgaacagcagcttccccagcatccactgcggcagctgggccgagaccacccccggcggcggcggcagcagcgccgccagaagagtgagacccgtgagcctgatggtgcccagccaggccggcgcccccggcagacagttccacggcagcgccagcagcctggtggaggccgtgctgatcagcgagggcctgggccagttcgcccaggaccccaagttcatcgaggtgaccacccaggagctggccgacgcctgcgacatgaccatcgaggagatggagagcgccgccgacaacatcctgagcggcggcgccccccagagccccaacggcgccctgctgcccttcgtgaactgcagagacgccggccaggacagagccggcggcgaggaggacgccggctgcgtgagagccagaggcagacccagcgaggaggagctgcaggacagcagagtgtacgtgagcagcctgtag

SEQ ID NO: 46924 - protein, 2157 aa, Artificial Sequence
  derived and/or modified sequence
MVNENTRMYIPEENHQGSNYGSPRPAHANMNANAAAGLAPEHIPTPGAALSWQAAIDAARQAKLMGSAGNATISTVSSTQRKRQQYGKPKKQGSTTATRPPRALLCLTLKNPIRRACISIVEWKPFEIIILLTIFANCVALAIYIPFPEDDSNATNSNLERVEYLFLIIFTVEAFLKVIAYGLLFHPNAYLRNGWNLLDFIIVVVGLFSAILEQATKADGANALGGKGAGFDVKALRAFRVLRPLRLVSGVPSLQVVLNSIIKAMVPLLHIALLVLFVIIIYAIIGLELFMGKMHKTCYNQEGIADVPAEDDPSPCALETGHGRQCQNGTVCKPGWDGPKHGITNFDNFAFAMLTVFQCITMEGWTDVLYWVNDAVGRDWPWIYFVTLIIIGSFFVLNLVLGVLSGEFSKEREKAKARGDFQKLREKQQLEEDLKGYLDWITQAEDIDPENEDEGMDEEKPRNMSMPTSETESVNTENVAGGDIEGENCGARLAHRISKSKFSRYWRRWNRFCRRKCRAAVKSNVFYWLVIFLVFLNTLTIASEHYNQPNWLTEVQDTANKALLALFTAEMLLKMYSLGLQAYFVSLFNRFDCFVVCGGILETILVETKIMSPLGISVLRCVRLLRIFKITRYWNSLSNLVASLLNSVRSIASLLLLLFLFIIIFSLLGMQLFGGKFNFDEMQTRRSTFDNFPQSLLTVFQILTGEDWNSVMYDGIMAYGGPSFPGMLVCIYFIILFICGNYILLNVFLAIAVDNLADAESLTSAQKEEEEEKERKKLARTASPEKKQELVEKPAVGESKEEKIELKSITADGESPPATKINMDDLQPNENEDKSPYPNPETTGEEDEEEPEMPVGPRPRPLSELHLKEKAVPMPEASAFFIFSSNNRFRLQCHRIVNDTIFTNLILFFILLSSISLAAEDPVQHTSFRNHILFYFDIVFTTIFTIEIALKMTAYGAFLHKGSFCRNYFNILDLLVVSVSLISFGIQSSAINVVKILRVLRVLRPLRAINRAKGLKHVVQCVFVAIRTIGNIVIVTTLLQFMFACIGVQLFKGKLYTCSDSSKQTEAECKGNYITYKDGEVDHPIIQPRSWENSKFDFDNVLAAMMALFTVSTFEGWPELLYRSIDSHTEDKGPIYNYRVEISIFFIIYIIIIAFFMMNIFVGFVIVTFQEQGEQEYKNCELDKNQRQCVEYALKARPLRRYIPKNQHQYKVWYVVNSTYFEYLMFVLILLNTICLAMQHYGQSCLFKIAMNILNMLFTGLFTVEMILKLIAFKPKHYFCDAWNTFDALIVVGSIVDIAITEVNPAEHTQCSPSMNAEENSRISITFFRLFRVMRLVKLLSRGEGIRTLLWTFIKSFQALPYVALLIVMLFFIYAVIGMQVFGKIALNDTTEINRNNNFQTFPQAVLLLFRCATGEAWQDIMLACMPGKKCAPESEPSNSTEGETPCGSSFAVFYFISFYMLCAFLIINLFVAVIMDNFDYLTRDWSILGPHHLDEFKRIWAEYDPEAKGRIKHLDVVTLLRRIQPPLGFGKLCPHRVACKRLVSMNMPLNSDGTVMFNATLFALVRTALRIKTEEGPSPSEAHQGAEDPFRPAGNLEQANEELRAIIKKIWKRTSMKLLDQVVPPAGDDEVTVGKFYATFLIQEYFRKFKKRKEQGLVGKPSQRNALSLQAGLRTLHDIGPEIRRAISGDLTAEEELDKAMKEAVSAASEDDIFRRAGGLFGNHVSYYQSDGRSAFPQTFTTQRPLHINKAGSSQGDTESPSHEKLVDSTFTPSSYSSTGSNANINNANNTALGRLPRPAGYPSTVSTVEGHGPPLSPAIRVQEVAWKLSSNRCHSRESQAAMAGQEETSQDETYEVKMNHDTEACSEPSLLSTEMLSYQDDENRQLTLPEEDKRDIRQSPKRGFLRSASLGRRASFHLECLKRQKDRGGDISQKTVLPLHLVHHQALAVAGLSPLLQRSHSPASFPRPFATPPATPGSRGWPPQPVPTLRLEGVESSEKLNSSFPSIHCGSWAETTPGGGGSSAARRVRPVSLMVPSQAGAPGRQFHGSASSLVEAVLISEGLGQFAQDPKFIEVTTQELADACDMTIEEMESAADNILSGGAPQSPNGALLPFVNCRDAGQDRAGGEEDAGCVRARGRPSEEELQDSRVYVSSL

SEQ ID NO: 46925 - DNA, 13537 bp, Artificial Sequence
  derived and/or modified sequence
ttattttttcaaatggtgtagccgccggaggtgcggtgctcagttcttggaaggggcccggatgtactgaggatgcgttacagtttcactcgaggaggcagtagtggaaaggagcagtttttggggtttgatgccataatgggaatcaggtaatcgtcggcggggaagaagaaacgctgcagaccacggcttcctcgaatcttgcgcgaaagccgccggcctcggaggagggattaatccagacccgccggggggtgttttcacatttcttcctcttcgtggctgctcctcctattaaaaccatttttggtccatggtcaatgagaatacgaggatgtacattccagaggaaaaccaccaaggttccaactatgggagcccacgccccgcccatgccaacatgaatgccaatgcggcagcggggctggcccctgagcacatccccaccccgggggctgccctgtcgtggcaggcggccatcgacgcagcccggcaggctaagctgatgggcagcgctggcaatgcgaccatctccacagtcagctccacgcagcggaagcggcagcaatatgggaaacccaagaagcagggcagcaccacggccacacgcccgccccgagccctgctctgcctgaccctgaagaaccccatccggagggcctgcatcagcattgtcgaatggaaaccatttgaaataattattttactgactatttttgccaattgtgtggccttagcgatctatattccctttccagaagatgattccaacgccaccaattccaacctggaacgagtggaatatctctttctcataatttttacggtggaagcgtttttaaaagtaatcgcctatggactcctctttcaccccaatgcctacctccgcaacggctggaacctactagattttataattgtggttgtggggctttttagtgcaattttagaacaagcaaccaaagcagatggggcaaacgctctcggagggaaaggggccggatttgatgtgaaggcgctgagggccttccgcgtgctgcgccccctgcggctggtgtccggagtcccaagtctccaggtggtcctgaattccatcatcaaggccatggtccccctgctgcacatcgccctgcttgtgctgtttgtcatcatcatctacgccatcatcggcttggagctcttcatggggaagatgcacaagacctgctacaaccaggagggcatagcagatgttccagcagaagatgacccttccccttgtgcgctggaaacgggccacgggcggcagtgccagaacggcacggtgtgcaagcccggctgggatggtcccaagcacggcatcaccaactttgacaactttgccttcgccatgctcacggtgttccagtgcatcaccatggagggctggacggacgtgctgtactgggtcaatgatgccgtaggaagggactggccctggatctattttgttacactaatcatcatagggtcattttttgtacttaacttggttctcggtgtgcttagcggagagttttccaaagagagggagaaggccaaggcccggggagatttccagaagctgcgggagaagcagcagctagaagaggatctcaaaggctacctggattggatcactcaggccgaagacatcgatcctgagaatgaggacgaaggcatggatgaggagaagccccgaaacatgagcatgcccaccagtgagaccgagtccgtcaacaccgaaaacgtggctggaggtgacatcgagggagaaaactgcggggccaggctggcccaccggatctccaagtcaaagttcagccgctactggcgccggtggaatcggttctgcagaaggaagtgccgcgccgcagtcaagtctaatgtcttctactggctggtgattttcctggtgttcctcaacacgctcaccattgcctctgagcactacaaccagcccaactggctcacagaagtccaagacacggcaaacaaggccctgctggccctgttcacggcagagatgctcctgaagatgtacagcctgggcctgcaggcctacttcgtgtccctcttcaaccgctttgactgcttcgtcgtgtgtggcggcatcctggagaccatcctggtggagaccaagatcatgtccccactgggcatctccgtgctcagatgcgtccggctgctgaggattttcaagatcacgaggtactggaactccttgagcaacctggtggcatccttgctgaactctgtgcgctccatcgcctccctgctccttctcctcttcctcttcatcatcatcttctccctcctggggatgcagctctttggaggaaagttcaactttgatgagatgcagacccggaggagcacattcgataacttcccccagtccctcctcactgtgtttcagatcctgaccggggaggactggaattcggtgatgtatgatgggatcatggcttatggcggcccctcttttccagggatgttagtctgtatttacttcatcatcctcttcatctgtggaaactatatcctactgaatgtgttcttggccattgctgtggacaacctggctgatgctgagagcctcacatctgcccaaaaggaggaggaagaggagaaggagagaaagaagctggccaggactgccagcccagagaagaaacaagagttggtggagaagccggcagtgggggaatccaaggaggagaagattgagctgaaatccatcacggctgacggagagtctccacccgccaccaagatcaacatggatgacctccagcccaatgaaaatgaggataagagcccctaccccaacccagaaactacaggagaagaggatgaggaggagccagagatgcctgtcggccctcgcccacgaccactctctgagcttcaccttaaggaaaaggcagtgcccatgccagaagccagcgcgtttttcatcttcagctctaacaacaggtttcgcctccagtgccaccgcattgtcaatgacacgatcttcaccaacctgatcctcttcttcattctgctcagcagcatttccctggctgctgaggacccggtccagcacacctccttcaggaaccatattctgttttattttgatattgtttttaccaccattttcaccattgaaattgctctgaagatgactgcttatggggctttcttgcacaagggttctttctgccggaactacttcaacatcctggacctgctggtggtcagcgtgtccctcatctcctttggcatccagtccagtgcaatcaatgtcgtgaagatcttgcgagtcctgcgagtactcaggcccctgagggccatcaacagggccaaggggctaaagcatgtggttcagtgtgtgtttgtcgccatccggaccatcgggaacatcgtgattgtcaccaccctgctgcagttcatgtttgcctgcatcggggtccagctcttcaagggaaagctgtacacctgttcagacagttccaagcagacagaggcggaatgcaagggcaactacatcacgtacaaagacggggaggttgaccaccccatcatccaaccccgcagctgggagaacagcaagtttgactttgacaatgttctggcagccatgatggccctcttcaccgtctccaccttcgaagggtggccagagctgctgtaccgctccatcgactcccacacggaagacaagggccccatctacaactaccgtgtggagatctccatcttcttcatcatctacatcatcatcatcgccttcttcatgatgaacatcttcgtgggcttcgtcatcgtcacctttcaggagcagggggagcaggagtacaagaactgtgagctggacaagaaccagcgacagtgcgtggaatacgccctcaaggcccggcccctgcggaggtacatccccaagaaccagcaccagtacaaagtgtggtacgtggtcaactccacctacttcgagtacctgatgttcgtcctcatcctgctcaacaccatctgcctggccatgcagcactacggccagagctgcctgttcaaaatcgccatgaacatcctcaacatgctcttcactggcctcttcaccgtggagatgatcctgaagctcattgccttcaaacccaagcactatttctgtgatgcatggaatacatttgacgccttgattgttgtgggtagcattgttgatatagcaatcaccgaggtaaacccagctgaacatacccaatgctctccctctatgaacgcagaggaaaactcccgcatctccatcaccttcttccgcctgttccgggtcatgcgtctggtgaagctgctgagccgtggggagggcatccggacgctgctgtggaccttcatcaagtccttccaggccctgccctatgtggccctcctgatcgtgatgctgttcttcatctacgcggtgatcgggatgcaggtgtttgggaaaattgccctgaatgataccacagagatcaaccggaacaacaactttcagaccttcccccaggccgtgctgctcctcttcaggtgtgccaccggggaggcctggcaggacatcatgctggcctgcatgccaggcaagaagtgtgccccagagtccgagcccagcaacagcacggagggtgaaacaccctgtggtagcagctttgctgtcttctacttcatcagcttctacatgctctgtgccttcctgatcatcaacctctttgtagctgtcatcatggacaactttgactacctgacaagggactggtccatccttggtccccaccacctggatgagtttaaaagaatctgggcagagtatgaccctgaagccaagggtcgtatcaaacacctggatgtggtgaccctcctccggcggattcagccgccactaggttttgggaagctgtgccctcaccgcgtggcttgcaaacgcctggtctccatgaacatgcctctgaacagcgacgggacagtcatgttcaatgccaccctgtttgccctggtcaggacggccctgaggatcaaaacagaagagggacccagcccatcagaggcccaccaaggggctgaggatcctttccgccctgcagggaacctagaacaagccaatgaggagctgcgggcgatcatcaagaagatctggaagcggaccagcatgaagctgctggaccaggtggtgccccctgcaggtgatgatgaggtcaccgttggcaagttctacgccacgttcctgatccaggagtacttccggaagttcaagaagcgcaaagagcagggccttgtgggcaagccctcccagaggaacgcgctgtctctgcaggctggcttgcgcacactgcatgacatcgggcctgagatccgacgggccatctctggagatctcaccgctgaggaggagctggacaaggccatgaaggaggctgtgtccgctgcttctgaagatgacatcttcaggagggccggtggcctgttcggcaaccacgtcagctactaccaaagcgacggccggagcgccttcccccagaccttcaccactcagcgcccgctgcacatcaacaaggcgggcagcagccagggcgacactgagtcgccatcccacgagaagctggtggactccaccttcaccccgagcagctactcgtccaccggctccaacgccaacatcaacaacgccaacaacaccgccctgggtcgcctccctcgccccgccggctaccccagcacggtcagcactgtggagggccacgggccccccttgtcccctgccatccgggtgcaggaggtggcgtggaagctcagctccaacaggtgccactcccgggagagccaggcagccatggcgggtcaggaggagacgtctcaggatgagacctatgaagtgaagatgaaccatgacacggaggcctgcagtgagcccagcctgctctccacagagatgctctcctaccaggatgacgaaaatcggcaactgacgctcccagaggaggacaagagggacatccggcaatctccgaagaggggtttcctccgctctgcctcactaggtcgaagggcctccttccacctggaatgtctgaagcgacagaaggaccgagggggagacatctctcagaagacagtcctgcccttgcatctggttcatcatcaggcattggcagtggcaggcctgagccccctcctccagagaagccattcccctgcctcattccctaggccttttgccaccccaccagccacacctggcagccgaggctggcccccacagcccgtccccaccctgcggcttgagggggtcgagtccagtgagaaactcaacagcagcttcccatccatccactgcggctcctgggctgagaccacccccggtggcgggggcagcagcgccgcccggagagtccggcccgtctccctcatggtgcccagccaggctggggccccagggaggcagttccacggcagtgccagcagcctggtggaagcggtcttgatttcagaaggactggggcagtttgctcaagatcccaagttcatcgaggtcaccacccaggagctggccgacgcctgcgacatgaccatagaggagatggagagcgcggccgacaacatcctcagcgggggcgccccacagagccccaatggcgccctcttaccctttgtgaactgcagggacgcggggcaggaccgagccgggggcgaagaggacgcgggctgtgtgcgcgcgcggggtcgaccgagtgaggaggagctccaggacagcagggtctacgtcagcagcctgtagtgggcgctgccagatgcgggcttttttttatttgtttcaatgttcctaatgggttcgtttcagaagtgcctcactgttctcgtgacctggagttaaccggaacagcgtcttcattcatttctgttgggaccagacgcggagcctgggtgcgcgagccgccctccgggaggaaggcgcccggctgcgtctgcagaggcggggagaggaggcggcgagggtcccggggcgcgaggaaggcgcctgccctctcccagctcgcaggccccgggcccggccgcgcctccgcggggagagcaccccggcttcccgcgcgccctcaccaaaaggaccctacagcaaacgggtgtctttcgactctgcttgtagaaaccatttgcacatattctgtacgagcctcgctgtctccctagagccagggccctgcggatttggagaagggagcggggcaggacttccaggaggaccccaacccggcccggagagggaggaggaggcctccaggggcgcggagctctggggatgggcgtcgggccggcagtggtgcggctcactccgtccctgcccacctgcgacgggatcccccgaccggcacgggccacgccgagctcccggccagccgccggcccgcaggcagcgcgagggaggagctgcgccgccggctccgcccaaccaggtggtgctgagcttccgctgagcgctcttttgttttgtggtttgacacttttcttgacagcatgttgcagtttcttttcggttttggttttttttaaatgttttattttgctttcccagcgggaggggaggaagaagagtgtttacaaagtcctgtagccccctcacctttctgttttcacttttgccaatgtacatcgggtttggttttcttgtattatttaaacggttgtggtttcctttttccacggaggttcaatagaagccgctgcaggagagttttaccaaccattgtgtatgcccaataatttgttatcatttccttaggtagtaacctatttttgttctggtttggttcggttatctaatggaaaggtaactggcaatgcacttgatgtggtcttgcacatgtgggtgatagagttgggttcctttttatgctgggtgtacaggtgggtttgggagagaggagcatgcgcgagagagtctccgagtgtgtgcgacgcgtgtgtgtgtggtgggttgtctgtgtgcatatgtcctgcccgtgtatatgcacccacaccatgtgcccgtgcacaccagtgactacgcagtcccccctttctggtttagctgtgggaagatctgaatctggggccgtttgaaagcaaaaacaaaccactgtctctgcttctgaaacgggaatcagtaactctttgcattttctgtcccacaagatatgcaaaaacaatgcaataatattcatttaaaaatacaattgtgagttgtgttggcattaaaactgtattttaaaaaaagacagaaatttaagggaaaaacacaagaaggcattttgcttcaatatattccgtgtaatgttttattgcattgataatgtttctgttgaagaaaccgttatacttgaattcaggtcagtttcagtatttttcaaatatttttttaaaactgaattgcaattgtgccaagcgaatataatgaattgaattaagttggttttcggattcacttcttgtatattttgctgcatgtaaagtaaatcattttgtatttggagtgtgacaagctttacctttgaactcaagtgcttttctatatgtggttgggggaaagggaacaagttttctttagtttgcacaatgagcaaaggtatcaccagtgtagtcattattctgctctccacaaacaggtttggacattactgttttgcatatcttgtgtttgcttacatttccctcaatttttccaaaatcgtttgctgggtatgtttgtaccgcctcttgctgtgagagaccaggacctattttattccagtcttcactctgtccactctgctctggtcatctgatttggtacttctccaagaacagcccttcactgtgaggtgcagggaggcgttctgatgagccctcagtcactgggccgtcatccgcatcccccatggaagaggtagctggctttcccttcccttccaccacacggaattttctctttggcttccttaggaaagtgtacactaaccgggaggataaaattaaagtcaggctgcttggagggaggggcatcctcacttccggattcttgttgctctacccaacaaggacagcaggggctcgagaaaggaactggtgaaaccctgatccatctgaaagtcaactctgcgtgctcctttctccatcccttcctcactctggagcagcctttccttcaggcttgccctaatgtttgggctgccggggagggggccaggacaagggaagaggcatccggagctcacagtgggggtgggaacagatttttgtgggggcatctctaatgctcacttatatctccctagaacatcactcttttggtgctgtgtccttcaaatgtatgtcaacagtggtggctgaaaagggactgctttggggaaaacaggacccaaccattcacccagaattgacccattaaatctcttccagtcctagtgttccctgagcccctcttggcacatatataagtaagctagaaattacaataagggacagtccattcctctatgacagcttgctggactgattcatgacaaagtggagaaatgtactcaatactccccggttaacacagtctagaaacagagtttctttatggatatccacacccaagtcatccaaactttcttgattccttttcactgccatcaaggtcctctagaaattgagtttaggtatcatcctttgaaaagttcccaagatttctaccaggaggtacacacaggcgttccctgtctagggcaggaggactatcctagcttgaccttctgatccactagaataagactggcgtatgatgcctgtcatcagaacagactggcacaagtagtgacatcaatgaaccacagcacaatcttccaagtgatgtctactctccacctaaaatggaattttccccatgaccttgtaaaacataattgtcacatcttccatacccctcctgacagcccccaagtgtcaggagaaaacagtcaggggctaagggcccaagggacttgaagaaacaacagtttaaggtctgcagtttggtcaacttaattcttgtcctccgaccagccctgcctctttcatttccagaccttggagaatttttcccagctttgattcagaaggtactagttataacccctttccttcttcttaatccaataggcctcactctcactgggaaatccactcaaaggaacaaggcaatgtctctcattctatttcccagttccaaattccaggtgcttgtctggagtgaagctacccgttactttctcccagcttttctccacccagcatgtctcctgcccatgcagctgaagacagtggggcaacctcaggagaagcagacctttccatgcccaagttcatctcctgagcaacagtgacacctagaaaatgaggactttggaagtcacccaaaagatggtggctactttatggagtcctgaagatacacagccaccactcctaaaggcaaagaaagaaaacacgaatgtaggtcagggatagagtggaaccctggtcatcggggtttttagcctcatcgtgggaaaggtggtaaaggaggatgatggcatctccatccctagaggccaagaattgaaatatcattgtcaaggattagaaacaattcagcaaagaggccacaaaaagggcctgctgactcccagaagacctctttaaaccccaggggaggcaaatacttgctgatggagtctgggccgtttccatattttaaagaagacctgcctctggggcaaatgtcagcacagagaggactgggaggagaatggaggcaagaaaagggcatattttgactccctctgtgcctcttcccagttcatggaaggatgtgttcagcttacccacccacagtgaccagtgtggtggagccgctgacatctcaaggatctatttgggaaggtgagaagagtactcattccatctgggggtgttgttccagccacatcagcctacctggtgggatgtgggggtgtctgccaccctgtcccccctctgctgatgtccctcccctcaggctgtccaggtgccacctgacacaggctgctgtgcaaagacaggcggggaagcccaaacctcactcccagggaggccctcagccgccagagtccaggttctccagaggctacgatttgaggaggttgagggggaagacaggagggaaagaaaagtcctacaactgtcaggaatggggcacctttccctgtccctaagcaaagctccctcttcccactgccctccccagccccagctccctgtcctccccaacacctagtgagaaagacggtgcgtggaagggagtcccatgggcagatgcttacacgacctctttgtgaagcctcttctgggtttaacttcattcatcaatttattcttatgtcaaagcaatgaaacttttctttctggagccagataccaatacaacaggtgaacgggtttctgccacatctctacattgacgggggatgcttgaacaacccccctcactacacagacacacaccgttaaggcacaagggctggggttgagctctagatgagggactttcctgctcctgcaagggtgagcactgtatacacagacaaggagggtgcagtagagtgactcccttggatggaagtagtaccatcagaacctactattattatgacataaattctatttacatacattgagagaatactacaatcaacactttttcctgggatgactttaagaggtttgagccacagcacctgaagtggcaaagatccatggtctttgtagggtattagagaactcttccagtcacctctgaaagcactctagatcttgcagctgagtggatgaagtgtaacaaatctgttgcacgctgagaggagtcagaattagcatttttcatgaaagttccccacgtctctactaagaatgaggaagaaaagactaagactaggtaattacacagaggcttgaaatgttacatcaccagagccaagtcctctcccttcagatcagttactggctgctacacagggacacccccaccttttcagggcatcccatgcactccacttctcaggatctaaggaatttgactttgtagggatcccagaaagggcactgtgccacttcccctggtgtgaatcagacatacattgtacattcatttctaaaattcactcatgcacctcaaaccaaggtcattatccaaaaaaaaaaaaaaaaagctctgggtggaagagtttgtaagttttaagagagggtcatttctatgtgaggaaatgcagaaatggacagaatgattcttattcactgtttgggtctggagaattcccattgtggaaatcttagagatctcaagtttattaccaagggaataaggaaaaaaaggtgagcaggcaccaggccaagcagtggctcccttgccaaggaacctgaggctgcaggtttcagggacccccttgaagaaacctctcctggccattggccaggagaaaagagaagtctctcctgtagagtcacaagagaagcaaaagagggtgggtcactgggtcctggacatagcccccaaccccaagacttcccaatatggagaaactacaccaatgtttaaaaggggaaaaggaaagaacttgtacatcaagggaagatgatttgtaaacacacagtcctgtgcagaaagatccccttcaggaggtgtctccagcatcccaaagctgtgcgcaccttctcttttcctgcctcaggccacctatgcatccagctgcagcccatacccacacctgaaatccatctcttgaatcccagccaggttatataccaccccattgccatgtcctgtcctggccagaatgcatgctgttcccccaagcctcgtgggagtgaggccatgggaaacagagatgagcatgtctggacaagtctgtgatggtagtggatgagaataacccatggcaaaacacgcacattcattaagaaatagggcgacagattccccgttggtgaagcactgaaaggtctattactctcataatattgctgttttattttaatccaccagagctaccatgcaaaactttcctcctgtgaaacgctccagataaagctcctctaatctccccttccctcatgtcctccagctcaaacccaccttcatcccccaaaccaatctgtatcatgcctgttatcagagaggcacagaaagatgggcagtgcctccgttgtcaccattccccacacccctacacacccccacaccctcccctccaggctccacgacttcacagtcttactgttgtaaatatcattgtacagtttgtaatcctcaaataatcccattgtcagaggcctcgcctgatgggccttctcaccctcgagaaaggccagggaatctagaaggggcaacccttcaaggagagcttcagggtcatctctgtgtgagacactattgtatattcctgtaagattgcatttttatctaaggaatgatgttatttaaaaaacaaacaaaaaacacaaaaaataagaattgcaaataaatttcttaacaatgtct

SEQ ID NO: 46926 - DNA, 6474 bp, Artificial Sequence
  derived and/or modified sequence
atggttaatgagaacactagaatgtacataccagaagaaaaccatcaaggtagtaattatggatccccaagacctgcccacgcgaacatgaatgcgaatgccgcggcaggtcttgctccagaacatatcccaactccgggcgctgccctgagctggcaggcagcgattgacgccgctcgccaagctaagctaatgggatctgccggtaatgcgacgatttctactgtgagtagcacgcagcggaaacggcaacagtatgggaagccaaagaagcagggttcaacaactgcaacaaggccgccacgcgcccttctatgccttacactgaaaaatccaatccgccgggcttgcatcagtatcgtcgagtggaagccattcgagattatcattctgctcactatttttgcaaactgtgtggcgctggccatttatataccgttccccgaggacgacagtaatgctaccaactcaaacttggagcgggttgagtacctattcctgattattttcactgtcgaggcgttcctaaaagtgattgcgtacggtttgcttttccacccaaatgcctacctccggaatggctggaatcttctggacttcattatcgtagtagttgggttgttcagtgccatccttgaacaggcgacaaaggctgacggagctaatgcattggggggcaaaggtgccggatttgatgttaaggcactgcgagcgtttcgcgtacttcgtcctctccggttggtgagcggagtgccctcactgcaggtggttctcaattccataattaaggccatggtgcctcttctgcacattgctctgctggtccttttcgtcatcatcatctacgctattatcgggttggaactgttcatggggaaaatgcataaaacttgttacaaccaggagggcattgccgatgttcccgccgaggacgatccatccccgtgcgcattggagacaggccatggaaggcagtgtcagaacggcaccgtgtgcaagccaggctgggatgggcctaaacacggaattactaactttgacaatttcgcctttgctatgctgactgtgttccagtgtatcactatggagggttggacggacgttctctattgggtgaatgatgcagtgggaagagactggccgtggatctatttcgtgacactgatcattatcggctctttcttcgtgttgaaccttgtgctgggggtgctgagtggcgaattcagtaaggaacgggagaaggctaaggctagaggcgacttccagaaattacgggaaaagcagcaactagaagaagacctgaaaggttacttggactggatcactcaggccgaagatattgaccctgaaaacgaagacgaagggatggacgaagaaaaacccagaaatatgtccatgcctacctccgagacagagtcagttaacaccgagaatgtggctggcggtgacatagagggggagaattgtggagccagactggcccaccggatctcgaagtccaagtttagtaggtactggcgccgctggaatcgcttttgccgtcgtaaatgccgtgcggctgtgaagagcaatgtattctattggcttgtcatcttcctggtgttcctgaacactctgaccatcgccagtgaacattacaaccagcctaattggcttactgaagtccaggatacagccaataaagccctgctggccctattcacggccgaaatgctgctcaagatgtattctttgggtctgcaggcctactttgtgtcactgttcaaccgcttcgactgcttcgtggtctgtggggggatcttggagaccatactggttgaaacaaaaataatgtccccgctcggaattagtgtcttgcggtgcgtccgtttgctacggatcttcaagattaccagatattggaattcactgagtaatcttgtggcttctctcctgaactcggtgcgatcaattgctagtctcctgcttttgttgtttctgttcatcataatcttctccctgctcggaatgcagctgttcggcggcaaattcaatttcgacgaaatgcagacacgcagatcaacgttcgataattttccacagtccctgctgacggtgtttcagattctcacaggagaagattggaactccgtgatgtatgatgggattatggcatatgggggacctagcttcccgggaatgttggtgtgcatctatttcattatactctttatttgcggaaactacatcctactgaacgttttcctggcgattgcggtggacaatcttgcggatgctgagtcactaacgtcagcacaaaaggaagaggaagaggagaaggagagaaagaagctggcccgaaccgcatctcctgagaagaagcaggagctggtagagaagcccgcagtcggggagtccaaagaggaaaagattgaactgaagagcattacagccgatggtgaaagccctcctgccactaaaatcaatatggacgacttgcagccaaatgaaaacgaagacaaaagcccataccccaacccagaaacaactggagaggaggatgaggaggagccggaaatgcctgtcgggccacgtcccagacctctgagtgaattgcatctcaaggaaaaagcggttcctatgcctgaggcttcagccttttttattttctccagcaacaaccgattccggttgcaatgccatcggattgtgaatgacacaattttcacgaacctcatactatttttcattttactctcctccatcagcctcgccgctgaggatccggtccagcacacctcctttcgcaaccacatactgttttatttcgatatcgtctttaccacaatcttcacaatagagatagccctgaaaatgactgcctacggggcttttctccacaaagggtcgttctgtcggaactactttaatatcctcgacctccttgtggtgagcgtctctctcatctcgtttggcatccaatcctccgctatcaatgtggtcaagatcttgcgcgtgttgcgtgttctgcggcctctccgggcgatcaaccgagccaaaggactgaagcacgttgttcagtgcgtgtttgtggccattagaactataggcaacatcgtgatcgtgaccacccttctgcagttcatgttcgcgtgcattggagtccagctttttaagggcaagctgtacacctgctccgattctagtaaacagaccgaggcagaatgtaaaggtaactacattacgtataaggacggagaggtcgaccaccctatcatacagccccggtcttgggagaattcaaaatttgacttcgataacgtcctggctgctatgatggcactgtttaccgtgtcaacgttcgagggctggcccgagcttctgtataggagcattgatagccataccgaagacaagggacccatctacaactaccgagttgagatatccatatttttcatcatttatattatcattatagccttcttcatgatgaatattttcgtgggatttgtgattgtgaccttccaggaacagggggaacaagaatataaaaactgtgaactggataaaaatcaacgccagtgtgtggagtatgctctcaaggcgcgcccactgaggcggtatattcctaaaaatcagcaccagtacaaagtgtggtatgtcgttaactcaacgtatttcgaatacttgatgttcgtgctgattctgctgaatacaatttgtctggcaatgcagcactacggtcaatcgtgcctgttcaagatcgctatgaatatcttaaacatgctgtttacgggcctattcaccgttgagatgattctcaagctcatagccttcaaacctaagcattacttctgcgacgcgtggaatacattcgacgcactgattgtggtggggtctatcgttgacatcgctatcacagaagtcaacccagcggagcatacacagtgttccccttctatgaatgccgaggagaactccaggatctccatcacttttttccggttgttcagagtgatgagactggttaaacttttgagccgcggagagggaatcagaacactactctggacctttatcaaaagttttcaggccctgccgtatgtggccctgttgattgtgatgttattctttatttatgctgtcatcgggatgcaggtgtttgggaaaatcgccctgaatgacacaacagagatcaaccgcaacaataatttccaaactttcccacaggcggtcctcctgttgttccgttgcgcaacgggcgaggcctggcaggatatcatgctcgcgtgcatgcccggtaagaagtgcgcccctgaatctgagccaagcaacagtacggagggagagaccccctgtggctcgtcttttgctgtgttctattttatctctttttatatgctgtgcgcctttttgatcattaacctgtttgtggctgtgatcatggataatttcgattacctcaccagagattggagcatcttgggtccccatcacttagacgagttcaaacgcatctgggccgaatatgacccggaggcgaaaggtaggatcaaacacctggacgtggtgacattgctgcggaggatccagcccccactggggtttgggaagctctgcccccacagggttgcctgtaagaggctagtcagtatgaacatgcccctgaacagtgatgggaccgtcatgtttaatgccacattgtttgccctggtgcggaccgccttgcgcataaaaaccgaggagggacctagcccaagcgaggcacaccaaggtgctgaagaccctttcaggcccgccggcaacttggagcaggccaatgaggagttacgggcaattatcaagaagatatggaagagaacatcgatgaaactgttggatcaggtcgttcctcctgctggagatgacgaagtaactgtgggtaagttctacgctacatttctcatccaggagtacttccgaaagttcaaaaagaggaaagaacaaggactcgttgggaaaccatctcagaggaacgccctcagtctgcaggccggattgcgtacactccatgatatcgggccggagattcgcagggccattagtggcgacctgactgccgaggaagagttagacaaggctatgaaagaagcggtgtccgccgcgagcgaagatgacatctttaggagagctggtggtttgtttgggaatcacgtgtcctactaccaatcggacggccggtctgcatttccccagacctttacaactcaaaggcctttacacataaataaggccggatcctcccaaggcgatactgaaagcccaagccatgaaaagcttgtggactccacctttacaccaagctcctatagctcaaccggttcaaatgcaaatatcaacaatgccaacaacacagcccttggcaggttgcccaggccagcggggtaccccagtacggtgagcactgttgaaggccatggaccgcctttgagtcccgccatccgggtgcaggaggttgcctggaagctgtcttccaatcggtgtcattcaagagaatcccaggctgcaatggccggacaggaggagaccagccaggatgaaacttatgaggttaaaatgaaccacgatactgaagcatgttcagagcccagcctgttgagcaccgaaatgctctcataccaggacgatgagaataggcagcttacgctgcccgaggaggataagagggacatccgacagtcgccaaagcgggggttcctaagatcagcctctctggggcggagagcatcattccatctggagtgtctgaaaagacaaaaggacaggggaggagatatttcccagaagacagtcctgcctctgcacctggtccaccaccaggctttggcagtggcaggactgtctccattattacagcgttcccattccccagcgagctttccccggcctttcgccaccccccccgcaactccaggttccagaggttggcctccgcagcctgttcccacattgaggctcgagggagtggagtccagcgagaagctcaattctagtttcccctccattcattgcggctcctgggctgaaactacccccggagggggaggcagttccgcagcccgacgagtccggcccgtctctctgatggttccctcccaagcaggggcgcctgggcgacaatttcacggctcagcaagttcacttgtggaagccgtcctgattagtgagggattaggccagttcgcccaggatcctaagtttattgaggtgactacgcaagaactcgctgatgcatgcgatatgaccatcgaggagatggaatccgccgccgataacatcttgtctggaggggcccctcaatcacctaatggagccctgctcccatttgtgaactgtcgcgacgcaggccaggacagagccggcggagaagaggacgccggttgtgtcagggcaagaggtaggccttcagaggaggaactgcaggactctagggtgtacgtctcctcgctgtag

SEQ ID NO: 46927 - DNA, 6474 bp, Artificial Sequence
  derived and/or modified sequence
atggtgaatgaaaacaccaggatgtacatccctgaggagaaccaccagggcagcaactacggcagccccaggcctgcccacgccaacatgaatgccaatgctgctgctggcctggcccctgagcacatccccacccctggggccgccctgtcctggcaggccgccattgatgctgcccggcaggccaagctgatgggcagcgctggaaatgccaccatcagcacagtgagcagcacccagaggaagaggcagcagtatggcaagcccaagaagcagggcagcaccacagccacccggcccccccgggccctgctgtgcctgaccctgaagaaccccatccggcgggcctgcatcagcatcgtggagtggaagccctttgagatcatcatcctgctgaccatctttgccaactgtgtggccctggccatctacatccccttcccagaagatgacagcaatgccaccaacagcaacctggagcgggtggagtacctgttcctgatcatcttcaccgtggaggccttcctgaaggtgattgcctacggcctgctcttccaccccaatgcctacctgagaaatggctggaacctgctggacttcatcatcgtggtggtgggcctcttcagcgccatcctggagcaggccaccaaggcagatggagccaatgccctgggcggcaaaggagctggctttgatgtgaaggccctgcgggccttccgggtgctgcggcccctgcggctggtgtctggagtgcccagcctgcaggtggtgctgaacagcatcatcaaggccatggtgcccctgctgcacatcgccctgctggtgctgtttgtgatcatcatctatgccatcatcggcctggagctgttcatgggcaagatgcacaagacctgctacaaccaggagggcattgctgatgtgcctgcagaagatgaccccagcccctgtgccctggagaccggccacggccggcagtgccagaatggcaccgtgtgcaagccaggctgggatggccccaagcacggcatcaccaactttgacaactttgcctttgccatgctgactgtgttccagtgcatcaccatggagggctggacagatgtgctgtactgggtgaatgatgctgtgggccgggactggccctggatctactttgtgaccctcatcatcatcggcagcttctttgtgctgaacctggtgctgggcgtgctgtctggagagttcagcaaggagcgggagaaggccaaggcccggggggacttccagaagctgcgggagaagcagcagctggaggaggacctgaagggctacctggactggatcacccaggctgaagatattgatcctgaaaatgaagatgagggcatggatgaggagaagcccaggaacatgtccatgcccaccagcgagacagaatctgtgaacacagaaaatgtggccggcggggacatcgagggggagaactgtggggcccggctggcccaccgcatcagcaagagcaagttcagccgctactggaggcgctggaaccgcttctgcaggaggaagtgcagagctgctgtgaagagcaatgtgttctactggctggtgatcttcctggtgttcctgaacaccctgaccatcgccagcgagcactacaaccagcccaactggctgacagaggtgcaggacacagccaacaaggccctgctggccctcttcaccgctgagatgctgctgaagatgtacagcctgggcctgcaggcctactttgtgtccctcttcaacagatttgactgctttgtggtgtgtggcggcatcctggagaccatcctggtggagaccaagatcatgagccccctgggcatctctgtgctgcgctgtgtgcggctgctgcgcatcttcaagatcacccgctactggaacagcctgagcaacctggtggccagcctgctgaacagcgtgcgcagcatcgccagcctgctgctgctgctcttcctgttcatcatcatcttcagcctgctgggcatgcagctgtttggaggcaagttcaactttgatgagatgcagaccaggaggagcacctttgacaacttcccccagagcctgctgaccgtcttccagatcctgaccggggaggactggaacagcgtgatgtatgatggcatcatggcctatggaggccccagcttccctggcatgctggtgtgcatctacttcatcatcctcttcatctgtggcaactacatcctgctgaatgtgttcctggccatcgctgtggacaacctggctgatgctgagagcctgaccagcgcccagaaggaggaggaggaggagaaggagaggaagaagctggccaggacagccagccctgagaagaagcaggagctggtggagaagccagctgtgggggagagcaaggaggagaagattgagctgaagagcatcacagcagatggagagagccccccagccaccaagatcaacatggatgacctgcagcccaatgaaaatgaagacaagagcccctaccccaaccctgagaccactggagaggaggatgaggaggagcctgagatgcctgtgggcccccggccccggcccctgtctgagctgcacctgaaggagaaggctgtgcccatgcctgaggccagcgccttcttcatcttcagcagcaacaaccgcttccggctgcagtgccaccgcatcgtgaatgacaccatcttcaccaacctgatcctcttcttcatcctgctgagcagcatcagcctggccgctgaggaccctgtgcagcacaccagcttcaggaaccacatcctcttctactttgacatcgtgttcaccaccatcttcaccatcgagatcgccctgaagatgacagcctatggagccttcctgcacaagggcagcttctgcaggaactacttcaacatcctggacctgctggtggtgtctgtgtccctcatcagctttggcatccagagcagcgccatcaacgtggtgaagatcctgcgggtgctgcgggtgctgcggcccctgcgggccatcaacagagccaagggcctgaagcacgtggtgcagtgtgtgtttgtggccatccgcaccatcggcaacatcgtcatcgtgaccaccctgctgcagttcatgtttgcctgcatcggcgtgcagctgttcaagggcaagctgtacacctgcagcgacagcagcaagcagacagaagctgagtgcaagggcaactacatcacctacaaggatggagaggtggaccaccccatcatccagcccaggtcctgggagaacagcaagtttgattttgacaacgtgctggccgccatgatggccctcttcaccgtgtccacctttgagggctggccagagctgctgtaccgcagcattgacagccacacagaggacaagggccccatctacaactacagagtggagatcagcatcttcttcatcatctacatcatcatcatcgccttcttcatgatgaacatctttgtgggcttcgtcatcgtgaccttccaggagcagggcgagcaggagtacaagaactgtgagctggacaagaaccagaggcagtgtgtggagtatgccctgaaggcccggcccctgcggcgctacatccccaagaaccagcaccagtacaaggtgtggtacgtggtgaacagcacctactttgagtacctgatgtttgtgctgatcctgctgaacaccatctgcctggccatgcagcactacggccagagctgcctcttcaagatcgccatgaacatcctgaacatgctgttcaccggcctcttcaccgtggagatgatcctgaagctgattgccttcaagcccaagcactacttctgtgatgcctggaacacctttgatgccctgattgtggtgggcagcatcgtggacatcgccatcacagaggtgaacccagctgagcacacccagtgcagccccagcatgaatgctgaggagaacagccgcatcagcatcaccttcttccgcctcttccgggtgatgaggctggtgaagctgctgagcagaggagagggcatccgcaccctgctgtggaccttcatcaagagcttccaggccctgccctacgtggccctgctgattgtgatgctgttcttcatctatgctgtgattggcatgcaggtgtttgggaagatcgccctgaatgacaccacagagatcaacagaaacaacaacttccagaccttcccccaggccgtgctgctgctcttccgctgtgccaccggggaggcctggcaggacatcatgctggcctgcatgcctgggaagaagtgtgcccctgagagcgagcccagcaacagcacagaaggagagaccccctgtggcagcagctttgctgtgttctacttcatctccttctacatgctgtgtgccttcctgatcatcaacctgtttgtggccgtcatcatggacaactttgactacctgacccgggactggagcatcctgggcccccaccacctggatgagttcaagaggatctgggccgagtatgaccctgaggccaagggccgcatcaagcacctggatgtggtgaccctgctgcggcgcatccagccccccctgggctttgggaagctgtgcccccaccgggtggcctgcaagaggctggtgtccatgaacatgcccctgaacagtgatggcaccgtgatgtttaatgccaccctgtttgccctggtgaggacagccctgcgcatcaagacagaggagggccccagccccagcgaggcccaccagggcgctgaggaccccttccggcctgctggcaacctggagcaggccaatgaggagctgcgggccatcatcaagaagatctggaagaggacctccatgaagctgctggaccaggtggtgcccccagctggagatgatgaggtgacagtgggcaagttctacgccaccttcctgatccaggagtacttcaggaagttcaagaagaggaaggagcagggcctggtgggcaagcccagccagagaaatgccctgagcctgcaggccggcctgcggaccctgcatgacatcggccctgagatcagaagagccatcagcggggacctgacagctgaggaggagctggacaaggccatgaaggaggccgtgtctgctgcctctgaagatgacatcttccggcgggccggcggcctgtttggaaatcatgtgtcctactaccagagtgatggccgcagcgccttcccccagaccttcaccacccagaggcccctgcacatcaacaaggccggcagcagccagggcgacacagagagccccagccatgagaagctggtggacagcaccttcacccccagcagctacagcagcacaggcagcaatgccaacatcaacaatgccaacaacacagccctgggccgcctgcccaggcctgctggctaccccagcacagtgtccacagtggagggccacggcccccccctgagccctgccatccgggtgcaggaggtggcctggaagctgagcagcaaccgctgccacagccgggagagccaggccgccatggccggccaggaggagaccagccaggatgagacctatgaggtgaagatgaaccacgacacagaggcctgcagcgagcccagcctgctgagcacagagatgctgagctaccaggatgatgagaaccggcagctgaccctgcctgaggaggacaagagggacatccggcagagccccaagaggggcttcctgcggagcgccagcctgggccggcgggccagcttccacctggagtgcctgaagaggcagaaggaccggggcggggacatcagccagaagacagtgctgcccctgcacctggtgcaccaccaggccctggccgtggccggcctgagccccctgctgcagaggagccacagccctgccagcttcccccggccctttgccaccccaccagccaccccaggcagccggggctggccaccccagcctgtgcccaccctgcggctggagggcgtggagagcagcgagaagctgaacagcagcttccccagcatccactgcggctcctgggccgagaccaccccaggcggcggcggcagcagcgctgcccggcgggtgcggcctgtgtccctgatggtgcccagccaggccggggcccctggccggcagttccacggcagcgccagcagcctggtggaggccgtgctgatcagcgagggcctgggccagtttgcccaggaccccaagttcatcgaggtgaccacccaggagctggctgatgcctgtgacatgaccatcgaggagatggagagcgctgctgacaacatcctgagcggcggggccccccagagccccaacggggccctgctgccctttgtgaactgcagagatgctggccaggacagagctggaggagaagaagatgctggctgtgtgcgggcccggggccggcccagcgaggaggagctgcaggacagccgggtgtatgtgagcagcctgtag

SEQ ID NO: 46928 - DNA, 6474 bp, Artificial Sequence
  derived and/or modified sequence
atggtgaacgagaacacccggatgtacatccccgaggagaaccaccagggcagcaactacgggtcccctagacccgcccacgcaaatatgaatgcgaacgcagcggccgggttggcccccgagcacatacctacccctggcgcggcactgagctggcaagctgccattgatgccgcccgtcaggctaaactgatggggtctgcaggaaatgccactatttcaacggtatcctccacgcagagaaagcgacaacaatatggcaagccaaagaagcaagggtcgactactgccaccaggcccccacgggctctcttgtgcctcacactgaaaaaccctattcgtagagcctgcattagcattgtcgagtggaaaccttttgagatcattattctcctgacaatcttcgccaattgtgtcgccctggctatttacatcccatttcctgaagacgattctaacgcgacaaatagcaacctcgagcgcgtggaatatttgtttctcattatctttaccgtcgaggcctttcttaaagtaattgcatacgggctgcttttccatcccaacgcctatttacgcaatggatggaaccttttggacttcattatcgttgtggtcggcctcttttccgcaatactcgagcaggcaaccaaagcagacggagccaacgcactgggcggcaagggggccgggtttgatgtcaaggcactgagagcctttagggtgctccggccgctgagacttgtcagcggggtaccctcgctccaggtggtgctcaatagcattatcaaggcgatggttccgctgctgcacatcgccctgctggtactgttcgtaattataatttacgccatcataggcctcgaactttttatgggcaaaatgcataaaacctgttacaaccaggagggaatcgcagatgtgcctgccgaggacgacccctcaccgtgtgcactggaaactggccatgggaggcagtgtcagaatgggacagtgtgtaaacctggctgggatggtccgaagcacggaataaccaatttcgacaactttgccttcgcaatgttgaccgtctttcaatgcattacaatggagggctggactgacgttctctactgggtcaacgatgccgtgggccgagactggccctggatctactttgttacgctgattatcataggctccttctttgtgctgaatctagttttaggcgtgcttagcggcgagtttagcaaagagagagagaaagcaaaggccaggggagactttcagaagctgcgggaaaagcagcagctagaagaagacctgaaaggctatctggactggatcacccaggccgaagacattgacccagaaaatgaggatgagggaatggatgaggagaaacctaggaacatgtcaatgcctacctcggagactgaatcagtcaatacggagaatgttgcagggggcgacattgagggggaaaactgcggcgcaaggctggctcacagaatctccaagagcaaattcagtcggtactggaggagatggaaccgattctgtcggcgaaagtgccgtgccgctgtgaagagtaatgtgttttattggctggtcattttcctggtgtttttgaataccctgacaattgcaagcgaacactacaatcagccaaactggctgaccgaagtccaggacacagccaataaggcactgttggctctgttcaccgcagagatgctgttaaagatgtactctctgggcttgcaagcttacttcgtgtcactgttcaaccgattcgattgtttcgtcgtgtgtggaggcatactggagaccattcttgtcgagactaaaatcatgtcccccttggggatcagcgtacttcgctgtgtccggctgttgcggattttcaagattaccagatattggaatagcttaagtaatctcgtggcgagcctccttaatagcgtccgcagcatcgcaagtcttctcctcctgctgtttctgttcataatcatcttttctctcctgggaatgcaacttttcggaggtaaattcaatttcgacgaaatgcagacccggaggtctacattcgataacttcccacaatctctgttgactgtctttcagatactgaccggcgaggattggaactcggtgatgtatgatgggattatggcttatggaggcccttccttccctggcatgctggtgtgtatctatttcatcattctgtttatctgcggaaactacattctgctgaacgtgttcctcgccatcgcggtcgacaacttggcggatgcagagtcacttaccagcgcccagaaggaagaggaggaagaaaaagagcggaaaaagctcgcccggaccgcaagtcccgagaaaaaacaagagctcgtcgagaaaccagcagtgggtgagtctaaggaggagaaaatcgaattaaaaagcataaccgccgatggagagtcacccccagccaccaagataaatatggacgatcttcagccaaatgagaatgaggacaaatccccctatcccaatcccgagaccaccggagaggaggacgaagaggaacccgagatgccggttggcccaagacctaggccattgtcggagctgcacctaaaggagaaggctgtgcctatgccagaggcttctgccttttttatatttagtagcaacaatcgcttcaggttgcagtgtcaccgcattgtaaacgacaccatatttactaatcttatcctgttcttcattctgctgagttctatctctttggctgcagaggatccagtgcagcacacctctttccggaatcacattctcttttattttgatatcgtgtttacgactatcttcactattgagatcgcattaaagatgacagcctacggagctttcttgcacaagggatccttctgcaggaactactttaatattctagacctattggtcgtgtccgtgagcttaatctcctttggtattcagtcatccgcaatcaacgtcgtcaaaatcctcagagtgttacgggtgttacgccccctgagagccatcaatagagccaagggcctgaagcacgtggtgcaatgcgtctttgtggccattagaactattggtaatattgtcattgtgactactctgttgcagttcatgttcgcatgcattggggtgcagttattcaagggcaaactctacacttgctctgattctagcaagcagacagaagctgaatgtaaaggcaactatattacttataaggatggcgaagtcgatcacccaattattcagcccagatcatgggagaattctaagttcgattttgataacgttctggctgctatgatggccttattcaccgtgtcaacgttcgaaggatggccagagctactataccggagcatcgacagccatactgaggataagggtcccatttacaattaccgcgttgagataagtattttcttcattatttatataatcattatcgccttttttatgatgaacatatttgtcggtttcgtcattgtgaccttccaagagcagggagaacaagagtataagaactgtgagctggacaagaatcaaaggcagtgtgtggagtatgccttgaaagcccgccctctgagacgttatattcccaaaaaccagcatcagtataaggtctggtacgtggtaaattcaacctactttgagtacctgatgttcgttcttatactactcaatacgatatgtctagcaatgcagcactacggtcagagctgcctctttaagatagctatgaacattttgaacatgttgtttactggactgttcacggtggaaatgatcttgaagttaattgctttcaaacccaagcattacttctgcgatgcatggaataccttcgatgcgctgatagtggtgggttcaatcgtggacatcgctatcacggaggtgaatcccgctgagcacacccagtgtagcccttcaatgaatgctgaagagaacagtcgcatttctattactttctttcggctgtttagagtaatgcggcttgttaagttactctcgcgaggcgaagggatccgtactctactatggacgtttattaagtctttccaggcattaccttacgtggccctgttgattgtgatgctgttctttatttacgcggtgattggcatgcaagttttcggcaagattgcacttaatgatactacagagataaaccgaaataacaacttccaaacgttccctcaggccgtgttgttattattcagatgcgctacaggagaggcctggcaggatattatgctggcatgtatgcccggtaaaaagtgcgctccggagtctgaaccaagcaacagcacggagggagaaaccccttgcggcagttcatttgctgtgttctactttatttctttctatatgctgtgtgctttcctcataatcaatttgtttgtggcagtcatcatggataacttcgactatctgaccagagattggtccatcttgggtccccaccatctcgatgagttcaaaagaatctgggcagagtatgaccccgaagctaagggaaggatcaaacacctggacgtggtgacactactaagacggatccagccaccgttgggttttgggaagctgtgcccacatcgcgtagcttgtaaacgtctcgtctcgatgaatatgcctctgaactctgacggtaccgtcatgttcaacgccaccctgtttgccctggtccggaccgccctgcgtatcaaaaccgaggaagggcctagcccctcagaggcccaccaaggggcggaggatccatttcgacccgccggtaacttagagcaggccaacgaggaactcagggccatcattaagaaaatctggaagcgcacatcaatgaagcttttggaccaggtagttccaccagccggcgacgacgaggtcacagtgggcaagttctacgccacatttctgatacaggagtactttcggaaattcaaaaagaggaaagagcaggggctggtggggaaaccgagccagcggaatgcactgtctctacaagctgggcttcgaaccctgcacgatattgggcctgagatccgtagggcaatctctggggatctcactgccgaggaggaactcgacaaagctatgaaagaggccgtgagcgctgccagcgaagacgatatcttcagacgtgccggcggtcttttcggaaatcacgtgtcgtattatcagagtgacggtcgttctgcctttcctcagacctttactacccagaggccactgcatatcaacaaggccggtagctcacaaggcgacacagagagcccttctcatgagaagcttgttgactccaccttcacaccgtcttcatacagttccaccggatccaatgcgaacataaataatgcaaataatacggccctgggcaggctgcccagacccgcaggctatccttctacagtgtccaccgtggagggtcacgggccccccctgagtcccgcaattagagtacaagaggtcgcttggaaattgagttcaaaccgctgccatagccgagaatctcaggccgccatggctggccaggaagagacttctcaggatgagacctatgaggtcaaaatgaaccatgacactgaagcctgttccgaaccctccctgctatccacagaaatgctgtcataccaagatgacgagaaccggcagcttacactgccagaggaagacaaaagggacattcggcagtcccccaagcggggctttctgagatccgcctctttagggcgccgtgcctccttccatctagaatgtttgaaaagacagaaagacaggggaggcgacattagccagaagactgttctgcccttgcatttggtgcatcatcaagccctggcagtggcgggcttgagccctctccttcagagatctcattctcctgccagcttcccaaggccattcgctaccccgcccgccacgcctggctcaagggggtggccaccgcagccagtgcctacactccgtttggagggcgtggagagctctgaaaaactgaactcgtctttccccagtatccactgcggatcctgggcagaaaccactccaggagggggaggctcctctgctgcccgcagagtgcgccccgttagtcttatggttccttcgcaggccggcgcccctggtcgccagtttcatggctccgcttctagcctggtggaagccgtcctaatctctgagggcctgggacagttcgcccaggaccccaaatttatcgaggtcactactcaggaactcgccgacgcatgtgatatgacaattgaagaaatggaatccgcggctgacaacatactttctggcggcgctccccaatccccgaatggggctttactcccatttgtaaactgccgtgatgctgggcaggaccgtgctggcggagaagaggacgcgggctgtgtgcgggcgagaggccgtccctcagaggaggagctgcaggattctcgcgtgtacgtgtcatcactgtag

SEQ ID NO: 46929 - DNA, 6474 bp, Artificial Sequence
  derived and/or modified sequence
atggtgaacgagaatacccggatgtacattcccgaggagaaccaccagggatctaactacggctcacctcggccagcccacgccaacatgaacgctaacgcagcggctggcctggcgccagagcacatccctacccccggagcggctctgtcatggcaagcagctattgatgctgctagacaggcgaaattgatgggctcagccggaaacgctaccatcagtactgtctcaagcacccagaggaagagacaacaatacggtaaacctaagaagcagggctcgaccacagcgacccgacccccaagagctctcttgtgcctgactctcaagaaccccattcggagggcatgtatctccatcgtggaatggaaaccattcgaaataattatcctgctcaccatatttgctaactgcgtggctctcgccatatacatcccatttccagaggacgactcaaacgcaaccaactcaaacttggagcgagtggagtatctattcctcattatttttacggtcgaggcgtttcttaaggtgattgcctatgggctgttattccaccccaatgcttatttgagaaacggatggaaccttttagactttatcattgtggttgtgggtctcttctcagccatcttggaacaggcgactaaggcagatggcgcaaatgcactgggcggtaagggagccggtttcgacgtgaaggctctgagggccttcagggtgcttcgtccactccgcctggtgtccggtgtcccatccttgcaggtggttcttaatagcatcatcaaagccatggttccactcctacacattgctctacttgttttgttcgttattatcatttacgctataatcggccttgagctctttatgggtaagatgcataagacatgttacaatcaggagggcatcgcggatgtgcccgcagaagacgacccatctccctgcgcactcgaaacgggccacgggagacagtgccagaacggcactgtctgcaaacccggatgggacgggccaaagcacggtatcaccaacttcgataactttgcttttgccatgctgacagtttttcagtgcatcacaatggaaggttggacagatgtgctctactgggtgaacgatgctgtcggtagggattggccctggatttatttcgtgacactcatcataatcgggtctttcttcgtgctgaacctggtattgggggtgttaagcggggagttcagtaaagagagggagaaagcaaaggcgcgaggcgattttcaaaaactgagagaaaaacagcagttagaagaggatctcaaggggtacctggactggatcacccaagccgaagatattgaccctgaaaatgaggacgagggcatggatgaagagaagcccagaaacatgagcatgccgacctctgagactgagagtgtgaatacagaaaacgtggctggaggtgatatcgaaggcgaaaactgcggcgcaaggttggctcaccgcatttcaaagtctaaatttagtaggtattggaggagatggaacaggttctgtagaaggaaatgtcgggcagctgtgaaatctaatgtgttttattggctggtaattttcttggtcttcttaaacaccttgaccatcgcctcggagcattataaccagcccaattggcttacggaagtccaggacaccgccaacaaggccctgctggccctctttaccgccgaaatgctgctgaaaatgtattccctgggtcttcaggcctacttcgtctcccttttcaataggttcgattgtttcgttgtttgtgggggaatcctcgagacaatcctggtggaaacaaagattatgagtccgttgggcatctcagtactgaggtgcgtgagacttctccgcatatttaagataaccaggtactggaacagtctctccaaccttgtggcttcactgctgaactctgtgaggtctattgctagtctgcttctgctgttatttttgttcatcatcatctttagcttactgggcatgcaactcttcggcggaaaattcaatttcgacgagatgcagacccgccgatctacattcgataacttcccccaatcgcttctcacagtgttccaaattttgacaggcgaagactggaatagcgtcatgtatgatggcatcatggcatatgggggaccatcgtttcctgggatgctggtgtgcatttattttataattctgtttatctgtggaaattacatccttctcaatgtgtttctcgccatagctgtggataatctggcggacgcggaatctcttacctccgcacagaaagaggaagaggaggagaaggaacgaaaaaagctcgcacgtactgcgtcacctgaaaaaaagcaggagttggttgaaaaaccagctgtaggcgaatccaaggaggagaagatcgagcttaagagcatcacagccgacggtgaatctccccctgcgactaaaatcaatatggacgatctgcagccaaatgagaacgaggataagagtccatacccaaacccagagaccacaggcgaagaggacgaggaagaaccagagatgcctgtgggaccgaggcctcgtccactatccgaactccacttgaaagaaaaagccgttccaatgccagaagcctccgcattctttatcttttcctctaacaaccgctttcgtctgcaatgccatcgtatagtgaatgacacaatcttcacaaaccttatcctgtttttcatactgctttctagtatatccctggccgcagaggaccctgtacaacacactagctttcgtaatcacattctgttttattttgatatcgtgttcacgacaattttcaccatcgaaatcgcgctcaagatgaccgcatacggggctttcctccacaagggtagcttctgtaggaattatttcaacatactggaccttctcgttgtatccgtgtccctgatctccttcggaatccagtcatccgcgattaatgtggttaagattctgcgggtgctgcgggtcctgaggcctctcagagccatcaatcgtgctaaggggctgaaacacgtcgtgcagtgtgtgtttgtggccattcgtacgattgggaacattgtgatcgttacgaccctgctgcagttcatgttcgcctgcattggtgtgcagttattcaagggtaagctgtacacttgttccgatagtagcaaacaaactgaggctgaatgcaaaggcaattacattacctataaagatggggaggtggatcacccaataattcagccccgaagctgggagaattcaaaattcgatttcgacaatgtgctggcagctatgatggcactgttcacagtgtctacatttgaggggtggcccgagttactgtacaggtcaatcgactcacatacggaggataagggccctatatacaactatagggtcgaaataagcatctttttcatcatatacattattattatcgctttctttatgatgaatatcttcgtaggcttcgtcatagtgacttttcaggagcagggagagcaagaatacaaaaattgcgagctggataaaaaccaaagacagtgcgtggaatatgccctaaaggctcgcccacttaggcgatatattccaaagaatcagcaccagtataaggtgtggtacgtggtgaattccacctatttcgaatatcttatgttcgtgctgatccttctcaatacgatttgtcttgctatgcagcactacgggcaaagctgcttgtttaaaatcgccatgaacattttaaacatgctgtttactggactcttcactgtggaaatgatactgaaattaatcgcctttaaacctaagcattatttctgtgacgcttggaatacgttcgacgctctgatcgttgttggttccatcgttgacattgccattactgaagtgaatccagcagagcacacacagtgctctccctctatgaacgcagaagagaacagccgaatcagcataacattctttcgtctgttccgcgtcatgaggctagtaaagctcctgtcacgcggagaggggatcaggaccctgctatggacattcatcaaaagtttccaggcacttccatatgtggcactccttatcgtaatgcttttcttcatctacgctgtgatcggcatgcaggtcttcggcaagatcgcgctgaatgatacaacagaaataaaccgcaacaacaatttccagacatttccccaagcagttttactgctgtttcgatgcgccaccggagaagcatggcaggacattatgctcgcttgcatgcccggaaagaaatgcgcacccgaatcggagcccagcaatagcactgaaggagagaccccatgcggctcttcctttgctgtgttttatttcataagcttttacatgttgtgcgcttttctgatcataaacctcttcgtcgctgtgataatggataattttgattatctgacgagggactggtccatcctcggccctcaccatttggatgagtttaagcggatatgggctgaatatgacccagaggcaaaaggtcggattaaacatttggacgtggtcaccctgttgagacgcattcagccacctctgggatttggcaaactgtgtccacatcgagttgcttgcaaacggcttgtgtcaatgaatatgcctctcaactccgacggcaccgtcatgttcaatgccacattattcgccttagttcgcaccgcactaaggatcaagacagaggagggtcccagtccctcagaagctcatcagggcgcagaggacccgtttcgccctgccggtaaccttgaacaggctaatgaggaacttagagcgatcattaagaaaatctggaagcgcacgtctatgaagctgctggatcaggtggtgcctcccgcaggcgatgacgaagtaacagtcgggaaattttatgccacattcctcattcaggaatactttcgaaaattcaaaaagcgcaaagaacagggactggtgggcaaaccatctcagagaaacgccctcagccttcaggctggactgcgcacactgcacgatatagggcctgaaatccggagggccatatcaggcgatttgaccgctgaggaggagctcgataaagctatgaaagaggcagtgtccgccgcttcagaggatgatattttcaggcgggcaggcggactcttcggaaaccacgtgtcctactatcaatcagatggacgttccgcgttcccccaaacgtttacaacccagcgcccactccacattaacaaagcaggaagcagccagggggacaccgagtccccctctcatgagaaactggtagacagcacattcactccctcctcttatagtagtactggtagcaatgctaatattaataatgcgaataacaccgcactcggaagactgcctcgcccagccggatacccctccaccgttagcaccgtcgagggtcatggcccaccacttagcccagcgattcgtgtccaggaagtcgcctggaaacttagctctaatagatgtcacagcagggaatcacaagccgctatggctggacaggaagaaacatctcaggacgaaacgtacgaagtcaagatgaaccatgatacagaggcctgtagcgaaccaagcttgcttagcacagagatgttatcctaccaggatgatgaaaatcggcagctcacactgcctgaagaagacaaaagagacatacgccaatcgccgaagcgaggctttctacggtccgcgagtttgggcagaagggccagtttccacctggagtgtctcaagagacagaaggatagaggtggcgatatttctcagaaaacggttctaccactgcatctggtgcaccatcaagctttggcagtcgccggtcttagccctctgctgcagcggagccactctccggcttcctttccaaggcccttcgccactccccctgctactccgggatcccggggttggccgccacagccagtgccaaccctccggttagaaggcgtcgagtcatccgagaagctcaacagcagcttcccgtcaatccattgcggctcctgggctgagactacgcccggtggcggtggctccagtgcagcacgccgtgttagacctgtgtcccttatggtgccctcccaggcgggagccccagggagacagtttcatggaagtgcaagttccttggtggaggctgttcttatctcggaggggctcgggcaatttgcgcaggatcctaagtttattgaagtgacaacacaggagctcgcagatgcatgcgatatgaccatagaagagatggaatccgctgcagacaacattctgagcggcggtgctcctcagagccctaatggagccttgctgcctttcgtgaattgcagggacgccggtcaggatcgggctggtggagaggaggatgccggatgcgtccgggcacgaggaagaccttctgaggaagaactgcaagattcaagagtatacgtttcatctctctac

SEQ ID NO: 46930 - DNA, 6568 bp, Artificial Sequence
  derived and/or modified sequence
atggtcaatgagaatacgaggatgtacattccagaggaaaaccaccaaggttccaactatgggagcccacgccccgcccatgccaacatgaatgccaatgcggcagcggggctggcccctgagcacatccccaccccgggggctgccctgtcgtggcaggcggccatcgacgcagcccggcaggctaagctgatgggcagcgctggcaatgcgaccatctccacagtcagctccacgcagcggaagcggcagcaatatgggaaacccaagaagcagggcagcaccacggccacacgcccgccccgagccctgctctgcctgaccctgaagaaccccatccggagggcctgcatcagcattgtcgaatggaaaccatttgaaataattattttactgactatttttgccaattgtgtggccttagcgatctatattccctttccagaagatgattccaacgccaccaattccaacctggaacgagtggaatatctctttctcataatttttacggtggaagcgtttttaaaagtaatcgcctatggactcctctttcaccccaatgcctacctccgcaacggctggaacctactagattttataattgtggttgtggggctttttagtgcaattttagaacaagcaaccaaagcagatggggcaaacgctctcggagggaaaggggccggatttgatgtgaaggcgctgagggccttccgcgtgctgcgccccctgcggctggtgtccggagtcccaagtctccaggtggtcctgaattccatcatcaaggccatggtccccctgctgcacatcgccctgcttgtgctgtttgtcatcatcatctacgccatcatcggcttggagctcttcatggggaagatgcacaagacctgctacaaccaggagggcatagcagatgttccagcagaagatgacccttccccttgtgcgctggaaacgggccacgggcggcagtgccagaacggcacggtgtgcaagcccggctgggatggtcccaagcacggcatcaccaactttgacaactttgccttcgccatgctcacggtgttccagtgcatcaccatggagggctggacggacgtgctgtactgggtcaatgatgccgtaggaagggactggccctggatctattttgttacactaatcatcatagggtcattttttgtacttaacttggttctcggtgtgcttagcggagagttttccaaagagagggagaaggccaaggcccggggagatttccagaagctgcgggagaagcagcagctagaagaggatctcaaaggctacctggattggatcactcaggccgaagacatcgatcctgagaatgaggacgaaggcatggatgaggagaagccccgaaacatgagcatgcccaccagtgagaccgagtccgtcaacaccgaaaacgtggctggaggtgacatcgagggagaaaactgcggggccaggctggcccaccggatctccaagtcaaagttcagccgctactggcgccggtggaatcggttctgcagaaggaagtgccgcgccgcagtcaagtctaatgtcttctactggctggtgattttcctggtgttcctcaacacgctcaccattgcctctgagcactacaaccagcccaactggctcacagaagtccaagacacggcaaacaaggccctgctggccctgttcacggcagagatgctcctgaagatgtacagcctgggcctgcaggcctacttcgtgtccctcttcaaccgctttgactgcttcgtcgtgtgtggcggcatcctggagaccatcctggtggagaccaagatcatgtccccactgggcatctccgtgctcagatgcgtccggctgctgaggattttcaagatcacgaggtactggaactccttgagcaacctggtggcatccttgctgaactctgtgcgctccatcgcctccctgctccttctcctcttcctcttcatcatcatcttctccctcctggggatgcagctctttggaggaaagttcaactttgatgagatgcagacccggaggagcacattcgataacttcccccagtccctcctcactgtgtttcagatcctgaccggggaggactggaattcggtgatgtatgatgggatcatggcttatggcggcccctcttttccagggatgttagtctgtatttacttcatcatcctcttcatctgtggaaactatatcctactgaatgtgttcttggccattgctgtggacaacctggctgatgctgagagcctcacatctgcccaaaaggaggaggaagaggagaaggagagaaagaagctggccaggactgccagcccagagaagaaacaagagttggtggagaagccggcagtgggggaatccaaggaggagaagattgagctgaaatccatcacggctgacggagagtctccacccgccaccaagatcaacatggatgacctccagcccaatgaaaatgaggataagagcccctaccccaacccagaaactacaggagaagaggatgaggaggagccagagatgcctgtcggccctcgcccacgaccactctctgagcttcaccttaaggaaaaggcagtgcccatgccagaagccagcgcgtttttcatcttcagctctaacaacaggtttcgcctccagtgccaccgcattgtcaatgacacgatcttcaccaacctgatcctcttcttcattctgctcagcagcatttccctggctgctgaggacccggtccagcacacctccttcaggaaccatattctgttttattttgatattgtttttaccaccattttcaccattgaaattgctctgaagatgactgcttatggggctttcttgcacaagggttctttctgccggaactacttcaacatcctggacctgctggtggtcagcgtgtccctcatctcctttggcatccagtccagtgcaatcaatgtcgtgaagatcttgcgagtcctgcgagtactcaggcccctgagggccatcaacagggccaaggggctaaagcatgtggttcagtgtgtgtttgtcgccatccggaccatcgggaacatcgtgattgtcaccaccctgctgcagttcatgtttgcctgcatcggggtccagctcttcaagggaaagctgtacacctgttcagacagttccaagcagacagaggcggaatgcaagggcaactacatcacgtacaaagacggggaggttgaccaccccatcatccaaccccgcagctgggagaacagcaagtttgactttgacaatgttctggcagccatgatggccctcttcaccgtctccaccttcgaagggtggccagagctgctgtaccgctccatcgactcccacacggaagacaagggccccatctacaactaccgtgtggagatctccatcttcttcatcatctacatcatcatcatcgccttcttcatgatgaacatcttcgtgggcttcgtcatcgtcacctttcaggagcagggggagcaggagtacaagaactgtgagctggacaagaaccagcgacagtgcgtggaatacgccctcaaggcccggcccctgcggaggtacatccccaagaaccagcaccagtacaaagtgtggtacgtggtcaactccacctacttcgagtacctgatgttcgtcctcatcctgctcaacaccatctgcctggccatgcagcactacggccagagctgcctgttcaaaatcgccatgaacatcctcaacatgctcttcactggcctcttcaccgtggagatgatcctgaagctcattgccttcaaacccaagcactatttctgtgatgcatggaatacatttgacgccttgattgttgtgggtagcattgttgatatagcaatcaccgaggtaaacccagctgaacatacccaatgctctccctctatgaacgcagaggaaaactcccgcatctccatcaccttcttccgcctgttccgggtcatgcgtctggtgaagctgctgagccgtggggagggcatccggacgctgctgtggaccttcatcaagtccttccaggccctgccctatgtggccctcctgatcgtgatgctgttcttcatctacgcggtgatcgggatgcaggtgtttgggaaaattgccctgaatgataccacagagatcaaccggaacaacaactttcagaccttcccccaggccgtgctgctcctcttcaggtgtgccaccggggaggcctggcaggacatcatgctggcctgcatgccaggcaagaagtgtgccccagagtccgagcccagcaacagcacggagggtgaaacaccctgtggtagcagctttgctgtcttctacttcatcagcttctacatgctctgtgccttcctgatcatcaacctctttgtagctgtcatcatggacaactttgactacctgacaagggactggtccatccttggtccccaccacctggatgagtttaaaagaatctgggcagagtatgaccctgaagccaagggtcgtatcaaacacctggatgtggtgaccctcctccggcggattcagccgccactaggttttgggaagctgtgccctcaccgcgtggcttgcaaacgcctggtctccatgaacatgcctctgaacagcgacgggacagtcatgttcaatgccaccctgtttgccctggtcaggacggccctgaggatcaaaacagaagagggacccagcccatcagaggcccaccaaggggctgaggatcctttccgccctgcagggaacctagaacaagccaatgaggagctgcgggcgatcatcaagaagatctggaagcggaccagcatgaagctgctggaccaggtggtgccccctgcaggtgatgatgaggtcaccgttggcaagttctacgccacgttcctgatccaggagtacttccggaagttcaagaagcgcaaagagcagggccttgtgggcaagccctcccagaggaacgcgctgtctctgcaggctggcttgcgcacactgcatgacatcgggcctgagatccgacgggccatctctggagatctcaccgctgaggaggagctggacaaggccatgaaggaggctgtgtccgctgcttctgaagatgacatcttcaggagggccggtggcctgttcggcaaccacgtcagctactaccaaagcgacggccggagcgccttcccccagaccttcaccactcagcgcccgctgcacatcaacaaggcgggcagcagccagggcgacactgagtcgccatcccacgagaagctggtggactccaccttcaccccgagcagctactcgtccaccggctccaacgccaacatcaacaacgccaacaacaccgccctgggtcgcctccctcgccccgccggctaccccagcacggtcagcactgtggagggccacgggccccccttgtcccctgccatccgggtgcaggaggtggcgtggaagctcagctccaacaggtgccactcccgggagagccaggcagccatggcgggtcaggaggagacgtctcaggatgagacctatgaagtgaagatgaaccatgacacggaggcctgcagtgagcccagcctgctctccacagagatgctctcctaccaggatgacgaaaatcggcaactgacgctcccagaggaggacaagagggacatccggcaatctccgaagaggggtttcctccgctctgcctcactaggtcgaagggcctccttccacctggaatgtctgaagcgacagaaggaccgagggggagacatctctcagaagacagtcctgcccttgcatctggttcatcatcaggcattggcagtggcaggcctgagccccctcctccagagaagccattcccctgcctcattccctaggccttttgccaccccaccagccacacctggcagccgaggctggcccccacagcccgtccccaccctgcggcttgagggggtcgagtccagtgagaaactcaacagcagcttcccatccatccactgcggctcctgggctgagaccacccccggtggcgggggcagcagcgccgcccggagagtccggcccgtctccctcatggtgcccagccaggctggggccccagggaggcagttccacggcagtgccagcagcctggtggaagcggtcttgatttcagaaggactggggcagtttgctcaagatcccaagttcatcgaggtcaccacccaggagctggccgacgcctgcgacatgaccatagaggagatggagagcgcggccgacaacatcctcagcgggggcgccccacagagccccaatggcgccctcttaccctttgtgaactgcagggacgcggggcaggaccgagccgggggcgaagaggacgcgggctgtgtgcgcgcgcggggtcgaccgagtgaggaggagctccaggacagcagggtctacgtcagcagcctgtagtgggcgctgccagatgcgggcttttttttatttgtttcaatgttcctaatgggttcgtttcagaagtgcctcactgttctcgtgacctggagtt

SEQ ID NO: 46931 - DNA, 6474 bp, Artificial Sequence
  derived and/or modified sequence
atggtgaacgagaacaccagaatgtacatccccgaggagaaccaccagggcagcaactacggcagccccagacccgcccacgccaacatgaacgccaacgccgccgccggcctggcccccgagcacatccccacccccggcgccgccctgagctggcaggccgccatcgacgccgccagacaggccaagctgatgggcagcgccggcaacgccaccatcagcaccgtgagcagcacccagagaaagagacagcagtacggcaagcccaagaagcagggcagcaccaccgccaccagaccccccagagccctgctgtgcctgaccctgaagaaccccatcagaagagcctgcatcagcatcgtggagtggaagcccttcgagatcatcatcctgctgaccatcttcgccaactgcgtggccctggccatctacatccccttccccgaggacgacagcaacgccaccaacagcaacctggagagagtggagtacctgttcctgatcatcttcaccgtggaggccttcctgaaggtgatcgcctacggcctgctgttccaccccaacgcctacctgagaaacggctggaacctgctggacttcatcatcgtggtggtgggcctgttcagcgccatcctggagcaggccaccaaggccgacggcgccaacgccctgggcggcaagggcgccggcttcgacgtgaaggccctgagagccttcagagtgctgagacccctgagactggtgagcggcgtgcccagcctgcaggtggtgctgaacagcatcatcaaggccatggtgcccctgctgcacatcgccctgctggtgctgttcgtgatcatcatctacgccatcatcggcctggagctgttcatgggcaagatgcacaagacctgctacaaccaggagggcatcgccgacgtgcccgccgaggacgaccccagcccctgcgccctggagaccggccacggcagacagtgccagaacggcaccgtgtgcaagcccggctgggacggccccaagcacggcatcaccaacttcgacaacttcgccttcgccatgctgaccgtgttccagtgcatcaccatggagggctggaccgacgtgctgtactgggtgaacgacgccgtgggcagagactggccctggatctacttcgtgaccctgatcatcatcggcagcttcttcgtgctgaacctggtgctgggcgtgctgagcggcgagttcagcaaggagagagagaaggccaaggccagaggcgacttccagaagctgagagagaagcagcagctggaggaggacctgaagggctacctggactggatcacccaggccgaggacatcgaccccgagaacgaggacgagggcatggacgaggagaagcccagaaacatgagcatgcccaccagcgagaccgagagcgtgaacaccgagaacgtggccggcggcgacatcgagggcgagaactgcggcgccagactggcccacagaatcagcaagagcaagttcagcagatactggagaagatggaacagattctgcagaagaaagtgcagagccgccgtgaagagcaacgtgttctactggctggtgatcttcctggtgttcctgaacaccctgaccatcgccagcgagcactacaaccagcccaactggctgaccgaggtgcaggacaccgccaacaaggccctgctggccctgttcaccgccgagatgctgctgaagatgtacagcctgggcctgcaggcctacttcgtgagcctgttcaacagattcgactgcttcgtggtgtgcggcggcatcctggagaccatcctggtggagaccaagatcatgagccccctgggcatcagcgtgctgagatgcgtgagactgctgagaatcttcaagatcaccagatactggaacagcctgagcaacctggtggccagcctgctgaacagcgtgagaagcatcgccagcctgctgctgctgctgttcctgttcatcatcatcttcagcctgctgggcatgcagctgttcggcggcaagttcaacttcgacgagatgcagaccagaagaagcaccttcgacaacttcccccagagcctgctgaccgtgttccagatcctgaccggcgaggactggaacagcgtgatgtacgacggcatcatggcctacggcggccccagcttccccggcatgctggtgtgcatctacttcatcatcctgttcatctgcggcaactacatcctgctgaacgtgttcctggccatcgccgtggacaacctggccgacgccgagagcctgaccagcgcccagaaggaggaggaggaggagaaggagagaaagaagctggccagaaccgccagccccgagaagaagcaggagctggtggagaagcccgccgtgggcgagagcaaggaggagaagatcgagctgaagagcatcaccgccgacggcgagagcccccccgccaccaagatcaacatggacgacctgcagcccaacgagaacgaggacaagagcccctaccccaaccccgagaccaccggcgaggaggacgaggaggagcccgagatgcccgtgggccccagacccagacccctgagcgagctgcacctgaaggagaaggccgtgcccatgcccgaggccagcgccttcttcatcttcagcagcaacaacagattcagactgcagtgccacagaatcgtgaacgacaccatcttcaccaacctgatcctgttcttcatcctgctgagcagcatcagcctggccgccgaggaccccgtgcagcacaccagcttcagaaaccacatcctgttctacttcgacatcgtgttcaccaccatcttcaccatcgagatcgccctgaagatgaccgcctacggcgccttcctgcacaagggcagcttctgcagaaactacttcaacatcctggacctgctggtggtgagcgtgagcctgatcagcttcggcatccagagcagcgccatcaacgtggtgaagatcctgagagtgctgagagtgctgagacccctgagagccatcaacagagccaagggcctgaagcacgtggtgcagtgcgtgttcgtggccatcagaaccatcggcaacatcgtgatcgtgaccaccctgctgcagttcatgttcgcctgcatcggcgtgcagctgttcaagggcaagctgtacacctgcagcgacagcagcaagcagaccgaggccgagtgcaagggcaactacatcacctacaaggacggcgaggtggaccaccccatcatccagcccagaagctgggagaacagcaagttcgacttcgacaacgtgctggccgccatgatggccctgttcaccgtgagcaccttcgagggctggcccgagctgctgtacagaagcatcgacagccacaccgaggacaagggccccatctacaactacagagtggagatcagcatcttcttcatcatctacatcatcatcatcgccttcttcatgatgaacatcttcgtgggcttcgtgatcgtgaccttccaggagcagggcgagcaggagtacaagaactgcgagctggacaagaaccagagacagtgcgtggagtacgccctgaaggccagacccctgagaagatacatccccaagaaccagcaccagtacaaggtgtggtacgtggtgaacagcacctacttcgagtacctgatgttcgtgctgatcctgctgaacaccatctgcctggccatgcagcactacggccagagctgcctgttcaagatcgccatgaacatcctgaacatgctgttcaccggcctgttcaccgtggagatgatcctgaagctgatcgccttcaagcccaagcactacttctgcgacgcctggaacaccttcgacgccctgatcgtggtgggcagcatcgtggacatcgccatcaccgaggtgaaccccgccgagcacacccagtgcagccccagcatgaacgccgaggagaacagcagaatcagcatcaccttcttcagactgttcagagtgatgagactggtgaagctgctgagcagaggcgagggcatcagaaccctgctgtggaccttcatcaagagcttccaggccctgccctacgtggccctgctgatcgtgatgctgttcttcatctacgccgtgatcggcatgcaggtgttcggcaagatcgccctgaacgacaccaccgagatcaacagaaacaacaacttccagaccttcccccaggccgtgctgctgctgttcagatgcgccaccggcgaggcctggcaggacatcatgctggcctgcatgcccggcaagaagtgcgcccccgagagcgagcccagcaacagcaccgagggcgagaccccctgcggcagcagcttcgccgtgttctacttcatcagcttctacatgctgtgcgccttcctgatcatcaacctgttcgtggccgtgatcatggacaacttcgactacctgaccagagactggagcatcctgggcccccaccacctggacgagttcaagagaatctgggccgagtacgaccccgaggccaagggcagaatcaagcacctggacgtggtgaccctgctgagaagaatccagccccccctgggcttcggcaagctgtgcccccacagagtggcctgcaagagactggtgagcatgaacatgcccctgaacagcgacggcaccgtgatgttcaacgccaccctgttcgccctggtgagaaccgccctgagaatcaagaccgaggagggccccagccccagcgaggcccaccagggcgccgaggaccccttcagacccgccggcaacctggagcaggccaacgaggagctgagagccatcatcaagaagatctggaagagaaccagcatgaagctgctggaccaggtggtgccccccgccggcgacgacgaggtgaccgtgggcaagttctacgccaccttcctgatccaggagtacttcagaaagttcaagaagagaaaggagcagggcctggtgggcaagcccagccagagaaacgccctgagcctgcaggccggcctgagaaccctgcacgacatcggccccgagatcagaagagccatcagcggcgacctgaccgccgaggaggagctggacaaggccatgaaggaggccgtgagcgccgccagcgaggacgacatcttcagaagagccggcggcctgttcggcaaccacgtgagctactaccagagcgacggcagaagcgccttcccccagaccttcaccacccagagacccctgcacatcaacaaggccggcagcagccagggcgacaccgagagccccagccacgagaagctggtggacagcaccttcacccccagcagctacagcagcaccggcagcaacgccaacatcaacaacgccaacaacaccgccctgggcagactgcccagacccgccggctaccccagcaccgtgagcaccgtggagggccacggcccccccctgagccccgccatcagagtgcaggaggtggcctggaagctgagcagcaacagatgccacagcagagagagccaggccgccatggccggccaggaggagaccagccaggacgagacctacgaggtgaagatgaaccacgacaccgaggcctgcagcgagcccagcctgctgagcaccgagatgctgagctaccaggacgacgagaacagacagctgaccctgcccgaggaggacaagagagacatcagacagagccccaagagaggcttcctgagaagcgccagcctgggcagaagagccagcttccacctggagtgcctgaagagacagaaggacagaggcggcgacatcagccagaagaccgtgctgcccctgcacctggtgcaccaccaggccctggccgtggccggcctgagccccctgctgcagagaagccacagccccgccagcttccccagacccttcgccaccccccccgccacccccggcagcagaggctggcccccccagcccgtgcccaccctgagactggagggcgtggagagcagcgagaagctgaacagcagcttccccagcatccactgcggcagctgggccgagaccacccccggcggcggcggcagcagcgccgccagaagagtgagacccgtgagcctgatggtgcccagccaggccggcgcccccggcagacagttccacggcagcgccagcagcctggtggaggccgtgctgatcagcgagggcctgggccagttcgcccaggaccccaagttcatcgaggtgaccacccaggagctggccgacgcctgcgacatgaccatcgaggagatggagagcgccgccgacaacatcctgagcggcggcgccccccagagccccaacggcgccctgctgcccttcgtgaactgcagagacgccggccaggacagagccggcggcgaggaggacgccggctgcgtgagagccagaggcagacccagcgaggaggagctgcaggacagcagagtgtacgtgagcagcctgtag

SEQ ID NO: 46932 - protein, 2157 aa, Artificial Sequence
  derived and/or modified sequence
MVNENTRMYIPEENHQGSNYGSPRPAHANMNANAAAGLAPEHIPTPGAALSWQAAIDAARQAKLMGSAGNATISTVSSTQRKRQQYGKPKKQGSTTATRPPRALLCLTLKNPIRRACISIVEWKPFEIIILLTIFANCVALAIYIPFPEDDSNATNSNLERVEYLFLIIFTVEAFLKVIAYGLLFHPNAYLRNGWNLLDFIIVVVGLFSAILEQATKADGANALGGKGAGFDVKALRAFRVLRPLRLVSGVPSLQVVLNSIIKAMVPLLHIALLVLFVIIIYAIIGLELFMGKMHKTCYNQEGIADVPAEDDPSPCALETGHGRQCQNGTVCKPGWDGPKHGITNFDNFAFAMLTVFQCITMEGWTDVLYWVNDAVGRDWPWIYFVTLIIIGSFFVLNLVLGVLSGEFSKEREKAKARGDFQKLREKQQLEEDLKGYLDWITQAEDIDPENEDEGMDEEKPRNMSMPTSETESVNTENVAGGDIEGENCGARLAHRISKSKFSRYWRRWNRFCRRKCRAAVKSNVFYWLVIFLVFLNTLTIASEHYNQPNWLTEVQDTANKALLALFTAEMLLKMYSLGLQAYFVSLFNRFDCFVVCGGILETILVETKIMSPLGISVLRCVRLLRIFKITRYWNSLSNLVASLLNSVRSIASLLLLLFLFIIIFSLLGMQLFGGKFNFDEMQTRRSTFDNFPQSLLTVFQILTGEDWNSVMYDGIMAYGGPSFPGMLVCIYFIILFICGNYILLNVFLAIAVDNLADAESLTSAQKEEEEEKERKKLARTASPEKKQELVEKPAVGESKEEKIELKSITADGESPPATKINMDDLQPNENEDKSPYPNPETTGEEDEEEPEMPVGPRPRPLSELHLKEKAVPMPEASAFFIFSSNNRFRLQCHRIVNDTIFTNLILFFILLSSISLAAEDPVQHTSFRNHILGNADYVFTSIFTLEIILKMTAYGAFLHKGSFCRNYFNILDLLVVSVSLISFGIQSSAINVVKILRVLRVLRPLRAINRAKGLKHVVQCVFVAIRTIGNIVIVTTLLQFMFACIGVQLFKGKLYTCSDSSKQTEAECKGNYITYKDGEVDHPIIQPRSWENSKFDFDNVLAAMMALFTVSTFEGWPELLYRSIDSHTEDKGPIYNYRVEISIFFIIYIIIIAFFMMNIFVGFVIVTFQEQGEQEYKNCELDKNQRQCVEYALKARPLRRYIPKNQHQYKVWYVVNSTYFEYLMFVLILLNTICLAMQHYGQSCLFKIAMNILNMLFTGLFTVEMILKLIAFKPKHYFCDAWNTFDALIVVGSIVDIAITEVNPAEHTQCSPSMNAEENSRISITFFRLFRVMRLVKLLSRGEGIRTLLWTFIKSFQALPYVALLIVMLFFIYAVIGMQVFGKIALNDTTEINRNNNFQTFPQAVLLLFRCATGEAWQDIMLACMPGKKCAPESEPSNSTEGETPCGSSFAVFYFISFYMLCAFLIINLFVAVIMDNFDYLTRDWSILGPHHLDEFKRIWAEYDPEAKGRIKHLDVVTLLRRIQPPLGFGKLCPHRVACKRLVSMNMPLNSDGTVMFNATLFALVRTALRIKTEEGPSPSEAHQGAEDPFRPAGNLEQANEELRAIIKKIWKRTSMKLLDQVVPPAGDDEVTVGKFYATFLIQEYFRKFKKRKEQGLVGKPSQRNALSLQAGLRTLHDIGPEIRRAISGDLTAEEELDKAMKEAVSAASEDDIFRRAGGLFGNHVSYYQSDGRSAFPQTFTTQRPLHINKAGSSQGDTESPSHEKLVDSTFTPSSYSSTGSNANINNANNTALGRLPRPAGYPSTVSTVEGHGPPLSPAIRVQEVAWKLSSNRCHSRESQAAMAGQEETSQDETYEVKMNHDTEACSEPSLLSTEMLSYQDDENRQLTLPEEDKRDIRQSPKRGFLRSASLGRRASFHLECLKRQKDRGGDISQKTVLPLHLVHHQALAVAGLSPLLQRSHSPASFPRPFATPPATPGSRGWPPQPVPTLRLEGVESSEKLNSSFPSIHCGSWAETTPGGGGSSAARRVRPVSLMVPSQAGAPGRQFHGSASSLVEAVLISEGLGQFAQDPKFIEVTTQELADACDMTIEEMESAADNILSGGAPQSPNGALLPFVNCRDAGQDRAGGEEDAGCVRARGRPSEEELQDSRVYVSSL

SEQ ID NO: 46933 - protein, 1279 aa, Artificial Sequence
  derived and/or modified sequence
MVNENTRMYIPEENHQGSNYGSPRPAHANMNANAAAGLAPEHIPTPGAALSWQAAIDAARQAKLMGSAGNATISTVSSTQRKRQQYGKPKKQGSTTATRPPRALLCLTLKNPIRRACISIVEWKPFEIIILLTIFANCVALAIYIPFPEDDSNATNSNLERVEYLFLIIFTVEAFLKVIAYGLLFHPNAYLRNGWNLLDFIIVVVGLFSAILEQATKADGANALGGKGAGFDVKALRAFRVLRPLRLVSGVPSLQVVLNSIIKAMVPLLHIALLVLFVIIIYAIIGLELFMGKMHKTCYNQEGIADVPAEDDPSPCALETGHGRQCQNGTVCKPGWDGPKHGITNFDNFAFAMLTVFQCITMEGWTDVLYWVNDAVGRDWPWIYFVTLIIIGSFFVLNLVLGVLSGEFSKEREKAKARGDFQKLREKQQLEEDLKGYLDWITQAEDIDPENEDEGMDEEKPRNMSMPTSETESVNTENVAGGDIEGENCGARLAHRISKSKFSRYWRRWNRFCRRKCRAAVKSNVFYWLVIFLVFLNTLTIASEHYNQPNWLTEVQDTANKALLALFTAEMLLKMYSLGLQAYFVSLFNRFDCFVVCGGILETILVETKIMSPLGISVLRCVRLLRIFKITRYWNSLSNLVASLLNSVRSIASLLLLLFLFIIIFSLLGMQLFGGKFNFDEMQTRRSTFDNFPQSLLTVFQILTGEDWNSVMYDGIMAYGGPSFPGMLVCIYFIILFICGNYILLNVFLAIAVDNLADAESLTSAQKEEEEEKERKKLARTASPEKKQELVEKPAVGESKEEKIELKSITADGESPPATKINMDDLQPNENEDKSPYPNPETTGEEDEEEPEMPVGPRPRPLSELHLKEKAVPMPEASAFFIFSSNNRFRLQCHRIVNDTIFTNLILFFILLSSISLAAEDPVQHTSFRNHILGNADYVFTSIFTLEIILKMTAYGAFLHKGSFCRNYFNILDLLVVSVSLISFGIQSSAINVVKILRVLRVLRPLRAINRAKGLKHVVQCVFVAIRTIGNIVIVTTLLQFMFACIGVQLFKGKLYTCSDSSKQTEAECKGNYITYKDGEVDHPIIQPRSWENSKFDFDNVLAAMMALFTVSTFEGWPELLYRSIDSHTEDKGPIYNYRVEISIFFIIYIIIIAFFMMNIFVGFVIVTFQEQGEQEYKNCELDKNQRQCVEYALKARPLRRYIPKNQHQYKVWYVVNSTYFEYLMFVLILLNTICLAMQHYGQSCLFKIAMNILNMLFTGLFTVEMILKLIAFKPKVGL

SEQ ID NO: 46934 - DNA, 13537 bp, Artificial Sequence
  derived and/or modified sequence
ttattttttcaaatggtgtagccgccggaggtgcggtgctcagttcttggaaggggcccggatgtactgaggatgcgttacagtttcactcgaggaggcagtagtggaaaggagcagtttttggggtttgatgccataatgggaatcaggtaatcgtcggcggggaagaagaaacgctgcagaccacggcttcctcgaatcttgcgcgaaagccgccggcctcggaggagggattaatccagacccgccggggggtgttttcacatttcttcctcttcgtggctgctcctcctattaaaaccatttttggtccatggtcaatgagaatacgaggatgtacattccagaggaaaaccaccaaggttccaactatgggagcccacgccccgcccatgccaacatgaatgccaatgcggcagcggggctggcccctgagcacatccccaccccgggggctgccctgtcgtggcaggcggccatcgacgcagcccggcaggctaagctgatgggcagcgctggcaatgcgaccatctccacagtcagctccacgcagcggaagcggcagcaatatgggaaacccaagaagcagggcagcaccacggccacacgcccgccccgagccctgctctgcctgaccctgaagaaccccatccggagggcctgcatcagcattgtcgaatggaaaccatttgaaataattattttactgactatttttgccaattgtgtggccttagcgatctatattccctttccagaagatgattccaacgccaccaattccaacctggaacgagtggaatatctctttctcataatttttacggtggaagcgtttttaaaagtaatcgcctatggactcctctttcaccccaatgcctacctccgcaacggctggaacctactagattttataattgtggttgtggggctttttagtgcaattttagaacaagcaaccaaagcagatggggcaaacgctctcggagggaaaggggccggatttgatgtgaaggcgctgagggccttccgcgtgctgcgccccctgcggctggtgtccggagtcccaagtctccaggtggtcctgaattccatcatcaaggccatggtccccctgctgcacatcgccctgcttgtgctgtttgtcatcatcatctacgccatcatcggcttggagctcttcatggggaagatgcacaagacctgctacaaccaggagggcatagcagatgttccagcagaagatgacccttccccttgtgcgctggaaacgggccacgggcggcagtgccagaacggcacggtgtgcaagcccggctgggatggtcccaagcacggcatcaccaactttgacaactttgccttcgccatgctcacggtgttccagtgcatcaccatggagggctggacggacgtgctgtactgggtcaatgatgccgtaggaagggactggccctggatctattttgttacactaatcatcatagggtcattttttgtacttaacttggttctcggtgtgcttagcggagagttttccaaagagagggagaaggccaaggcccggggagatttccagaagctgcgggagaagcagcagctagaagaggatctcaaaggctacctggattggatcactcaggccgaagacatcgatcctgagaatgaggacgaaggcatggatgaggagaagccccgaaacatgagcatgcccaccagtgagaccgagtccgtcaacaccgaaaacgtggctggaggtgacatcgagggagaaaactgcggggccaggctggcccaccggatctccaagtcaaagttcagccgctactggcgccggtggaatcggttctgcagaaggaagtgccgcgccgcagtcaagtctaatgtcttctactggctggtgattttcctggtgttcctcaacacgctcaccattgcctctgagcactacaaccagcccaactggctcacagaagtccaagacacggcaaacaaggccctgctggccctgttcacggcagagatgctcctgaagatgtacagcctgggcctgcaggcctacttcgtgtccctcttcaaccgctttgactgcttcgtcgtgtgtggcggcatcctggagaccatcctggtggagaccaagatcatgtccccactgggcatctccgtgctcagatgcgtccggctgctgaggattttcaagatcacgaggtactggaactccttgagcaacctggtggcatccttgctgaactctgtgcgctccatcgcctccctgctccttctcctcttcctcttcatcatcatcttctccctcctggggatgcagctctttggaggaaagttcaactttgatgagatgcagacccggaggagcacattcgataacttcccccagtccctcctcactgtgtttcagatcctgaccggggaggactggaattcggtgatgtatgatgggatcatggcttatggcggcccctcttttccagggatgttagtctgtatttacttcatcatcctcttcatctgtggaaactatatcctactgaatgtgttcttggccattgctgtggacaacctggctgatgctgagagcctcacatctgcccaaaaggaggaggaagaggagaaggagagaaagaagctggccaggactgccagcccagagaagaaacaagagttggtggagaagccggcagtgggggaatccaaggaggagaagattgagctgaaatccatcacggctgacggagagtctccacccgccaccaagatcaacatggatgacctccagcccaatgaaaatgaggataagagcccctaccccaacccagaaactacaggagaagaggatgaggaggagccagagatgcctgtcggccctcgcccacgaccactctctgagcttcaccttaaggaaaaggcagtgcccatgccagaagccagcgcgtttttcatcttcagctctaacaacaggtttcgcctccagtgccaccgcattgtcaatgacacgatcttcaccaacctgatcctcttcttcattctgctcagcagcatttccctggctgctgaggacccggtccagcacacctccttcaggaaccatatcctaggcaatgcagactatgtcttcactagtatctttacattagaaattatccttaagatgactgcttatggggctttcttgcacaagggttctttctgccggaactacttcaacatcctggacctgctggtggtcagcgtgtccctcatctcctttggcatccagtccagtgcaatcaatgtcgtgaagatcttgcgagtcctgcgagtactcaggcccctgagggccatcaacagggccaaggggctaaagcatgtggttcagtgtgtgtttgtcgccatccggaccatcgggaacatcgtgattgtcaccaccctgctgcagttcatgtttgcctgcatcggggtccagctcttcaagggaaagctgtacacctgttcagacagttccaagcagacagaggcggaatgcaagggcaactacatcacgtacaaagacggggaggttgaccaccccatcatccaaccccgcagctgggagaacagcaagtttgactttgacaatgttctggcagccatgatggccctcttcaccgtctccaccttcgaagggtggccagagctgctgtaccgctccatcgactcccacacggaagacaagggccccatctacaactaccgtgtggagatctccatcttcttcatcatctacatcatcatcatcgccttcttcatgatgaacatcttcgtgggcttcgtcatcgtcacctttcaggagcagggggagcaggagtacaagaactgtgagctggacaagaaccagcgacagtgcgtggaatacgccctcaaggcccggcccctgcggaggtacatccccaagaaccagcaccagtacaaagtgtggtacgtggtcaactccacctacttcgagtacctgatgttcgtcctcatcctgctcaacaccatctgcctggccatgcagcactacggccagagctgcctgttcaaaatcgccatgaacatcctcaacatgctcttcactggcctcttcaccgtggagatgatcctgaagctcattgccttcaaacccaagcactatttctgtgatgcatggaatacatttgacgccttgattgttgtgggtagcattgttgatatagcaatcaccgaggtaaacccagctgaacatacccaatgctctccctctatgaacgcagaggaaaactcccgcatctccatcaccttcttccgcctgttccgggtcatgcgtctggtgaagctgctgagccgtggggagggcatccggacgctgctgtggaccttcatcaagtccttccaggccctgccctatgtggccctcctgatcgtgatgctgttcttcatctacgcggtgatcgggatgcaggtgtttgggaaaattgccctgaatgataccacagagatcaaccggaacaacaactttcagaccttcccccaggccgtgctgctcctcttcaggtgtgccaccggggaggcctggcaggacatcatgctggcctgcatgccaggcaagaagtgtgccccagagtccgagcccagcaacagcacggagggtgaaacaccctgtggtagcagctttgctgtcttctacttcatcagcttctacatgctctgtgccttcctgatcatcaacctctttgtagctgtcatcatggacaactttgactacctgacaagggactggtccatccttggtccccaccacctggatgagtttaaaagaatctgggcagagtatgaccctgaagccaagggtcgtatcaaacacctggatgtggtgaccctcctccggcggattcagccgccactaggttttgggaagctgtgccctcaccgcgtggcttgcaaacgcctggtctccatgaacatgcctctgaacagcgacgggacagtcatgttcaatgccaccctgtttgccctggtcaggacggccctgaggatcaaaacagaagagggacccagcccatcagaggcccaccaaggggctgaggatcctttccgccctgcagggaacctagaacaagccaatgaggagctgcgggcgatcatcaagaagatctggaagcggaccagcatgaagctgctggaccaggtggtgccccctgcaggtgatgatgaggtcaccgttggcaagttctacgccacgttcctgatccaggagtacttccggaagttcaagaagcgcaaagagcagggccttgtgggcaagccctcccagaggaacgcgctgtctctgcaggctggcttgcgcacactgcatgacatcgggcctgagatccgacgggccatctctggagatctcaccgctgaggaggagctggacaaggccatgaaggaggctgtgtccgctgcttctgaagatgacatcttcaggagggccggtggcctgttcggcaaccacgtcagctactaccaaagcgacggccggagcgccttcccccagaccttcaccactcagcgcccgctgcacatcaacaaggcgggcagcagccagggcgacactgagtcgccatcccacgagaagctggtggactccaccttcaccccgagcagctactcgtccaccggctccaacgccaacatcaacaacgccaacaacaccgccctgggtcgcctccctcgccccgccggctaccccagcacggtcagcactgtggagggccacgggccccccttgtcccctgccatccgggtgcaggaggtggcgtggaagctcagctccaacaggtgccactcccgggagagccaggcagccatggcgggtcaggaggagacgtctcaggatgagacctatgaagtgaagatgaaccatgacacggaggcctgcagtgagcccagcctgctctccacagagatgctctcctaccaggatgacgaaaatcggcaactgacgctcccagaggaggacaagagggacatccggcaatctccgaagaggggtttcctccgctctgcctcactaggtcgaagggcctccttccacctggaatgtctgaagcgacagaaggaccgagggggagacatctctcagaagacagtcctgcccttgcatctggttcatcatcaggcattggcagtggcaggcctgagccccctcctccagagaagccattcccctgcctcattccctaggccttttgccaccccaccagccacacctggcagccgaggctggcccccacagcccgtccccaccctgcggcttgagggggtcgagtccagtgagaaactcaacagcagcttcccatccatccactgcggctcctgggctgagaccacccccggtggcgggggcagcagcgccgcccggagagtccggcccgtctccctcatggtgcccagccaggctggggccccagggaggcagttccacggcagtgccagcagcctggtggaagcggtcttgatttcagaaggactggggcagtttgctcaagatcccaagttcatcgaggtcaccacccaggagctggccgacgcctgcgacatgaccatagaggagatggagagcgcggccgacaacatcctcagcgggggcgccccacagagccccaatggcgccctcttaccctttgtgaactgcagggacgcggggcaggaccgagccgggggcgaagaggacgcgggctgtgtgcgcgcgcggggtcgaccgagtgaggaggagctccaggacagcagggtctacgtcagcagcctgtagtgggcgctgccagatgcgggcttttttttatttgtttcaatgttcctaatgggttcgtttcagaagtgcctcactgttctcgtgacctggagttaaccggaacagcgtcttcattcatttctgttgggaccagacgcggagcctgggtgcgcgagccgccctccgggaggaaggcgcccggctgcgtctgcagaggcggggagaggaggcggcgagggtcccggggcgcgaggaaggcgcctgccctctcccagctcgcaggccccgggcccggccgcgcctccgcggggagagcaccccggcttcccgcgcgccctcaccaaaaggaccctacagcaaacgggtgtctttcgactctgcttgtagaaaccatttgcacatattctgtacgagcctcgctgtctccctagagccagggccctgcggatttggagaagggagcggggcaggacttccaggaggaccccaacccggcccggagagggaggaggaggcctccaggggcgcggagctctggggatgggcgtcgggccggcagtggtgcggctcactccgtccctgcccacctgcgacgggatcccccgaccggcacgggccacgccgagctcccggccagccgccggcccgcaggcagcgcgagggaggagctgcgccgccggctccgcccaaccaggtggtgctgagcttccgctgagcgctcttttgttttgtggtttgacacttttcttgacagcatgttgcagtttcttttcggttttggttttttttaaatgttttattttgctttcccagcgggaggggaggaagaagagtgtttacaaagtcctgtagccccctcacctttctgttttcacttttgccaatgtacatcgggtttggttttcttgtattatttaaacggttgtggtttcctttttccacggaggttcaatagaagccgctgcaggagagttttaccaaccattgtgtatgcccaataatttgttatcatttccttaggtagtaacctatttttgttctggtttggttcggttatctaatggaaaggtaactggcaatgcacttgatgtggtcttgcacatgtgggtgatagagttgggttcctttttatgctgggtgtacaggtgggtttgggagagaggagcatgcgcgagagagtctccgagtgtgtgcgacgcgtgtgtgtgtggtgggttgtctgtgtgcatatgtcctgcccgtgtatatgcacccacaccatgtgcccgtgcacaccagtgactacgcagtcccccctttctggtttagctgtgggaagatctgaatctggggccgtttgaaagcaaaaacaaaccactgtctctgcttctgaaacgggaatcagtaactctttgcattttctgtcccacaagatatgcaaaaacaatgcaataatattcatttaaaaatacaattgtgagttgtgttggcattaaaactgtattttaaaaaaagacagaaatttaagggaaaaacacaagaaggcattttgcttcaatatattccgtgtaatgttttattgcattgataatgtttctgttgaagaaaccgttatacttgaattcaggtcagtttcagtatttttcaaatatttttttaaaactgaattgcaattgtgccaagcgaatataatgaattgaattaagttggttttcggattcacttcttgtatattttgctgcatgtaaagtaaatcattttgtatttggagtgtgacaagctttacctttgaactcaagtgcttttctatatgtggttgggggaaagggaacaagttttctttagtttgcacaatgagcaaaggtatcaccagtgtagtcattattctgctctccacaaacaggtttggacattactgttttgcatatcttgtgtttgcttacatttccctcaatttttccaaaatcgtttgctgggtatgtttgtaccgcctcttgctgtgagagaccaggacctattttattccagtcttcactctgtccactctgctctggtcatctgatttggtacttctccaagaacagcccttcactgtgaggtgcagggaggcgttctgatgagccctcagtcactgggccgtcatccgcatcccccatggaagaggtagctggctttcccttcccttccaccacacggaattttctctttggcttccttaggaaagtgtacactaaccgggaggataaaattaaagtcaggctgcttggagggaggggcatcctcacttccggattcttgttgctctacccaacaaggacagcaggggctcgagaaaggaactggtgaaaccctgatccatctgaaagtcaactctgcgtgctcctttctccatcccttcctcactctggagcagcctttccttcaggcttgccctaatgtttgggctgccggggagggggccaggacaagggaagaggcatccggagctcacagtgggggtgggaacagatttttgtgggggcatctctaatgctcacttatatctccctagaacatcactcttttggtgctgtgtccttcaaatgtatgtcaacagtggtggctgaaaagggactgctttggggaaaacaggacccaaccattcacccagaattgacccattaaatctcttccagtcctagtgttccctgagcccctcttggcacatatataagtaagctagaaattacaataagggacagtccattcctctatgacagcttgctggactgattcatgacaaagtggagaaatgtactcaatactccccggttaacacagtctagaaacagagtttctttatggatatccacacccaagtcatccaaactttcttgattccttttcactgccatcaaggtcctctagaaattgagtttaggtatcatcctttgaaaagttcccaagatttctaccaggaggtacacacaggcgttccctgtctagggcaggaggactatcctagcttgaccttctgatccactagaataagactggcgtatgatgcctgtcatcagaacagactggcacaagtagtgacatcaatgaaccacagcacaatcttccaagtgatgtctactctccacctaaaatggaattttccccatgaccttgtaaaacataattgtcacatcttccatacccctcctgacagcccccaagtgtcaggagaaaacagtcaggggctaagggcccaagggacttgaagaaacaacagtttaaggtctgcagtttggtcaacttaattcttgtcctccgaccagccctgcctctttcatttccagaccttggagaatttttcccagctttgattcagaaggtactagttataacccctttccttcttcttaatccaataggcctcactctcactgggaaatccactcaaaggaacaaggcaatgtctctcattctatttcccagttccaaattccaggtgcttgtctggagtgaagctacccgttactttctcccagcttttctccacccagcatgtctcctgcccatgcagctgaagacagtggggcaacctcaggagaagcagacctttccatgcccaagttcatctcctgagcaacagtgacacctagaaaatgaggactttggaagtcacccaaaagatggtggctactttatggagtcctgaagatacacagccaccactcctaaaggcaaagaaagaaaacacgaatgtaggtcagggatagagtggaaccctggtcatcggggtttttagcctcatcgtgggaaaggtggtaaaggaggatgatggcatctccatccctagaggccaagaattgaaatatcattgtcaaggattagaaacaattcagcaaagaggccacaaaaagggcctgctgactcccagaagacctctttaaaccccaggggaggcaaatacttgctgatggagtctgggccgtttccatattttaaagaagacctgcctctggggcaaatgtcagcacagagaggactgggaggagaatggaggcaagaaaagggcatattttgactccctctgtgcctcttcccagttcatggaaggatgtgttcagcttacccacccacagtgaccagtgtggtggagccgctgacatctcaaggatctatttgggaaggtgagaagagtactcattccatctgggggtgttgttccagccacatcagcctacctggtgggatgtgggggtgtctgccaccctgtcccccctctgctgatgtccctcccctcaggctgtccaggtgccacctgacacaggctgctgtgcaaagacaggcggggaagcccaaacctcactcccagggaggccctcagccgccagagtccaggttctccagaggctacgatttgaggaggttgagggggaagacaggagggaaagaaaagtcctacaactgtcaggaatggggcacctttccctgtccctaagcaaagctccctcttcccactgccctccccagccccagctccctgtcctccccaacacctagtgagaaagacggtgcgtggaagggagtcccatgggcagatgcttacacgacctctttgtgaagcctcttctgggtttaacttcattcatcaatttattcttatgtcaaagcaatgaaacttttctttctggagccagataccaatacaacaggtgaacgggtttctgccacatctctacattgacgggggatgcttgaacaacccccctcactacacagacacacaccgttaaggcacaagggctggggttgagctctagatgagggactttcctgctcctgcaagggtgagcactgtatacacagacaaggagggtgcagtagagtgactcccttggatggaagtagtaccatcagaacctactattattatgacataaattctatttacatacattgagagaatactacaatcaacactttttcctgggatgactttaagaggtttgagccacagcacctgaagtggcaaagatccatggtctttgtagggtattagagaactcttccagtcacctctgaaagcactctagatcttgcagctgagtggatgaagtgtaacaaatctgttgcacgctgagaggagtcagaattagcatttttcatgaaagttccccacgtctctactaagaatgaggaagaaaagactaagactaggtaattacacagaggcttgaaatgttacatcaccagagccaagtcctctcccttcagatcagttactggctgctacacagggacacccccaccttttcagggcatcccatgcactccacttctcaggatctaaggaatttgactttgtagggatcccagaaagggcactgtgccacttcccctggtgtgaatcagacatacattgtacattcatttctaaaattcactcatgcacctcaaaccaaggtcattatccaaaaaaaaaaaaaaaaagctctgggtggaagagtttgtaagttttaagagagggtcatttctatgtgaggaaatgcagaaatggacagaatgattcttattcactgtttgggtctggagaattcccattgtggaaatcttagagatctcaagtttattaccaagggaataaggaaaaaaaggtgagcaggcaccaggccaagcagtggctcccttgccaaggaacctgaggctgcaggtttcagggacccccttgaagaaacctctcctggccattggccaggagaaaagagaagtctctcctgtagagtcacaagagaagcaaaagagggtgggtcactgggtcctggacatagcccccaaccccaagacttcccaatatggagaaactacaccaatgtttaaaaggggaaaaggaaagaacttgtacatcaagggaagatgatttgtaaacacacagtcctgtgcagaaagatccccttcaggaggtgtctccagcatcccaaagctgtgcgcaccttctcttttcctgcctcaggccacctatgcatccagctgcagcccatacccacacctgaaatccatctcttgaatcccagccaggttatataccaccccattgccatgtcctgtcctggccagaatgcatgctgttcccccaagcctcgtgggagtgaggccatgggaaacagagatgagcatgtctggacaagtctgtgatggtagtggatgagaataacccatggcaaaacacgcacattcattaagaaatagggcgacagattccccgttggtgaagcactgaaaggtctattactctcataatattgctgttttattttaatccaccagagctaccatgcaaaactttcctcctgtgaaacgctccagataaagctcctctaatctccccttccctcatgtcctccagctcaaacccaccttcatcccccaaaccaatctgtatcatgcctgttatcagagaggcacagaaagatgggcagtgcctccgttgtcaccattccccacacccctacacacccccacaccctcccctccaggctccacgacttcacagtcttactgttgtaaatatcattgtacagtttgtaatcctcaaataatcccattgtcagaggcctcgcctgatgggccttctcaccctcgagaaaggccagggaatctagaaggggcaacccttcaaggagagcttcagggtcatctctgtgtgagacactattgtatattcctgtaagattgcatttttatctaaggaatgatgttatttaaaaaacaaacaaaaaacacaaaaaataagaattgcaaataaatttcttaacaatgtct

SEQ ID NO: 46935 - DNA, 6474 bp, Artificial Sequence
  derived and/or modified sequence
atggtgaatgagaacactcggatgtacattcctgaggagaaccaccagggttcaaattatggaagcccacgcccagcacacgctaatatgaacgctaatgctgcggctggcttagccccagaacatatacctacccccggggcagcgctgtcttggcaggctgctattgacgctgctaggcaagccaagctcatggggagcgcaggcaatgctacaattagcactgtgagcagtacacaacggaagagacagcagtacgggaagcccaaaaaacagggctctacaacagctaccagaccacctagggctctgctatgcctcacacttaagaaccctatccggcgtgcttgtatttccattgtggagtggaagcctttcgagataatcatactgcttactattttcgcgaactgtgtggccttggccatttatatcccctttccagaggatgatagcaatgccactaatagcaacctggaaagggtggagtatctatttctgatcatttttacggttgaggcgttcttgaaggtgattgcttacggcctgctgtttcatcctaatgcttacctgcgtaatggatggaatctcctggactttatcatcgtggttgtggggctgttctctgctatactggaacaagccacgaaagccgatggagcgaatgcactaggtggcaaaggcgcaggttttgacgtcaaagcactccgggccttccgtgttctgcggcccttgcggctggtctccggcgtgcccagcctgcaagtcgtactcaatagcattattaaagctatggtgcccctgctgcacatagctctgttggtgctgttcgtgattatcatttacgctattataggactggaactgtttatgggaaaaatgcataagacctgttataaccaggaagggatcgcagatgtccctgccgaggatgatcctagcccttgcgccctggaaactgggcacggccgccagtgccaaaatggaacggtgtgtaaacctggttgggacggcccgaagcacgggatcacaaactttgacaatttcgcctttgctatgctgacggtgtttcagtgcattacgatggaaggatggaccgacgttctttattgggtcaacgatgcagtcggccgtgactggccatggatttactttgtgaccctgatcatcatcggtagcttctttgtcttgaacctggtgctaggggtgctgtccggcgagttttccaaggagcgtgagaaggccaaagcacgtggggattttcagaaactacgagagaagcaacagctggaagaggatctgaagggctacctggactggattactcaagctgaagatatcgacccggaaaacgaagatgaagggatggatgaggagaagccaagaaatatgtctatgcccacttccgagactgaatcagttaatacggaaaacgtcgccggcggcgacatcgagggagagaactgtggcgcccgcctcgcacaccggatctctaagtcaaagttctccaggtattggagacgatggaaccggttctgcaggcgcaaatgcagggccgccgttaaatcgaatgtgttttactggctggtgatcttcttagtgtttctgaacactctgacgattgcaagcgaacactacaatcagcccaattggctcactgaggtgcaggacaccgccaataaagcactccttgccctgttcactgctgagatgctcctgaagatgtacagtctggggttacaagcctacttcgtatcattgtttaacagatttgactgcttcgtggtgtgtgggggtatactggaaactattctggtcgagaccaaaattatgagtcctttaggcatttcagtacttcgttgcgtccgcctgctgcgcattttcaagataactcggtactggaactccctgagcaatttagtcgcgagcctcttgaattccgttaggtctatcgccagtctgttgctgcttctgttcttattcataatcattttctccttgctgggaatgcagctgtttgggggcaagttcaatttcgacgaaatgcagaccaggagaagcacctttgacaatttcccccagagcctcctcaccgtgttccagatcctgaccggagaggactggaactcggtgatgtatgatggaattatggcctacggcggcccaagttttcccggtatgcttgtgtgtatctattttattatcctcttcatatgcggtaattacatcctactgaacgtgtttctggccattgccgttgacaacctggctgatgctgaatcactcacatctgctcaaaaagaggaggaagaagaaaaggaacgtaaaaagctggcgagaaccgcctcgcctgagaaaaaacaggaattagtggaaaagcccgcagtgggggagagcaaggaggaaaagattgagctgaagtcaataactgccgatggcgagtcccctcctgcgactaagatcaatatggacgatcttcagccgaacgagaatgaagataagagcccttatcccaaccctgagaccaccggagaagaagatgaggaagagcccgaaatgcccgtcggtccaaggccacgacctttgtccgaattgcacctgaaggaaaaggctgtgccaatgcccgaagctagtgcgtttttcatcttctcatccaataaccggttcaggctacagtgccacagaatcgtgaacgacactatctttactaatcttatcctctttttcattctgctatctagcatctccctggccgccgaagatcccgtacaacacacttctttccgcaatcacatcttagggaacgctgactacgtctttaccagcatcttcaccctggaaatcatactgaagatgacggcttatggcgcatttttgcacaaggggtccttctgccgcaactattttaacatcctggatctgcttgtcgtttcagtatccctcatctccttcgggatacagagctctgccattaacgtggtcaaaattctaagagtgctccgggttttaaggcctctgagggcgataaatagggcgaaaggcctgaaacatgtggtgcagtgtgtttttgttgccatcaggacaattggcaacattgtgatcgttactaccctccttcagtttatgttcgcttgcattggagtccagctgttcaaaggtaaactgtacacatgcagtgactctagcaaacagactgaggcagaatgcaaaggaaattatatcacttataaagatggggaagtagaccaccctattatccagcctaggtcatgggaaaatagcaagttcgactttgataatgtgttagctgcgatgatggccctcttcactgtttcaaccttcgaagggtggccagagctgctgtaccggtctattgacagtcacacagaagacaaagggccaatctataactacagggttgagataagcatcttttttatcatttacattatcataattgctttttttatgatgaatatctttgtaggcttcgtgattgtaacgtttcaagaacagggggaacaagagtacaaaaactgtgagctcgacaagaaccaaaggcagtgtgtggaatacgctttgaaggcacgtcctcttcgcagatacatccctaagaaccaacatcagtataaggtctggtatgttgttaactctacgtacttcgaatacctgatgttcgtattaattctccttaataccatatgcctcgccatgcagcactatggccagtcttgtctttttaaaatagccatgaatattctgaatatgttattcacagggttattcacggtggagatgatcttgaagctgattgctttcaagcccaaacactatttttgtgatgcctggaatacattcgacgctcttatagtggtggggtcaattgtcgatattgccatcacagaagttaaccctgccgagcacacacagtgctcgccaagcatgaacgctgaagagaacagccggatctccataaccttcttcaggctgttcagggttatgagactggtgaaactgttgagccggggtgaggggattcggacgctgctgtggacatttatcaaatcattccaagcgctcccttacgttgcactcctgattgtcatgctcttctttatctacgcagtgattgggatgcaggtctttggaaagatcgcccttaacgatactacagaaattaatagaaataacaatttccaaaccttccctcaggccgtgttgcttctctttaggtgtgccacgggagaagcctggcaggacattatgctcgcatgcatgcccggtaagaaatgcgcacccgagagcgagccctctaactccacagagggagagaccccttgtggtagctcctttgccgttttctactttattagtttctacatgctctgcgccttccttataataaatctcttcgtcgccgtaataatggacaatttcgactatctgacccgcgattggtctattctagggcctcaccacctcgatgagtttaagcgtatctgggcagaatatgatcctgaggcgaaaggtcgcattaagcaccttgacgtagtgaccttgctgaggagaatccagccgcctctcgggtttgggaaactctgtccgcaccgggttgcatgtaagcgactagtctcaatgaacatgcctttgaatagtgatggcaccgtgatgtttaacgcaaccctgttcgcgctagtgcgcactgcgctcaggattaagacagaggaagggccctctccttcagaagcacatcaaggcgcggaagatcccttcaggccagctggcaacttagaacaggcgaacgaagagttaagagccattatcaaaaagatttggaaacgaacctctatgaaactgctagatcaggtcgtgcccccggccggcgatgatgaagtgaccgttggtaaattttatgccacttttctgatccaggaatacttccgaaagtttaagaagcgcaaggagcagggcttggtcggcaaacctagccagagaaatgccctttctctgcaggctgggctgagaacactgcacgatattggtccagagatcaggcgtgcgatctccggcgatcttacggccgaggaggaattagataaagctatgaaagaagcggtgtcagccgcctctgaagatgacatattccgacgagccggtgggttgttcggaaaccatgtcagttactaccaaagcgatgggcgcagtgcgtttccccaaacctttaccacacaaaggcctctgcacatcaataaggctggttcatctcagggggacaccgagtcacccagtcacgagaaattggttgattccacgttcacgccatcttcctatagctcaactggatcgaacgcaaatatcaacaacgcaaacaacacagcccttggaaggctccctcgacctgccgggtatccctccaccgtgtccacagtcgagggccatggccctccactgagccccgctattagagtacaagaagtggcgtggaagttaagctcaaacagatgccatagtcgggagtctcaagccgccatggccggacaggaggaaacctcccaagatgaaacctacgaagtcaaaatgaatcatgacaccgaagcttgttctgagccatcactgttgagtacggagatgttgtcatatcaggatgacgagaaccggcagctaaccctccctgaagaggataagcgggacattcgccaaagtcctaagagggggtttcttaggtctgctagtctgggcagacgcgccagcttccacttagagtgccttaagcggcagaaagacaggggaggcgatatctcacagaagacggtgttgcccctccacttggtgcatcatcaggcccttgctgtggcaggactgagccccttactacagagaagtcattccccggcctctttcccaagaccctttgctaccccacctgctacacccgggagtagaggctggccccctcagcccgtgcccactttgcgcctcgaaggggtagaaagtagcgaaaagctgaattccagctttccatccatacactgtggaagttgggccgagacaactccagggggtggcggcagttccgcagctcgccgcgtgaggccggtgtcattgatggttccctctcaggccggggccccaggccgccagttccacggatctgctagcagcttagtggaagccgtcttgatcagcgaggggcttggccagtttgcacaagaccccaagtttatcgaagttactacacaggagctggcagatgcttgcgacatgacgatcgaggagatggagagtgctgccgacaatatcctaagcggtggcgccccacagagccctaacggcgccctactgccatttgtgaattgcagggacgcaggccaggatagagccggaggagaggaagacgctggttgtgttagggccagggggcggccaagcgaggaggaactgcaggacagtagggtgtacgtttccagcctatag

SEQ ID NO: 46936 - DNA, 6474 bp, Artificial Sequence
  derived and/or modified sequence
atggtgaatgaaaacaccaggatgtacatccctgaggagaaccaccagggcagcaactacggcagccccaggcctgcccacgccaacatgaatgccaatgctgctgctggcctggcccctgagcacatccccacccctggggccgccctgtcctggcaggccgccattgatgctgcccggcaggccaagctgatgggcagcgctggaaatgccaccatcagcacagtgagcagcacccagaggaagaggcagcagtatggcaagcccaagaagcagggcagcaccacagccacccggcccccccgggccctgctgtgcctgaccctgaagaaccccatccggcgggcctgcatcagcatcgtggagtggaagccctttgagatcatcatcctgctgaccatctttgccaactgtgtggccctggccatctacatccccttcccagaagatgacagcaatgccaccaacagcaacctggagcgggtggagtacctgttcctgatcatcttcaccgtggaggccttcctgaaggtgattgcctacggcctgctcttccaccccaatgcctacctgagaaatggctggaacctgctggacttcatcatcgtggtggtgggcctcttcagcgccatcctggagcaggccaccaaggcagatggagccaatgccctgggcggcaaaggagctggctttgatgtgaaggccctgcgggccttccgggtgctgcggcccctgcggctggtgtctggagtgcccagcctgcaggtggtgctgaacagcatcatcaaggccatggtgcccctgctgcacatcgccctgctggtgctgtttgtgatcatcatctatgccatcatcggcctggagctgttcatgggcaagatgcacaagacctgctacaaccaggagggcattgctgatgtgcctgcagaagatgaccccagcccctgtgccctggagaccggccacggccggcagtgccagaatggcaccgtgtgcaagccaggctgggatggccccaagcacggcatcaccaactttgacaactttgcctttgccatgctgactgtgttccagtgcatcaccatggagggctggacagatgtgctgtactgggtgaatgatgctgtgggccgggactggccctggatctactttgtgaccctcatcatcatcggcagcttctttgtgctgaacctggtgctgggcgtgctgtctggagagttcagcaaggagcgggagaaggccaaggcccggggggacttccagaagctgcgggagaagcagcagctggaggaggacctgaagggctacctggactggatcacccaggctgaagatattgatcctgaaaatgaagatgagggcatggatgaggagaagcccaggaacatgtccatgcccaccagcgagacagaatctgtgaacacagaaaatgtggccggcggggacatcgagggggagaactgtggggcccggctggcccaccgcatcagcaagagcaagttcagccgctactggaggcgctggaaccgcttctgcaggaggaagtgcagagctgctgtgaagagcaatgtgttctactggctggtgatcttcctggtgttcctgaacaccctgaccatcgccagcgagcactacaaccagcccaactggctgacagaggtgcaggacacagccaacaaggccctgctggccctcttcaccgctgagatgctgctgaagatgtacagcctgggcctgcaggcctactttgtgtccctcttcaacagatttgactgctttgtggtgtgtggcggcatcctggagaccatcctggtggagaccaagatcatgagccccctgggcatctctgtgctgcgctgtgtgcggctgctgcgcatcttcaagatcacccgctactggaacagcctgagcaacctggtggccagcctgctgaacagcgtgcgcagcatcgccagcctgctgctgctgctcttcctgttcatcatcatcttcagcctgctgggcatgcagctgtttggaggcaagttcaactttgatgagatgcagaccaggaggagcacctttgacaacttcccccagagcctgctgaccgtcttccagatcctgaccggggaggactggaacagcgtgatgtatgatggcatcatggcctatggaggccccagcttccctggcatgctggtgtgcatctacttcatcatcctcttcatctgtggcaactacatcctgctgaatgtgttcctggccatcgctgtggacaacctggctgatgctgagagcctgaccagcgcccagaaggaggaggaggaggagaaggagaggaagaagctggccaggacagccagccctgagaagaagcaggagctggtggagaagccagctgtgggggagagcaaggaggagaagattgagctgaagagcatcacagcagatggagagagccccccagccaccaagatcaacatggatgacctgcagcccaatgaaaatgaagacaagagcccctaccccaaccctgagaccactggagaggaggatgaggaggagcctgagatgcctgtgggcccccggccccggcccctgtctgagctgcacctgaaggagaaggctgtgcccatgcctgaggccagcgccttcttcatcttcagcagcaacaaccgcttccggctgcagtgccaccgcatcgtgaatgacaccatcttcaccaacctgatcctcttcttcatcctgctgagcagcatcagcctggccgctgaggaccctgtgcagcacaccagcttcaggaaccacatcctgggcaatgctgactatgtgttcaccagcatcttcaccctggagatcatcctgaagatgacagcctatggagccttcctgcacaagggcagcttctgcaggaactacttcaacatcctggacctgctggtggtgtctgtgtccctcatcagctttggcatccagagcagcgccatcaacgtggtgaagatcctgcgggtgctgcgggtgctgcggcccctgcgggccatcaacagagccaagggcctgaagcacgtggtgcagtgtgtgtttgtggccatccgcaccatcggcaacatcgtcatcgtgaccaccctgctgcagttcatgtttgcctgcatcggcgtgcagctgttcaagggcaagctgtacacctgcagcgacagcagcaagcagacagaagctgagtgcaagggcaactacatcacctacaaggatggagaggtggaccaccccatcatccagcccaggtcctgggagaacagcaagtttgattttgacaacgtgctggccgccatgatggccctcttcaccgtgtccacctttgagggctggccagagctgctgtaccgcagcattgacagccacacagaggacaagggccccatctacaactacagagtggagatcagcatcttcttcatcatctacatcatcatcatcgccttcttcatgatgaacatctttgtgggcttcgtcatcgtgaccttccaggagcagggcgagcaggagtacaagaactgtgagctggacaagaaccagaggcagtgtgtggagtatgccctgaaggcccggcccctgcggcgctacatccccaagaaccagcaccagtacaaggtgtggtacgtggtgaacagcacctactttgagtacctgatgtttgtgctgatcctgctgaacaccatctgcctggccatgcagcactacggccagagctgcctcttcaagatcgccatgaacatcctgaacatgctgttcaccggcctcttcaccgtggagatgatcctgaagctgattgccttcaagcccaagcactacttctgtgatgcctggaacacctttgatgccctgattgtggtgggcagcatcgtggacatcgccatcacagaggtgaacccagctgagcacacccagtgcagccccagcatgaatgctgaggagaacagccgcatcagcatcaccttcttccgcctcttccgggtgatgaggctggtgaagctgctgagcagaggagagggcatccgcaccctgctgtggaccttcatcaagagcttccaggccctgccctacgtggccctgctgattgtgatgctgttcttcatctatgctgtgattggcatgcaggtgtttgggaagatcgccctgaatgacaccacagagatcaacagaaacaacaacttccagaccttcccccaggccgtgctgctgctcttccgctgtgccaccggggaggcctggcaggacatcatgctggcctgcatgcctgggaagaagtgtgcccctgagagcgagcccagcaacagcacagaaggagagaccccctgtggcagcagctttgctgtgttctacttcatctccttctacatgctgtgtgccttcctgatcatcaacctgtttgtggccgtcatcatggacaactttgactacctgacccgggactggagcatcctgggcccccaccacctggatgagttcaagaggatctgggccgagtatgaccctgaggccaagggccgcatcaagcacctggatgtggtgaccctgctgcggcgcatccagccccccctgggctttgggaagctgtgcccccaccgggtggcctgcaagaggctggtgtccatgaacatgcccctgaacagtgatggcaccgtgatgtttaatgccaccctgtttgccctggtgaggacagccctgcgcatcaagacagaggagggccccagccccagcgaggcccaccagggcgctgaggaccccttccggcctgctggcaacctggagcaggccaatgaggagctgcgggccatcatcaagaagatctggaagaggacctccatgaagctgctggaccaggtggtgcccccagctggagatgatgaggtgacagtgggcaagttctacgccaccttcctgatccaggagtacttcaggaagttcaagaagaggaaggagcagggcctggtgggcaagcccagccagagaaatgccctgagcctgcaggccggcctgcggaccctgcatgacatcggccctgagatcagaagagccatcagcggggacctgacagctgaggaggagctggacaaggccatgaaggaggccgtgtctgctgcctctgaagatgacatcttccggcgggccggcggcctgtttggaaatcatgtgtcctactaccagagtgatggccgcagcgccttcccccagaccttcaccacccagaggcccctgcacatcaacaaggccggcagcagccagggcgacacagagagccccagccatgagaagctggtggacagcaccttcacccccagcagctacagcagcacaggcagcaatgccaacatcaacaatgccaacaacacagccctgggccgcctgcccaggcctgctggctaccccagcacagtgtccacagtggagggccacggcccccccctgagccctgccatccgggtgcaggaggtggcctggaagctgagcagcaaccgctgccacagccgggagagccaggccgccatggccggccaggaggagaccagccaggatgagacctatgaggtgaagatgaaccacgacacagaggcctgcagcgagcccagcctgctgagcacagagatgctgagctaccaggatgatgagaaccggcagctgaccctgcctgaggaggacaagagggacatccggcagagccccaagaggggcttcctgcggagcgccagcctgggccggcgggccagcttccacctggagtgcctgaagaggcagaaggaccggggcggggacatcagccagaagacagtgctgcccctgcacctggtgcaccaccaggccctggccgtggccggcctgagccccctgctgcagaggagccacagccctgccagcttcccccggccctttgccaccccaccagccaccccaggcagccggggctggccaccccagcctgtgcccaccctgcggctggagggcgtggagagcagcgagaagctgaacagcagcttccccagcatccactgcggctcctgggccgagaccaccccaggcggcggcggcagcagcgctgcccggcgggtgcggcctgtgtccctgatggtgcccagccaggccggggcccctggccggcagttccacggcagcgccagcagcctggtggaggccgtgctgatcagcgagggcctgggccagtttgcccaggaccccaagttcatcgaggtgaccacccaggagctggctgatgcctgtgacatgaccatcgaggagatggagagcgctgctgacaacatcctgagcggcggggccccccagagccccaacggggccctgctgccctttgtgaactgcagagatgctggccaggacagagctggaggagaagaagatgctggctgtgtgcgggcccggggccggcccagcgaggaggagctgcaggacagccgggtgtatgtgagcagcctgtag

SEQ ID NO: 46937 - DNA, 6474 bp, Artificial Sequence
  derived and/or modified sequence
atggtgaacgagaacacccggatgtacatccccgaggagaaccaccagggctcaaattacgggagtcctcggccagcgcacgccaatatgaatgccaacgcagccgcagggctagcccctgaacacatcccaacgccaggcgctgctttgtcttggcaggcggccattgatgccgctcgccaggcgaaacttatgggtagcgctggaaatgccacaatctctaccgtcagttcaacacaacgtaagagacagcaatacggcaagcctaagaagcaggggtcaaccaccgcaactaggcctcccagggccctgctttgtctgaccctgaaaaatcccattcgtcgtgcatgcatctcaattgtcgagtggaagccctttgaaataatcatcttgctgactatcttcgctaattgtgtagcccttgccatttatataccctttcccgaagatgattctaatgcgactaactccaatctggagcgcgtggaatacttgttcctcatcatatttacagtggaggcttttctaaaggtgatcgcctatggactgctatttcaccctaacgcctatctgcgtaatggctggaatctgttggactttatcatcgtggtggtgggcctgttttccgccatcctcgagcaggccacgaaagctgatggggctaatgctctgggaggaaaaggcgcgggttttgacgttaaagcgctgcgagctttcagggtcctgaggccgctgcggctagtgagtggagtcccttccctgcaggtagtactcaacagtatcattaaagccatggttccactgcttcacatagcacttcttgtcttgtttgtaatcataatttacgccatcatcggtcttgagctgttcatggggaagatgcataagacatgttataaccaagagggcatcgcagacgttcctgctgaggacgatccatccccctgcgcactggaaacaggtcatggacggcagtgccagaacggaaccgtttgcaagcccggttgggacggcccaaagcacgggattaccaactttgacaatttcgcttttgcaatgctgactgtgttccagtgcatcaccatggagggctggaccgatgtgctatactgggtgaacgatgccgtggggcgggattggccttggatctactttgtgaccctgattatcatcggaagctttttcgtactcaacttagtgctcggcgttctgagcggcgaattttcaaaggagcgagagaaggctaaagctagaggcgattttcagaagctgcgggagaaacagcagttggaggaggatctgaaaggatatctggattggatcacacaggctgaggacatcgaccctgaaaatgaagacgagggcatggatgaggagaagccaaggaatatgagcatgccaacgagcgagaccgagtccgttaacacagaaaacgtcgcaggcggcgatatagagggcgaaaactgcggagcgagactggctcaccggatttctaagagtaaattctctcgatattggaggcgctggaaccgattctgtcggagaaaatgtagagctgccgtaaagtccaatgtattttactggctcgtaatcttcctggtatttctaaatacccttacaatcgcaagtgaacattataatcaaccaaactggttgactgaggtccaagataccgccaacaaagccctgctggcgttattcacggccgaaatgctgctcaaaatgtacagcttgggtctccaggcctacttcgttagtttattcaatagattcgattgcttcgtggtgtgcggtggaatcttagagacaatcctggttgagaccaagatcatgtctccactggggatctccgtgttgagatgtgtgcggttgctccggatttttaagataactaggtactggaatagtctgagtaacttggtggcctcattgttaaatagtgtgcgcagcatcgcctcacttctgctgctactgtttctattcatcatcatcttcagcctgctgggcatgcagctgttcggcggtaaatttaacttcgacgagatgcaaaccaggagaagtaccttcgacaatttcccccagagcctgctgacagtctttcagatcctgactggagaggactggaattcagttatgtacgatggtataatggcatacgggggcccctctttcccaggcatgttggtgtgcatctatttcatcatcttatttatatgtggcaattacatcctgctcaatgtgtttctagctattgccgtagacaacctggctgacgcagaaagtcttacttcggctcagaaagaagaggaggaagagaaggaaagaaagaagctggcccggaccgccagccctgagaaaaaacaggagttggtggagaagccggccgtgggagaatctaaggaggagaaaatagaattgaaaagcatcacggctgatggtgagtcaccaccagctacaaagattaacatggatgacctgcaacccaacgagaacgaagataagagcccgtatcctaacccagagaccaccggagaggaggacgaagaagagcctgaaatgccggtgggacctcggccccgtcccctgagcgaacttcacttgaaggagaaagccgttcctatgcctgaggcatctgcattcttcatattcagctccaacaacagatttcgactgcagtgccatagaattgtcaacgacacaatcttcactaatctgatcctattttttatcctgctttcctcaatctctctggcagcagaagaccccgtgcaacacactagctttaggaaccatattctgggtaatgctgactacgtgttcacgagcattttcactctagaaataatccttaaaatgacagcatacggtgcatttctccacaaagggtctttctgtaggaattacttcaacatcctggatctactcgtagtgtcagtgagtctgatatccttcggcattcagtcatccgcgatcaacgttgtgaaaattctgagggtgttacgagtgttgcgtccactgcgcgccataaacagggccaaaggactaaagcacgtcgtgcagtgcgtctttgtggccatcaggaccattgggaacatagtcatagtgacaactctgctgcagttcatgtttgcctgcataggcgtgcagctctttaagggaaaactctacacgtgtagcgactcaagtaaacaaaccgaggcggagtgtaaggggaactatattacctataaggacggcgaggtggaccatcccatcatccagccaaggagctgggaaaactctaagttcgactttgacaacgtgttagcagctatgatggccttgtttactgtttccacattcgaggggtggccggagctgctgtatcgaagtatcgatagtcacactgaggacaaagggcctatttacaattaccgcgtggagattagtattttcttcattatttacattatcattattgctttcttcatgatgaacatctttgtcggctttgtcattgtgaccttccaggaacagggtgagcaagaatataagaactgcgagctggacaaaaatcagagacagtgcgtggaatatgccctgaaggcgcggccactcaggcgctatatccctaagaatcaacaccagtataaagtctggtatgtggtgaactccacttattttgagtatctgatgttcgtgttgatcctgttgaacacaatctgtctagccatgcagcactacggccagagttgcctcttcaagattgcaatgaatatcctcaacatgctgttcacgggactcttcaccgtcgagatgatcctgaagctgatagccttcaagcccaaacactacttctgcgacgcctggaatacattcgacgcgctcatcgtcgtggggtccattgtcgatatcgcaatcaccgaagtaaacccagcagagcacacccagtgtagcccctccatgaatgcagaggaaaacagcaggatctctattaccttttttagactctttcgggtgatgcgccttgttaagctcctgtccagaggcgaaggcatccggacactcctctggacctttattaaatcctttcaggccttgccatacgtggccctgctgatcgtgatgctgttttttatctacgccgtgatcggcatgcaagtgtttggaaagatcgctctgaacgatacaactgagattaacagaaataacaattttcagacgttcccacaagctgttctcctgctgtttcgatgcgctacaggggaggcatggcaggacattatgttggcgtgtatgcccggaaagaagtgcgctcccgagagcgaaccaagcaactctactgagggagagaccccctgtggtagtagttttgctgtgttctacttcatctctttttatatgctgtgtgcctttttgattatcaacttgttcgttgcagtgatcatggacaacttcgattatttgactcgcgactggagcatcttgggaccacaccatctagacgagttcaagcggatctgggcagagtatgacccagaggcgaagggccggatcaagcacctggatgtggtgactctgctgcgtcgcattcagcctcccctgggatttgggaaactatgtccccacagagtagcctgtaaaagattggtgtctatgaatatgcccctgaatagcgatggaaccgtgatgtttaacgctaccctatttgcactggttcggacggctctcaggattaagacggaagaaggcccttcaccctccgaagcccatcagggagccgaagacccatttaggccggccggaaacctggagcaggcgaacgaagaactgcgtgcaataatcaaaaagatctggaaaaggacctctatgaagctgttagatcaggtcgtaccccctgccggggatgacgaagtgaccgtgggcaagttttatgccactttcctcattcaagagtatttcaggaagtttaaaaagcggaaagaacaggggttggtgggaaagccttcccagcggaatgcattgagcctccaagcaggactccgcactctacacgatatcggaccagagattcggcgcgccatatcaggcgacttgacagcagaggaggagcttgataaggccatgaaggaggctgtgtccgctgcatctgaggacgacatatttcggagggcagggggactgttcggtaaccacgtcagctattatcagtcagacgggcggtctgctttcccgcagacttttaccactcagcggccactgcatattaataaagcaggatcgagtcagggtgacaccgagtcaccgtctcatgaaaagctagtagacagcacctttaccccatcctcatatagctcaaccggcagcaatgccaacatcaataacgcaaacaataccgccctgggccgcttgccccgtcccgccggatatccatctactgtttccacagtcgaaggccacggcccccccctgagcccggccattcgggtgcaggaagttgcatggaagctgtcctctaatcggtgccactcccgggaaagccaggcggctatggcgggccaggaagagacatctcaagacgagacatatgaagtcaaaatgaaccatgatacagaagcgtgctctgagccgtcccttctctccacggagatgctgtcttaccaggacgacgaaaatcgccaactgacgcttcccgaagaggacaaacgggacattagacagagccccaaacggggcttcctaagaagtgccagtctgggtaggcgcgcaagctttcatttggaatgtttgaaacgccaaaaagaccgagggggggatatctcacaaaagactgttctgcctctgcacttggttcaccatcaggcactagccgtcgccggtcttagcccgctgctgcagcgtagtcatagccccgccagtttccctcggccttttgccacacctcccgccaccccaggctcaaggggatggccccctcagccagtgcccactctcaggctcgagggggtggaaagcagtgagaagcttaactcatcatttcctagtattcactgcggatcttgggcggagaccaccccaggggggggcggaagctctgcagctaggcgagtccggcccgtgtctctgatggtgcccagtcaggccggggcacccgggcggcagttccatggtagtgctagctctctcgtggaagcagtgctgatctccgagggtctggggcagtttgcacaggatcccaagttcatagaggttactacacaggagctcgccgacgcgtgcgatatgaccattgaggagatggagtcggcggctgataacatcctgtctgggggcgccccccagtcccccaacggcgcgctgctccctttcgtaaattgccgggacgccgggcaggaccgggctggaggcgaggaagacgctggatgtgtaagagctagaggccgtcccagcgaagaagagctccaagatagccgggtctatgtgagctctctctag

SEQ ID NO: 46938 - DNA, 6474 bp, Artificial Sequence
  derived and/or modified sequence
atggtcaacgagaacaccagaatgtacatccccgaggaaaatcatcaggggtccaattatgggtccccacgtccagcgcatgctaacatgaatgctaatgccgcagcaggcttggctccagaacacattcccaccccaggcgcagcactctcttggcaggcagccatcgatgcagcacgtcaggctaaactaatgggttccgctggaaatgctaccatatctacagtaagctccacccagcggaaacgccagcagtacgggaagcccaaaaagcagggttctaccacagccactagaccccctcgagcgctgctgtgtctgactctgaagaatccgatcagacgggcttgtatctcaatcgtggaatggaaacctttcgagatcatcattcttctcacaatttttgctaattgtgtcgccctcgcgatctacatcccctttcctgaggatgacagcaacgcaacgaattcaaacttagaacgagtggaatatcttttcttgatcatcttcacagttgaggctttcctaaaggtgattgcatacgggctgctgttccaccccaacgcatacctccgaaacggctggaatctactcgacttcattatcgtcgtcgtcggcttgttctctgctattctagagcaggctaccaaggccgatggggctaatgccctgggcggaaaaggagcaggcttcgacgtgaaggcactgagagcgttcagagtcctgaggccacttcggcttgtctcaggagtgccctctctccaggtggtgttgaactccattattaaagccatggtgcccttacttcacatcgccctgttagtgctgtttgtaattattatttacgccataatcgggcttgagctgtttatggggaaaatgcataagacctgctacaaccaggaaggaattgctgacgtgcccgctgaagacgatccgtccccctgcgcattagagaccggtcacggcagacagtgtcagaacggtacggtgtgtaagccaggttgggacgggccaaaacacggcattaccaactttgacaactttgctttcgcaatgttgacagtgttccagtgcataacgatggagggatggaccgacgtgctgtattgggtcaatgatgccgtcggcagagattggccatggatttatttcgttactttgataataattggtagcttctttgtcttaaacctggtcttgggagtattgagtggggaatttagcaaagaaagggaaaaagcaaaggcgagaggggattttcaaaagttgagagaaaagcagcagctggaggaagacctgaagggctatttggattggattacccaggccgaggacatcgatcccgagaacgaggatgagggcatggacgaagagaaacctcgaaacatgtccatgccgacaagcgagaccgaaagtgtcaacactgaaaacgtggcaggcggagatatcgaaggcgagaattgtggcgctagactggcacatcgcatctctaagagtaagttctcccggtattggcgacgctggaatagattttgtaggcgtaaatgccgggctgccgttaagagcaacgtcttctactggctggtgatttttcttgtgttcctcaacacacttacgatcgcttcagagcactacaatcagcccaactggttaaccgaggtacaggacactgctaacaaagctttgctcgcgctattcacagccgaaatgctattaaagatgtacagcctgggcctccaagcctacttcgtgagtctgtttaatcggttcgactgttttgtggtttgcgggggtatattggaaaccatactggtggaaacaaagataatgtcccccctgggaatttctgttttacgctgtgtgcgcctgctcaggattttcaagattaccagatattggaattcactaagcaacctggttgcatccctcctgaactcagtccgaagtattgcaagcctactactccttctgttcctgtttatcatcatctttagtctgctaggcatgcaactgtttggcggaaaattcaattttgacgaaatgcagactcgacggagcacattcgacaactttccccagagtttattgaccgtgtttcagatcctaactggagaagactggaattctgtgatgtacgatgggataatggcatacgggggaccgagctttcctggaatgttggtgtgtatatactttatcatcctgttcatctgcggcaactacatcctcctgaacgtttttcttgcaatcgccgtagacaatcttgccgatgcggaaagccttacctccgctcagaaggaagaggaagaagagaaagaaaggaagaagctggccaggactgccagccccgagaagaaacaagaattagtggaaaagcccgcagtgggtgaatcaaaggaagaaaagattgaattgaagtctataacagccgatggagagagtccccctgccacaaagataaatatggatgacctccagccaaatgagaacgaggacaaaagcccataccccaaccccgagaccactggcgaggaagacgaggaggagcccgagatgcccgtggggccacgcccacgccctctgtctgagctccacctcaaggagaaggccgttcctatgcccgaagcttcagccttttttatattttcaagcaataataggttcagactccaatgccacagaattgtgaatgacacaattttcacaaatctgatcttgttctttatcctgttatctagtatttcattggccgctgaagacccagtacaacatacatctttccgcaatcatatcctgggcaatgctgactacgtgttcacttcgatatttacgctggaaataatcctcaaaatgacagcttatggcgcttttctccacaagggatccttctgcaggaattactttaacatacttgacctccttgtagtctctgtgtccctgatctcattcggcattcagagtagcgccattaacgttgtgaagatattgcgcgtgctgagagtgctgcggcctctcagggcaatcaacagggcaaagggccttaaacacgtggtccagtgcgtgtttgtcgctatccgaactattggaaacatcgtgattgttaccacccttttgcagttcatgttcgcgtgtatcggcgtccagctgttcaagggcaaattgtatacatgtagcgacagcagtaagcagaccgaggcagaatgcaaggggaactacatcacatacaaggacggcgaggttgatcatccgatcattcaaccacggtcctgggagaattcaaaattcgacttcgataacgtgctggctgcaatgatggcactgtttacagtttccacatttgaagggtggcccgaactgctctacaggagtattgactctcatacggaagacaaaggaccgatatataattatcgagtcgaaattagcatatttttcattatatacatcatcattatcgcattcttcatgatgaacattttcgtggggttcgttatagtgacattccaagagcaaggcgagcaagagtacaaaaactgcgagctggacaaaaaccagaggcagtgcgtggagtacgcattaaaggccagacctttgaggcggtatatacctaagaaccagcaccagtacaaggtgtggtatgttgtgaacagcacttatttcgagtatctcatgtttgtcctgatacttctgaacactatttgtctcgcgatgcagcactacggccaaagctgtttgtttaagatcgcaatgaatatcttgaacatgctcttcaccggcctgtttaccgtggaaatgatcctgaaactgatcgccttcaaaccaaaacactatttttgcgatgcctggaataccttcgacgcgttaattgtggtgggttccatagtggacatcgccattaccgaagtgaaccctgcagagcatacccagtgctctcccagcatgaatgcagaggaaaactcaagaatcagcattacctttttcagactgtttagagtgatgcggctggtgaagctactcagccggggagaaggcattagaaccctactctggactttcattaaatctttccaagccttaccatacgtcgccctcctcattgtgatgctattttttatatatgccgttattggcatgcaagtgttcggtaagatagccctgaatgatactactgagatcaatcggaataacaactttcagactttcccgcaggccgtcctgctgctcttccgatgtgccaccggggaggcatggcaggacataatgcttgcctgcatgcccggtaagaagtgcgcaccggaatctgagccgagcaattctacagaaggtgagaccccttgcggctcaagctttgctgttttttacttcatcagcttctatatgttgtgcgcattcctcatcataaacctgttcgtggccgtcataatggataatttcgactatctcacacgtgactggtccatcttgggtccacatcatttagacgagttcaagagaatttgggcggagtatgatcccgaagccaaaggcagaattaaacacctggacgttgtgacactgctgagacgaattcagcctcccctgggcttcgggaagctctgcccccatagagttgcttgcaaaagattagtgtccatgaatatgcccctgaacagcgacggaaccgtgatgtttaatgccaccctgttcgccctggtccggaccgcattaaggatcaagacagaggaagggccatcccctagtgaagcacaccagggcgctgaggacccgttccgccctgccggaaatctggagcaggctaatgaggaactccgagccatcattaagaagatttggaaacgcacgtccatgaagctgctggatcaggtagtgccccctgccggagacgacgaagtcacggtggggaagttctacgccacgttcttgatccaagaatacttcagaaagtttaagaaacgaaaggagcagggtctggtcggcaagcccagtcagcgaaatgccctttcactgcaagctggtttgcgcaccctccacgatataggacccgaaatcaggagggccatctccggcgatctcacggctgaagaggagctggacaaggctatgaaggaggccgtgtccgccgcatctgaggacgatatatttcgcagagctggcggactgtttggaaatcatgtctcatactatcaatctgacggacgcagcgcattcccccagacgttcactacgcagcggccactacacattaataaagcgggatcgtcacagggagatacagaatcgccttcgcatgagaagctcgttgattcgaccttcactcccagctcctatagcagtacagggtccaacgcaaacattaataacgccaacaataccgcacttggcaggctgccgcgaccggctggctacccctccaccgtctctactgtcgaggggcatggcccaccactgagccctgcaattcgcgtacaagaagtagcctggaagctcagcagtaatcggtgccactccagggaatcacaggccgctatggcagggcaggaggaaacctcccaggatgagacttatgaggttaagatgaaccacgacaccgaagcttgttccgagccatcgctcttgagcaccgaaatgctgtcctatcaggacgacgaaaacagacagcttaccctgccagaggaagataagcgcgacatccgacagtcgcctaaacgaggctttctgcgctccgctagcctggggcgacgagcttcattccacctggagtgcctcaaaagacagaaggatcgagggggagatatctcccagaaaacagttctgcccctgcacctggtgcaccatcaggcattagccgtcgcaggtttaagccccctgttacagagatctcactcacctgccagcttcccgcgaccatttgctaccccaccggctacccctgggtctcgcggatggccccctcaaccggttccaactcttaggttggaaggggtcgaaagctccgaaaaactgaattcatcattcccctctattcactgcgggagttgggccgagacaaccccagggggtggtggatccagcgctgccagacgcgtgcgacctgtgtcactcatggttccctcgcaagctggcgcaccgggacggcagtttcacggatcagcaagctcacttgttgaggccgtactgatctcagaggggcttggtcagtttgcccaagatccaaagttcatcgaagtgaccacccaagaactggctgatgcatgcgatatgaccatagaggaaatggagtccgccgcagacaatattctttcaggcggagcaccccagtcccccaacggcgctctgctgcccttcgttaattgccgggatgctggacaggatcgcgctgggggagaggaagatgcaggttgtgtgcgtgccagaggcaggcccagtgaagaagagctgcaggatagccgagtctacgtcagctcactttat

SEQ ID NO: 46939 - DNA, 6568 bp, Artificial Sequence
  derived and/or modified sequence
atggtcaatgagaatacgaggatgtacattccagaggaaaaccaccaaggttccaactatgggagcccacgccccgcccatgccaacatgaatgccaatgcggcagcggggctggcccctgagcacatccccaccccgggggctgccctgtcgtggcaggcggccatcgacgcagcccggcaggctaagctgatgggcagcgctggcaatgcgaccatctccacagtcagctccacgcagcggaagcggcagcaatatgggaaacccaagaagcagggcagcaccacggccacacgcccgccccgagccctgctctgcctgaccctgaagaaccccatccggagggcctgcatcagcattgtcgaatggaaaccatttgaaataattattttactgactatttttgccaattgtgtggccttagcgatctatattccctttccagaagatgattccaacgccaccaattccaacctggaacgagtggaatatctctttctcataatttttacggtggaagcgtttttaaaagtaatcgcctatggactcctctttcaccccaatgcctacctccgcaacggctggaacctactagattttataattgtggttgtggggctttttagtgcaattttagaacaagcaaccaaagcagatggggcaaacgctctcggagggaaaggggccggatttgatgtgaaggcgctgagggccttccgcgtgctgcgccccctgcggctggtgtccggagtcccaagtctccaggtggtcctgaattccatcatcaaggccatggtccccctgctgcacatcgccctgcttgtgctgtttgtcatcatcatctacgccatcatcggcttggagctcttcatggggaagatgcacaagacctgctacaaccaggagggcatagcagatgttccagcagaagatgacccttccccttgtgcgctggaaacgggccacgggcggcagtgccagaacggcacggtgtgcaagcccggctgggatggtcccaagcacggcatcaccaactttgacaactttgccttcgccatgctcacggtgttccagtgcatcaccatggagggctggacggacgtgctgtactgggtcaatgatgccgtaggaagggactggccctggatctattttgttacactaatcatcatagggtcattttttgtacttaacttggttctcggtgtgcttagcggagagttttccaaagagagggagaaggccaaggcccggggagatttccagaagctgcgggagaagcagcagctagaagaggatctcaaaggctacctggattggatcactcaggccgaagacatcgatcctgagaatgaggacgaaggcatggatgaggagaagccccgaaacatgagcatgcccaccagtgagaccgagtccgtcaacaccgaaaacgtggctggaggtgacatcgagggagaaaactgcggggccaggctggcccaccggatctccaagtcaaagttcagccgctactggcgccggtggaatcggttctgcagaaggaagtgccgcgccgcagtcaagtctaatgtcttctactggctggtgattttcctggtgttcctcaacacgctcaccattgcctctgagcactacaaccagcccaactggctcacagaagtccaagacacggcaaacaaggccctgctggccctgttcacggcagagatgctcctgaagatgtacagcctgggcctgcaggcctacttcgtgtccctcttcaaccgctttgactgcttcgtcgtgtgtggcggcatcctggagaccatcctggtggagaccaagatcatgtccccactgggcatctccgtgctcagatgcgtccggctgctgaggattttcaagatcacgaggtactggaactccttgagcaacctggtggcatccttgctgaactctgtgcgctccatcgcctccctgctccttctcctcttcctcttcatcatcatcttctccctcctggggatgcagctctttggaggaaagttcaactttgatgagatgcagacccggaggagcacattcgataacttcccccagtccctcctcactgtgtttcagatcctgaccggggaggactggaattcggtgatgtatgatgggatcatggcttatggcggcccctcttttccagggatgttagtctgtatttacttcatcatcctcttcatctgtggaaactatatcctactgaatgtgttcttggccattgctgtggacaacctggctgatgctgagagcctcacatctgcccaaaaggaggaggaagaggagaaggagagaaagaagctggccaggactgccagcccagagaagaaacaagagttggtggagaagccggcagtgggggaatccaaggaggagaagattgagctgaaatccatcacggctgacggagagtctccacccgccaccaagatcaacatggatgacctccagcccaatgaaaatgaggataagagcccctaccccaacccagaaactacaggagaagaggatgaggaggagccagagatgcctgtcggccctcgcccacgaccactctctgagcttcaccttaaggaaaaggcagtgcccatgccagaagccagcgcgtttttcatcttcagctctaacaacaggtttcgcctccagtgccaccgcattgtcaatgacacgatcttcaccaacctgatcctcttcttcattctgctcagcagcatttccctggctgctgaggacccggtccagcacacctccttcaggaaccatatcctaggcaatgcagactatgtcttcactagtatctttacattagaaattatccttaagatgactgcttatggggctttcttgcacaagggttctttctgccggaactacttcaacatcctggacctgctggtggtcagcgtgtccctcatctcctttggcatccagtccagtgcaatcaatgtcgtgaagatcttgcgagtcctgcgagtactcaggcccctgagggccatcaacagggccaaggggctaaagcatgtggttcagtgtgtgtttgtcgccatccggaccatcgggaacatcgtgattgtcaccaccctgctgcagttcatgtttgcctgcatcggggtccagctcttcaagggaaagctgtacacctgttcagacagttccaagcagacagaggcggaatgcaagggcaactacatcacgtacaaagacggggaggttgaccaccccatcatccaaccccgcagctgggagaacagcaagtttgactttgacaatgttctggcagccatgatggccctcttcaccgtctccaccttcgaagggtggccagagctgctgtaccgctccatcgactcccacacggaagacaagggccccatctacaactaccgtgtggagatctccatcttcttcatcatctacatcatcatcatcgccttcttcatgatgaacatcttcgtgggcttcgtcatcgtcacctttcaggagcagggggagcaggagtacaagaactgtgagctggacaagaaccagcgacagtgcgtggaatacgccctcaaggcccggcccctgcggaggtacatccccaagaaccagcaccagtacaaagtgtggtacgtggtcaactccacctacttcgagtacctgatgttcgtcctcatcctgctcaacaccatctgcctggccatgcagcactacggccagagctgcctgttcaaaatcgccatgaacatcctcaacatgctcttcactggcctcttcaccgtggagatgatcctgaagctcattgccttcaaacccaagcactatttctgtgatgcatggaatacatttgacgccttgattgttgtgggtagcattgttgatatagcaatcaccgaggtaaacccagctgaacatacccaatgctctccctctatgaacgcagaggaaaactcccgcatctccatcaccttcttccgcctgttccgggtcatgcgtctggtgaagctgctgagccgtggggagggcatccggacgctgctgtggaccttcatcaagtccttccaggccctgccctatgtggccctcctgatcgtgatgctgttcttcatctacgcggtgatcgggatgcaggtgtttgggaaaattgccctgaatgataccacagagatcaaccggaacaacaactttcagaccttcccccaggccgtgctgctcctcttcaggtgtgccaccggggaggcctggcaggacatcatgctggcctgcatgccaggcaagaagtgtgccccagagtccgagcccagcaacagcacggagggtgaaacaccctgtggtagcagctttgctgtcttctacttcatcagcttctacatgctctgtgccttcctgatcatcaacctctttgtagctgtcatcatggacaactttgactacctgacaagggactggtccatccttggtccccaccacctggatgagtttaaaagaatctgggcagagtatgaccctgaagccaagggtcgtatcaaacacctggatgtggtgaccctcctccggcggattcagccgccactaggttttgggaagctgtgccctcaccgcgtggcttgcaaacgcctggtctccatgaacatgcctctgaacagcgacgggacagtcatgttcaatgccaccctgtttgccctggtcaggacggccctgaggatcaaaacagaagagggacccagcccatcagaggcccaccaaggggctgaggatcctttccgccctgcagggaacctagaacaagccaatgaggagctgcgggcgatcatcaagaagatctggaagcggaccagcatgaagctgctggaccaggtggtgccccctgcaggtgatgatgaggtcaccgttggcaagttctacgccacgttcctgatccaggagtacttccggaagttcaagaagcgcaaagagcagggccttgtgggcaagccctcccagaggaacgcgctgtctctgcaggctggcttgcgcacactgcatgacatcgggcctgagatccgacgggccatctctggagatctcaccgctgaggaggagctggacaaggccatgaaggaggctgtgtccgctgcttctgaagatgacatcttcaggagggccggtggcctgttcggcaaccacgtcagctactaccaaagcgacggccggagcgccttcccccagaccttcaccactcagcgcccgctgcacatcaacaaggcgggcagcagccagggcgacactgagtcgccatcccacgagaagctggtggactccaccttcaccccgagcagctactcgtccaccggctccaacgccaacatcaacaacgccaacaacaccgccctgggtcgcctccctcgccccgccggctaccccagcacggtcagcactgtggagggccacgggccccccttgtcccctgccatccgggtgcaggaggtggcgtggaagctcagctccaacaggtgccactcccgggagagccaggcagccatggcgggtcaggaggagacgtctcaggatgagacctatgaagtgaagatgaaccatgacacggaggcctgcagtgagcccagcctgctctccacagagatgctctcctaccaggatgacgaaaatcggcaactgacgctcccagaggaggacaagagggacatccggcaatctccgaagaggggtttcctccgctctgcctcactaggtcgaagggcctccttccacctggaatgtctgaagcgacagaaggaccgagggggagacatctctcagaagacagtcctgcccttgcatctggttcatcatcaggcattggcagtggcaggcctgagccccctcctccagagaagccattcccctgcctcattccctaggccttttgccaccccaccagccacacctggcagccgaggctggcccccacagcccgtccccaccctgcggcttgagggggtcgagtccagtgagaaactcaacagcagcttcccatccatccactgcggctcctgggctgagaccacccccggtggcgggggcagcagcgccgcccggagagtccggcccgtctccctcatggtgcccagccaggctggggccccagggaggcagttccacggcagtgccagcagcctggtggaagcggtcttgatttcagaaggactggggcagtttgctcaagatcccaagttcatcgaggtcaccacccaggagctggccgacgcctgcgacatgaccatagaggagatggagagcgcggccgacaacatcctcagcgggggcgccccacagagccccaatggcgccctcttaccctttgtgaactgcagggacgcggggcaggaccgagccgggggcgaagaggacgcgggctgtgtgcgcgcgcggggtcgaccgagtgaggaggagctccaggacagcagggtctacgtcagcagcctgtagtgggcgctgccagatgcgggcttttttttatttgtttcaatgttcctaatgggttcgtttcagaagtgcctcactgttctcgtgacctggagtt

SEQ ID NO: 46940 - DNA, 6474 bp, Artificial Sequence
  derived and/or modified sequence
atggtgaacgagaacaccagaatgtacatccccgaggagaaccaccagggcagcaactacggcagccccagacccgcccacgccaacatgaacgccaacgccgccgccggcctggcccccgagcacatccccacccccggcgccgccctgagctggcaggccgccatcgacgccgccagacaggccaagctgatgggcagcgccggcaacgccaccatcagcaccgtgagcagcacccagagaaagagacagcagtacggcaagcccaagaagcagggcagcaccaccgccaccagaccccccagagccctgctgtgcctgaccctgaagaaccccatcagaagagcctgcatcagcatcgtggagtggaagcccttcgagatcatcatcctgctgaccatcttcgccaactgcgtggccctggccatctacatccccttccccgaggacgacagcaacgccaccaacagcaacctggagagagtggagtacctgttcctgatcatcttcaccgtggaggccttcctgaaggtgatcgcctacggcctgctgttccaccccaacgcctacctgagaaacggctggaacctgctggacttcatcatcgtggtggtgggcctgttcagcgccatcctggagcaggccaccaaggccgacggcgccaacgccctgggcggcaagggcgccggcttcgacgtgaaggccctgagagccttcagagtgctgagacccctgagactggtgagcggcgtgcccagcctgcaggtggtgctgaacagcatcatcaaggccatggtgcccctgctgcacatcgccctgctggtgctgttcgtgatcatcatctacgccatcatcggcctggagctgttcatgggcaagatgcacaagacctgctacaaccaggagggcatcgccgacgtgcccgccgaggacgaccccagcccctgcgccctggagaccggccacggcagacagtgccagaacggcaccgtgtgcaagcccggctgggacggccccaagcacggcatcaccaacttcgacaacttcgccttcgccatgctgaccgtgttccagtgcatcaccatggagggctggaccgacgtgctgtactgggtgaacgacgccgtgggcagagactggccctggatctacttcgtgaccctgatcatcatcggcagcttcttcgtgctgaacctggtgctgggcgtgctgagcggcgagttcagcaaggagagagagaaggccaaggccagaggcgacttccagaagctgagagagaagcagcagctggaggaggacctgaagggctacctggactggatcacccaggccgaggacatcgaccccgagaacgaggacgagggcatggacgaggagaagcccagaaacatgagcatgcccaccagcgagaccgagagcgtgaacaccgagaacgtggccggcggcgacatcgagggcgagaactgcggcgccagactggcccacagaatcagcaagagcaagttcagcagatactggagaagatggaacagattctgcagaagaaagtgcagagccgccgtgaagagcaacgtgttctactggctggtgatcttcctggtgttcctgaacaccctgaccatcgccagcgagcactacaaccagcccaactggctgaccgaggtgcaggacaccgccaacaaggccctgctggccctgttcaccgccgagatgctgctgaagatgtacagcctgggcctgcaggcctacttcgtgagcctgttcaacagattcgactgcttcgtggtgtgcggcggcatcctggagaccatcctggtggagaccaagatcatgagccccctgggcatcagcgtgctgagatgcgtgagactgctgagaatcttcaagatcaccagatactggaacagcctgagcaacctggtggccagcctgctgaacagcgtgagaagcatcgccagcctgctgctgctgctgttcctgttcatcatcatcttcagcctgctgggcatgcagctgttcggcggcaagttcaacttcgacgagatgcagaccagaagaagcaccttcgacaacttcccccagagcctgctgaccgtgttccagatcctgaccggcgaggactggaacagcgtgatgtacgacggcatcatggcctacggcggccccagcttccccggcatgctggtgtgcatctacttcatcatcctgttcatctgcggcaactacatcctgctgaacgtgttcctggccatcgccgtggacaacctggccgacgccgagagcctgaccagcgcccagaaggaggaggaggaggagaaggagagaaagaagctggccagaaccgccagccccgagaagaagcaggagctggtggagaagcccgccgtgggcgagagcaaggaggagaagatcgagctgaagagcatcaccgccgacggcgagagcccccccgccaccaagatcaacatggacgacctgcagcccaacgagaacgaggacaagagcccctaccccaaccccgagaccaccggcgaggaggacgaggaggagcccgagatgcccgtgggccccagacccagacccctgagcgagctgcacctgaaggagaaggccgtgcccatgcccgaggccagcgccttcttcatcttcagcagcaacaacagattcagactgcagtgccacagaatcgtgaacgacaccatcttcaccaacctgatcctgttcttcatcctgctgagcagcatcagcctggccgccgaggaccccgtgcagcacaccagcttcagaaaccacatcctgggcaacgccgactacgtgttcaccagcatcttcaccctggagatcatcctgaagatgaccgcctacggcgccttcctgcacaagggcagcttctgcagaaactacttcaacatcctggacctgctggtggtgagcgtgagcctgatcagcttcggcatccagagcagcgccatcaacgtggtgaagatcctgagagtgctgagagtgctgagacccctgagagccatcaacagagccaagggcctgaagcacgtggtgcagtgcgtgttcgtggccatcagaaccatcggcaacatcgtgatcgtgaccaccctgctgcagttcatgttcgcctgcatcggcgtgcagctgttcaagggcaagctgtacacctgcagcgacagcagcaagcagaccgaggccgagtgcaagggcaactacatcacctacaaggacggcgaggtggaccaccccatcatccagcccagaagctgggagaacagcaagttcgacttcgacaacgtgctggccgccatgatggccctgttcaccgtgagcaccttcgagggctggcccgagctgctgtacagaagcatcgacagccacaccgaggacaagggccccatctacaactacagagtggagatcagcatcttcttcatcatctacatcatcatcatcgccttcttcatgatgaacatcttcgtgggcttcgtgatcgtgaccttccaggagcagggcgagcaggagtacaagaactgcgagctggacaagaaccagagacagtgcgtggagtacgccctgaaggccagacccctgagaagatacatccccaagaaccagcaccagtacaaggtgtggtacgtggtgaacagcacctacttcgagtacctgatgttcgtgctgatcctgctgaacaccatctgcctggccatgcagcactacggccagagctgcctgttcaagatcgccatgaacatcctgaacatgctgttcaccggcctgttcaccgtggagatgatcctgaagctgatcgccttcaagcccaagcactacttctgcgacgcctggaacaccttcgacgccctgatcgtggtgggcagcatcgtggacatcgccatcaccgaggtgaaccccgccgagcacacccagtgcagccccagcatgaacgccgaggagaacagcagaatcagcatcaccttcttcagactgttcagagtgatgagactggtgaagctgctgagcagaggcgagggcatcagaaccctgctgtggaccttcatcaagagcttccaggccctgccctacgtggccctgctgatcgtgatgctgttcttcatctacgccgtgatcggcatgcaggtgttcggcaagatcgccctgaacgacaccaccgagatcaacagaaacaacaacttccagaccttcccccaggccgtgctgctgctgttcagatgcgccaccggcgaggcctggcaggacatcatgctggcctgcatgcccggcaagaagtgcgcccccgagagcgagcccagcaacagcaccgagggcgagaccccctgcggcagcagcttcgccgtgttctacttcatcagcttctacatgctgtgcgccttcctgatcatcaacctgttcgtggccgtgatcatggacaacttcgactacctgaccagagactggagcatcctgggcccccaccacctggacgagttcaagagaatctgggccgagtacgaccccgaggccaagggcagaatcaagcacctggacgtggtgaccctgctgagaagaatccagccccccctgggcttcggcaagctgtgcccccacagagtggcctgcaagagactggtgagcatgaacatgcccctgaacagcgacggcaccgtgatgttcaacgccaccctgttcgccctggtgagaaccgccctgagaatcaagaccgaggagggccccagccccagcgaggcccaccagggcgccgaggaccccttcagacccgccggcaacctggagcaggccaacgaggagctgagagccatcatcaagaagatctggaagagaaccagcatgaagctgctggaccaggtggtgccccccgccggcgacgacgaggtgaccgtgggcaagttctacgccaccttcctgatccaggagtacttcagaaagttcaagaagagaaaggagcagggcctggtgggcaagcccagccagagaaacgccctgagcctgcaggccggcctgagaaccctgcacgacatcggccccgagatcagaagagccatcagcggcgacctgaccgccgaggaggagctggacaaggccatgaaggaggccgtgagcgccgccagcgaggacgacatcttcagaagagccggcggcctgttcggcaaccacgtgagctactaccagagcgacggcagaagcgccttcccccagaccttcaccacccagagacccctgcacatcaacaaggccggcagcagccagggcgacaccgagagccccagccacgagaagctggtggacagcaccttcacccccagcagctacagcagcaccggcagcaacgccaacatcaacaacgccaacaacaccgccctgggcagactgcccagacccgccggctaccccagcaccgtgagcaccgtggagggccacggcccccccctgagccccgccatcagagtgcaggaggtggcctggaagctgagcagcaacagatgccacagcagagagagccaggccgccatggccggccaggaggagaccagccaggacgagacctacgaggtgaagatgaaccacgacaccgaggcctgcagcgagcccagcctgctgagcaccgagatgctgagctaccaggacgacgagaacagacagctgaccctgcccgaggaggacaagagagacatcagacagagccccaagagaggcttcctgagaagcgccagcctgggcagaagagccagcttccacctggagtgcctgaagagacagaaggacagaggcggcgacatcagccagaagaccgtgctgcccctgcacctggtgcaccaccaggccctggccgtggccggcctgagccccctgctgcagagaagccacagccccgccagcttccccagacccttcgccaccccccccgccacccccggcagcagaggctggcccccccagcccgtgcccaccctgagactggagggcgtggagagcagcgagaagctgaacagcagcttccccagcatccactgcggcagctgggccgagaccacccccggcggcggcggcagcagcgccgccagaagagtgagacccgtgagcctgatggtgcccagccaggccggcgcccccggcagacagttccacggcagcgccagcagcctggtggaggccgtgctgatcagcgagggcctgggccagttcgcccaggaccccaagttcatcgaggtgaccacccaggagctggccgacgcctgcgacatgaccatcgaggagatggagagcgccgccgacaacatcctgagcggcggcgccccccagagccccaacggcgccctgctgcccttcgtgaactgcagagacgccggccaggacagagccggcggcgaggaggacgccggctgcgtgagagccagaggcagacccagcgaggaggagctgcaggacagcagagtgtacgtgagcagcctgtag

SEQ ID NO: 46941 - protein, 2155 aa, Artificial Sequence
  derived and/or modified sequence
MVNENTRMYIPEENHQGSNYGSPRPAHANMNANAAAGLAPEHIPTPGAALSWQAAIDAARQAKLMGSAGNATISTVSSTQRKRQQYGKPKKQGSTTATRPPRALLCLTLKNPIRRACISIVEWKPFEIIILLTIFANCVALAIYIPFPEDDSNATNSNLERVEYLFLIIFTVEAFLKVIAYGLLFHPNAYLRNGWNLLDFIIVVVGLFSAILEQATKADGANALGGKGAGFDVKALRAFRVLRPLRLVSGVPSLQVVLNSIIKAMVPLLHIALLVLFVIIIYAIIGLELFMGKMHKTCYNQEGIADVPAEDDPSPCALETGHGRQCQNGTVCKPGWDGPKHGITNFDNFAFAMLTVFQCITMEGWTDVLYWVNDAVGRDWPWIYFVTLIIIGSFFVLNLVLGVLSGEFSKEREKAKARGDFQKLREKQQLEEDLKGYLDWITQAEDIDPENEDEGMDEEKPRNMSMPTSETESVNTENVAGGDIEGENCGARLAHRISKSKFSRYWRRWNRFCRRKCRAAVKSNVFYWLVIFLVFLNTLTIASEHYNQPNWLTEVQDTANKALLALFTAEMLLKMYSLGLQAYFVSLFNRFDCFVVCGGILETILVETKIMSPLGISVLRCVRLLRIFKITRYWNSLSNLVASLLNSVRSIASLLLLLFLFIIIFSLLGMQLFGGKFNFDEMQTRRSTFDNFPQSLLTVFQILTGEDWNSVMYDGIMAYGGPSFPGMLVCIYFIILFICGNYILLNVFLAIAVDNLADAESLTSAQKEEEEEKERKKLARTASPEKKQELVEKPAVGESKEEKIELKSITADGESPPATKINMDDLQPNENEDKSPYPNPETTGEEDEEEPEMPVGPRPRPLSELHLKEKAVPMPEASAFFIFSSNNRFRLQCHRIVNDTIFTNLILFFILLSSISLAAEDPVQHTSFRNHILGNADYVFTSIFTLEIILKMTAYGAFLHKGSFCRNYFNILDLLVVSVSLISFGIQSSAINVVKILRVLRVLRPLRAINRAKGLKHVVQCVFVAIRTIGNIVIVTTLLQFMFACIGVQLFKGKLYTCSDSSKQTEAECKGNYITYKDGEVDHPIIQPRSWENSKFDFDNVLAAMMALFTVSTFEGWPELLYRSIDSHTEDKGPIYNYRVEISIFFIIYIIIIAFFMMNIFVGFVIVTFQEQGEQEYKNCELDKNQRQCVEYALKARPLRRYIPKNQHQYKVWYVVNSTYFEYLMFVLILLNTICLAMQHYGQSCLFKIAMNILNMLFTGLFTVEMILKLIAFKPKGYFSDPWNVFDFLIVIGSIIDVILSETNHYFCDAWNTFDALIVVGSIVDIAITEVNNAEENSRISITFFRLFRVMRLVKLLSRGEGIRTLLWTFIKSFQALPYVALLIVMLFFIYAVIGMQVFGKIALNDTTEINRNNNFQTFPQAVLLLFRCATGEAWQDIMLACMPGKKCAPESEPSNSTEGETPCGSSFAVFYFISFYMLCAFLIINLFVAVIMDNFDYLTRDWSILGPHHLDEFKRIWAEYDPEAKGRIKHLDVVTLLRRIQPPLGFGKLCPHRVACKRLVSMNMPLNSDGTVMFNATLFALVRTALRIKTEGNLEQANEELRAIIKKIWKRTSMKLLDQVVPPAGDDEVTVGKFYATFLIQEYFRKFKKRKEQGLVGKPSQRNALSLQAGLRTLHDIGPEIRRAISGDLTAEEELDKAMKEAVSAASEDDIFRRAGGLFGNHVSYYQSDGRSAFPQTFTTQRPLHINKAGSSQGDTESPSHEKLVDSTFTPSSYSSTGSNANINNANNTALGRLPRPAGYPSTVSTVEGHGPPLSPAIRVQEVAWKLSSNRCHSRESQAAMAGQEETSQDETYEVKMNHDTEACSEPSLLSTEMLSYQDDENRQLTLPEEDKRDIRQSPKRGFLRSASLGRRASFHLECLKRQKDRGGDISQKTVLPLHLVHHQALAVAGLSPLLQRSHSPASFPRPFATPPATPGSRGWPPQPVPTLRLEGVESSEKLNSSFPSIHCGSWAETTPGGGGSSAARRVRPVSLMVPSQAGAPGRQFHGSASSLVEAVLISEGLGQFAQDPKFIEVTTQELADACDMTIEEMESAADNILSGGAPQSPNGALLPFVNCRDAGQDRAGGEEDAGCVRARGRPSEEELQDSRVYVSSL

SEQ ID NO: 46942 - DNA, 13531 bp, Artificial Sequence
  derived and/or modified sequence
ttattttttcaaatggtgtagccgccggaggtgcggtgctcagttcttggaaggggcccggatgtactgaggatgcgttacagtttcactcgaggaggcagtagtggaaaggagcagtttttggggtttgatgccataatgggaatcaggtaatcgtcggcggggaagaagaaacgctgcagaccacggcttcctcgaatcttgcgcgaaagccgccggcctcggaggagggattaatccagacccgccggggggtgttttcacatttcttcctcttcgtggctgctcctcctattaaaaccatttttggtccatggtcaatgagaatacgaggatgtacattccagaggaaaaccaccaaggttccaactatgggagcccacgccccgcccatgccaacatgaatgccaatgcggcagcggggctggcccctgagcacatccccaccccgggggctgccctgtcgtggcaggcggccatcgacgcagcccggcaggctaagctgatgggcagcgctggcaatgcgaccatctccacagtcagctccacgcagcggaagcggcagcaatatgggaaacccaagaagcagggcagcaccacggccacacgcccgccccgagccctgctctgcctgaccctgaagaaccccatccggagggcctgcatcagcattgtcgaatggaaaccatttgaaataattattttactgactatttttgccaattgtgtggccttagcgatctatattccctttccagaagatgattccaacgccaccaattccaacctggaacgagtggaatatctctttctcataatttttacggtggaagcgtttttaaaagtaatcgcctatggactcctctttcaccccaatgcctacctccgcaacggctggaacctactagattttataattgtggttgtggggctttttagtgcaattttagaacaagcaaccaaagcagatggggcaaacgctctcggagggaaaggggccggatttgatgtgaaggcgctgagggccttccgcgtgctgcgccccctgcggctggtgtccggagtcccaagtctccaggtggtcctgaattccatcatcaaggccatggtccccctgctgcacatcgccctgcttgtgctgtttgtcatcatcatctacgccatcatcggcttggagctcttcatggggaagatgcacaagacctgctacaaccaggagggcatagcagatgttccagcagaagatgacccttccccttgtgcgctggaaacgggccacgggcggcagtgccagaacggcacggtgtgcaagcccggctgggatggtcccaagcacggcatcaccaactttgacaactttgccttcgccatgctcacggtgttccagtgcatcaccatggagggctggacggacgtgctgtactgggtcaatgatgccgtaggaagggactggccctggatctattttgttacactaatcatcatagggtcattttttgtacttaacttggttctcggtgtgcttagcggagagttttccaaagagagggagaaggccaaggcccggggagatttccagaagctgcgggagaagcagcagctagaagaggatctcaaaggctacctggattggatcactcaggccgaagacatcgatcctgagaatgaggacgaaggcatggatgaggagaagccccgaaacatgagcatgcccaccagtgagaccgagtccgtcaacaccgaaaacgtggctggaggtgacatcgagggagaaaactgcggggccaggctggcccaccggatctccaagtcaaagttcagccgctactggcgccggtggaatcggttctgcagaaggaagtgccgcgccgcagtcaagtctaatgtcttctactggctggtgattttcctggtgttcctcaacacgctcaccattgcctctgagcactacaaccagcccaactggctcacagaagtccaagacacggcaaacaaggccctgctggccctgttcacggcagagatgctcctgaagatgtacagcctgggcctgcaggcctacttcgtgtccctcttcaaccgctttgactgcttcgtcgtgtgtggcggcatcctggagaccatcctggtggagaccaagatcatgtccccactgggcatctccgtgctcagatgcgtccggctgctgaggattttcaagatcacgaggtactggaactccttgagcaacctggtggcatccttgctgaactctgtgcgctccatcgcctccctgctccttctcctcttcctcttcatcatcatcttctccctcctggggatgcagctctttggaggaaagttcaactttgatgagatgcagacccggaggagcacattcgataacttcccccagtccctcctcactgtgtttcagatcctgaccggggaggactggaattcggtgatgtatgatgggatcatggcttatggcggcccctcttttccagggatgttagtctgtatttacttcatcatcctcttcatctgtggaaactatatcctactgaatgtgttcttggccattgctgtggacaacctggctgatgctgagagcctcacatctgcccaaaaggaggaggaagaggagaaggagagaaagaagctggccaggactgccagcccagagaagaaacaagagttggtggagaagccggcagtgggggaatccaaggaggagaagattgagctgaaatccatcacggctgacggagagtctccacccgccaccaagatcaacatggatgacctccagcccaatgaaaatgaggataagagcccctaccccaacccagaaactacaggagaagaggatgaggaggagccagagatgcctgtcggccctcgcccacgaccactctctgagcttcaccttaaggaaaaggcagtgcccatgccagaagccagcgcgtttttcatcttcagctctaacaacaggtttcgcctccagtgccaccgcattgtcaatgacacgatcttcaccaacctgatcctcttcttcattctgctcagcagcatttccctggctgctgaggacccggtccagcacacctccttcaggaaccatatcctaggcaatgcagactatgtcttcactagtatctttacattagaaattatccttaagatgactgcttatggggctttcttgcacaagggttctttctgccggaactacttcaacatcctggacctgctggtggtcagcgtgtccctcatctcctttggcatccagtccagtgcaatcaatgtcgtgaagatcttgcgagtcctgcgagtactcaggcccctgagggccatcaacagggccaaggggctaaagcatgtggttcagtgtgtgtttgtcgccatccggaccatcgggaacatcgtgattgtcaccaccctgctgcagttcatgtttgcctgcatcggggtccagctcttcaagggaaagctgtacacctgttcagacagttccaagcagacagaggcggaatgcaagggcaactacatcacgtacaaagacggggaggttgaccaccccatcatccaaccccgcagctgggagaacagcaagtttgactttgacaatgttctggcagccatgatggccctcttcaccgtctccaccttcgaagggtggccagagctgctgtaccgctccatcgactcccacacggaagacaagggccccatctacaactaccgtgtggagatctccatcttcttcatcatctacatcatcatcatcgccttcttcatgatgaacatcttcgtgggcttcgtcatcgtcacctttcaggagcagggggagcaggagtacaagaactgtgagctggacaagaaccagcgacagtgcgtggaatacgccctcaaggcccggcccctgcggaggtacatccccaagaaccagcaccagtacaaagtgtggtacgtggtcaactccacctacttcgagtacctgatgttcgtcctcatcctgctcaacaccatctgcctggccatgcagcactacggccagagctgcctgttcaaaatcgccatgaacatcctcaacatgctcttcactggcctcttcaccgtggagatgatcctgaagctcattgccttcaaacccaagggttactttagtgatccctggaatgtttttgacttcctcatcgtaattggcagcataattgacgtcattctcagtgagactaatcactatttctgtgatgcatggaatacatttgacgccttgattgttgtgggtagcattgttgatatagcaatcaccgaggtaaacaacgcagaggaaaactcccgcatctccatcaccttcttccgcctgttccgggtcatgcgtctggtgaagctgctgagccgtggggagggcatccggacgctgctgtggaccttcatcaagtccttccaggccctgccctatgtggccctcctgatcgtgatgctgttcttcatctacgcggtgatcgggatgcaggtgtttgggaaaattgccctgaatgataccacagagatcaaccggaacaacaactttcagaccttcccccaggccgtgctgctcctcttcaggtgtgccaccggggaggcctggcaggacatcatgctggcctgcatgccaggcaagaagtgtgccccagagtccgagcccagcaacagcacggagggtgaaacaccctgtggtagcagctttgctgtcttctacttcatcagcttctacatgctctgtgccttcctgatcatcaacctctttgtagctgtcatcatggacaactttgactacctgacaagggactggtccatccttggtccccaccacctggatgagtttaaaagaatctgggcagagtatgaccctgaagccaagggtcgtatcaaacacctggatgtggtgaccctcctccggcggattcagccgccactaggttttgggaagctgtgccctcaccgcgtggcttgcaaacgcctggtctccatgaacatgcctctgaacagcgacgggacagtcatgttcaatgccaccctgtttgccctggtcaggacggccctgaggatcaaaacagaagggaacctagaacaagccaatgaggagctgcgggcgatcatcaagaagatctggaagcggaccagcatgaagctgctggaccaggtggtgccccctgcaggtgatgatgaggtcaccgttggcaagttctacgccacgttcctgatccaggagtacttccggaagttcaagaagcgcaaagagcagggccttgtgggcaagccctcccagaggaacgcgctgtctctgcaggctggcttgcgcacactgcatgacatcgggcctgagatccgacgggccatctctggagatctcaccgctgaggaggagctggacaaggccatgaaggaggctgtgtccgctgcttctgaagatgacatcttcaggagggccggtggcctgttcggcaaccacgtcagctactaccaaagcgacggccggagcgccttcccccagaccttcaccactcagcgcccgctgcacatcaacaaggcgggcagcagccagggcgacactgagtcgccatcccacgagaagctggtggactccaccttcaccccgagcagctactcgtccaccggctccaacgccaacatcaacaacgccaacaacaccgccctgggtcgcctccctcgccccgccggctaccccagcacggtcagcactgtggagggccacgggccccccttgtcccctgccatccgggtgcaggaggtggcgtggaagctcagctccaacaggtgccactcccgggagagccaggcagccatggcgggtcaggaggagacgtctcaggatgagacctatgaagtgaagatgaaccatgacacggaggcctgcagtgagcccagcctgctctccacagagatgctctcctaccaggatgacgaaaatcggcaactgacgctcccagaggaggacaagagggacatccggcaatctccgaagaggggtttcctccgctctgcctcactaggtcgaagggcctccttccacctggaatgtctgaagcgacagaaggaccgagggggagacatctctcagaagacagtcctgcccttgcatctggttcatcatcaggcattggcagtggcaggcctgagccccctcctccagagaagccattcccctgcctcattccctaggccttttgccaccccaccagccacacctggcagccgaggctggcccccacagcccgtccccaccctgcggcttgagggggtcgagtccagtgagaaactcaacagcagcttcccatccatccactgcggctcctgggctgagaccacccccggtggcgggggcagcagcgccgcccggagagtccggcccgtctccctcatggtgcccagccaggctggggccccagggaggcagttccacggcagtgccagcagcctggtggaagcggtcttgatttcagaaggactggggcagtttgctcaagatcccaagttcatcgaggtcaccacccaggagctggccgacgcctgcgacatgaccatagaggagatggagagcgcggccgacaacatcctcagcgggggcgccccacagagccccaatggcgccctcttaccctttgtgaactgcagggacgcggggcaggaccgagccgggggcgaagaggacgcgggctgtgtgcgcgcgcggggtcgaccgagtgaggaggagctccaggacagcagggtctacgtcagcagcctgtagtgggcgctgccagatgcgggcttttttttatttgtttcaatgttcctaatgggttcgtttcagaagtgcctcactgttctcgtgacctggagttaaccggaacagcgtcttcattcatttctgttgggaccagacgcggagcctgggtgcgcgagccgccctccgggaggaaggcgcccggctgcgtctgcagaggcggggagaggaggcggcgagggtcccggggcgcgaggaaggcgcctgccctctcccagctcgcaggccccgggcccggccgcgcctccgcggggagagcaccccggcttcccgcgcgccctcaccaaaaggaccctacagcaaacgggtgtctttcgactctgcttgtagaaaccatttgcacatattctgtacgagcctcgctgtctccctagagccagggccctgcggatttggagaagggagcggggcaggacttccaggaggaccccaacccggcccggagagggaggaggaggcctccaggggcgcggagctctggggatgggcgtcgggccggcagtggtgcggctcactccgtccctgcccacctgcgacgggatcccccgaccggcacgggccacgccgagctcccggccagccgccggcccgcaggcagcgcgagggaggagctgcgccgccggctccgcccaaccaggtggtgctgagcttccgctgagcgctcttttgttttgtggtttgacacttttcttgacagcatgttgcagtttcttttcggttttggttttttttaaatgttttattttgctttcccagcgggaggggaggaagaagagtgtttacaaagtcctgtagccccctcacctttctgttttcacttttgccaatgtacatcgggtttggttttcttgtattatttaaacggttgtggtttcctttttccacggaggttcaatagaagccgctgcaggagagttttaccaaccattgtgtatgcccaataatttgttatcatttccttaggtagtaacctatttttgttctggtttggttcggttatctaatggaaaggtaactggcaatgcacttgatgtggtcttgcacatgtgggtgatagagttgggttcctttttatgctgggtgtacaggtgggtttgggagagaggagcatgcgcgagagagtctccgagtgtgtgcgacgcgtgtgtgtgtggtgggttgtctgtgtgcatatgtcctgcccgtgtatatgcacccacaccatgtgcccgtgcacaccagtgactacgcagtcccccctttctggtttagctgtgggaagatctgaatctggggccgtttgaaagcaaaaacaaaccactgtctctgcttctgaaacgggaatcagtaactctttgcattttctgtcccacaagatatgcaaaaacaatgcaataatattcatttaaaaatacaattgtgagttgtgttggcattaaaactgtattttaaaaaaagacagaaatttaagggaaaaacacaagaaggcattttgcttcaatatattccgtgtaatgttttattgcattgataatgtttctgttgaagaaaccgttatacttgaattcaggtcagtttcagtatttttcaaatatttttttaaaactgaattgcaattgtgccaagcgaatataatgaattgaattaagttggttttcggattcacttcttgtatattttgctgcatgtaaagtaaatcattttgtatttggagtgtgacaagctttacctttgaactcaagtgcttttctatatgtggttgggggaaagggaacaagttttctttagtttgcacaatgagcaaaggtatcaccagtgtagtcattattctgctctccacaaacaggtttggacattactgttttgcatatcttgtgtttgcttacatttccctcaatttttccaaaatcgtttgctgggtatgtttgtaccgcctcttgctgtgagagaccaggacctattttattccagtcttcactctgtccactctgctctggtcatctgatttggtacttctccaagaacagcccttcactgtgaggtgcagggaggcgttctgatgagccctcagtcactgggccgtcatccgcatcccccatggaagaggtagctggctttcccttcccttccaccacacggaattttctctttggcttccttaggaaagtgtacactaaccgggaggataaaattaaagtcaggctgcttggagggaggggcatcctcacttccggattcttgttgctctacccaacaaggacagcaggggctcgagaaaggaactggtgaaaccctgatccatctgaaagtcaactctgcgtgctcctttctccatcccttcctcactctggagcagcctttccttcaggcttgccctaatgtttgggctgccggggagggggccaggacaagggaagaggcatccggagctcacagtgggggtgggaacagatttttgtgggggcatctctaatgctcacttatatctccctagaacatcactcttttggtgctgtgtccttcaaatgtatgtcaacagtggtggctgaaaagggactgctttggggaaaacaggacccaaccattcacccagaattgacccattaaatctcttccagtcctagtgttccctgagcccctcttggcacatatataagtaagctagaaattacaataagggacagtccattcctctatgacagcttgctggactgattcatgacaaagtggagaaatgtactcaatactccccggttaacacagtctagaaacagagtttctttatggatatccacacccaagtcatccaaactttcttgattccttttcactgccatcaaggtcctctagaaattgagtttaggtatcatcctttgaaaagttcccaagatttctaccaggaggtacacacaggcgttccctgtctagggcaggaggactatcctagcttgaccttctgatccactagaataagactggcgtatgatgcctgtcatcagaacagactggcacaagtagtgacatcaatgaaccacagcacaatcttccaagtgatgtctactctccacctaaaatggaattttccccatgaccttgtaaaacataattgtcacatcttccatacccctcctgacagcccccaagtgtcaggagaaaacagtcaggggctaagggcccaagggacttgaagaaacaacagtttaaggtctgcagtttggtcaacttaattcttgtcctccgaccagccctgcctctttcatttccagaccttggagaatttttcccagctttgattcagaaggtactagttataacccctttccttcttcttaatccaataggcctcactctcactgggaaatccactcaaaggaacaaggcaatgtctctcattctatttcccagttccaaattccaggtgcttgtctggagtgaagctacccgttactttctcccagcttttctccacccagcatgtctcctgcccatgcagctgaagacagtggggcaacctcaggagaagcagacctttccatgcccaagttcatctcctgagcaacagtgacacctagaaaatgaggactttggaagtcacccaaaagatggtggctactttatggagtcctgaagatacacagccaccactcctaaaggcaaagaaagaaaacacgaatgtaggtcagggatagagtggaaccctggtcatcggggtttttagcctcatcgtgggaaaggtggtaaaggaggatgatggcatctccatccctagaggccaagaattgaaatatcattgtcaaggattagaaacaattcagcaaagaggccacaaaaagggcctgctgactcccagaagacctctttaaaccccaggggaggcaaatacttgctgatggagtctgggccgtttccatattttaaagaagacctgcctctggggcaaatgtcagcacagagaggactgggaggagaatggaggcaagaaaagggcatattttgactccctctgtgcctcttcccagttcatggaaggatgtgttcagcttacccacccacagtgaccagtgtggtggagccgctgacatctcaaggatctatttgggaaggtgagaagagtactcattccatctgggggtgttgttccagccacatcagcctacctggtgggatgtgggggtgtctgccaccctgtcccccctctgctgatgtccctcccctcaggctgtccaggtgccacctgacacaggctgctgtgcaaagacaggcggggaagcccaaacctcactcccagggaggccctcagccgccagagtccaggttctccagaggctacgatttgaggaggttgagggggaagacaggagggaaagaaaagtcctacaactgtcaggaatggggcacctttccctgtccctaagcaaagctccctcttcccactgccctccccagccccagctccctgtcctccccaacacctagtgagaaagacggtgcgtggaagggagtcccatgggcagatgcttacacgacctctttgtgaagcctcttctgggtttaacttcattcatcaatttattcttatgtcaaagcaatgaaacttttctttctggagccagataccaatacaacaggtgaacgggtttctgccacatctctacattgacgggggatgcttgaacaacccccctcactacacagacacacaccgttaaggcacaagggctggggttgagctctagatgagggactttcctgctcctgcaagggtgagcactgtatacacagacaaggagggtgcagtagagtgactcccttggatggaagtagtaccatcagaacctactattattatgacataaattctatttacatacattgagagaatactacaatcaacactttttcctgggatgactttaagaggtttgagccacagcacctgaagtggcaaagatccatggtctttgtagggtattagagaactcttccagtcacctctgaaagcactctagatcttgcagctgagtggatgaagtgtaacaaatctgttgcacgctgagaggagtcagaattagcatttttcatgaaagttccccacgtctctactaagaatgaggaagaaaagactaagactaggtaattacacagaggcttgaaatgttacatcaccagagccaagtcctctcccttcagatcagttactggctgctacacagggacacccccaccttttcagggcatcccatgcactccacttctcaggatctaaggaatttgactttgtagggatcccagaaagggcactgtgccacttcccctggtgtgaatcagacatacattgtacattcatttctaaaattcactcatgcacctcaaaccaaggtcattatccaaaaaaaaaaaaaaaaagctctgggtggaagagtttgtaagttttaagagagggtcatttctatgtgaggaaatgcagaaatggacagaatgattcttattcactgtttgggtctggagaattcccattgtggaaatcttagagatctcaagtttattaccaagggaataaggaaaaaaaggtgagcaggcaccaggccaagcagtggctcccttgccaaggaacctgaggctgcaggtttcagggacccccttgaagaaacctctcctggccattggccaggagaaaagagaagtctctcctgtagagtcacaagagaagcaaaagagggtgggtcactgggtcctggacatagcccccaaccccaagacttcccaatatggagaaactacaccaatgtttaaaaggggaaaaggaaagaacttgtacatcaagggaagatgatttgtaaacacacagtcctgtgcagaaagatccccttcaggaggtgtctccagcatcccaaagctgtgcgcaccttctcttttcctgcctcaggccacctatgcatccagctgcagcccatacccacacctgaaatccatctcttgaatcccagccaggttatataccaccccattgccatgtcctgtcctggccagaatgcatgctgttcccccaagcctcgtgggagtgaggccatgggaaacagagatgagcatgtctggacaagtctgtgatggtagtggatgagaataacccatggcaaaacacgcacattcattaagaaatagggcgacagattccccgttggtgaagcactgaaaggtctattactctcataatattgctgttttattttaatccaccagagctaccatgcaaaactttcctcctgtgaaacgctccagataaagctcctctaatctccccttccctcatgtcctccagctcaaacccaccttcatcccccaaaccaatctgtatcatgcctgttatcagagaggcacagaaagatgggcagtgcctccgttgtcaccattccccacacccctacacacccccacaccctcccctccaggctccacgacttcacagtcttactgttgtaaatatcattgtacagtttgtaatcctcaaataatcccattgtcagaggcctcgcctgatgggccttctcaccctcgagaaaggccagggaatctagaaggggcaacccttcaaggagagcttcagggtcatctctgtgtgagacactattgtatattcctgtaagattgcatttttatctaaggaatgatgttatttaaaaaacaaacaaaaaacacaaaaaataagaattgcaaataaatttcttaacaatgtct

SEQ ID NO: 46943 - DNA, 6468 bp, Artificial Sequence
  derived and/or modified sequence
atggttaatgaaaataccaggatgtatatccctgaggaaaaccaccagggatccaactacggtagcccccgcccggctcacgccaatatgaacgcaaacgccgcagccgggctcgccccggagcacattcctactcccggggcggctttgtcttggcaggcagctatagatgctgcacggcaggccaaattaatgggaagcgctggtaatgcgacaattagcaccgtgtccagtacccagcgcaaacggcaacaatacggcaagcccaaaaagcagggaagtactacagccacacgtccccccagagccttgctctgcctaactctgaaaaaccccatccgacgggcctgcatctcaattgtagagtggaagcccttcgagattataatccttctgaccatattcgccaactgtgtggctctggccatatacattcccttcccggaggatgactctaacgcaacaaatagcaatctggaaagagtcgagtacctcttcctgattatctttaccgtcgaggctttcctgaaagtgatcgcatacggactccttttccatcctaacgcctatctgagaaacggctggaacttgcttgacttcataatcgttgtggttgggttattctcagcaatcttggagcaagccaccaaggcggacggagcaaacgcactgggcgggaaaggcgccggctttgatgtgaaagctctaagggcttttagagtcttgagaccgctaaggctggtaagcggagtgccaagccttcaggtagtgcttaactccatcattaaagctatggtgcctctgctccacattgctctgctggtgctttttgttatcatcatttatgcgattattgggcttgagctgttcatggggaaaatgcacaagacatgctataatcaggaggggattgctgacgtgcctgctgaagatgatccatctccatgtgcactcgagaccggacacggacggcaatgtcaaaatggcacagtctgcaagcccgggtgggacggccctaagcacggaatcactaattttgataacttcgcttttgctatgctgactgttttccaatgtatcacaatggagggctggacagacgtgctttattgggtcaatgacgccgtcggccgtgattggccctggatttatttcgtcacactaatcatcatcggatccttttttgtactaaatctggtgctgggtgtgctgtcgggggagttctccaaggagagagaaaaagcgaaggcccgcggggacttccaaaagctgcgtgagaaacagcagctcgaggaggacctcaagggctacctggactggatcactcaggccgaagacattgatccagaaaacgaagatgagggtatggatgaggaaaaacctcgcaacatgtctatgccgacctcggaaaccgaatcagttaatacagagaacgtcgccggaggggacatcgagggcgaaaactgtggcgcaagattggctcatcgaatatcaaaaagcaaattcagtagatactggaggcgctggaaccgtttttgtcgtcgcaagtgtagagccgccgtcaaaagcaatgtgttttactggcttgtgatctttctggtattcctgaacaccctgaccatcgccagtgagcactacaaccaacctaactggttaaccgaggttcaggacactgctaacaaggcactgctcgctctatttaccgctgaaatgctgttaaagatgtattccctcggccttcaagcctactttgtgtccctgtttaatcggttcgactgcttcgtggtgtgtgggggaatcctcgagacaatcctggtcgagactaagattatgtccccactcggtatctccgtgttgcgttgcgtgagactgctcaggatattcaagattacccgctactggaactctctgagcaatctggttgcgagcttgctgaacagcgtgaggagtatcgcctcccttctcttgttgctctttctcttcattatcatattctctctgctggggatgcaactgttcggagggaaattcaacttcgacgagatgcagacgcgccggtccaccttcgacaattttccgcagtctctgcttaccgtgttccagatactcaccggcgaagattggaactctgtcatgtatgacggaattatggcttacggcggacctagctttcccggcatgctggtttgtatttatttcatcatacttttcatctgtggtaactatatcttgctgaatgttttcttagccattgcagtcgataacctggccgacgcagaaagcttgacgtccgcccagaaggaggaggaggaggagaaagaaagaaagaaacttgcaagaacggcgtcaccagagaagaaacaagagcttgtcgaaaaaccagctgtgggagaaagtaaagaagaaaagatagaactcaagtcaatcaccgccgacggggagagcccccctgccactaagatcaatatggatgatctccagcccaacgagaacgaggacaagagcccctaccctaatccagagaccacgggcgaagaggacgaagaggaaccagaaatgcctgtgggcccgaggcccaggcccctgtccgaattgcatctcaaagagaaagctgtccccatgccagaggcatcagcattttttatcttcagcagcaacaatagattccggctgcaatgccatcggattgtgaatgacaccatctttactaacctaatcttgttctttattctcctgtcctctatctctttggccgcagaggatcctgtgcaacatactagtttccgcaaccacatcttaggcaacgctgactacgtgtttacgagtatctttactcttgagattatcctgaaaatgacggcttatggcgccttcttgcataagggatctttctgtagaaattacttcaatattcttgacttattagtggtgtccgtgtccctgatctcattcggaattcaaagctctgccattaacgtcgtaaagatcctacgagtgcttagggtacttagaccactaagggctatcaacagagccaaaggtctaaagcacgttgtgcagtgtgtgtttgtggcaattagaactatcggaaacatcgtcatcgtgactaccctgttgcagttcatgtttgcctgcatcggcgtccaattgttcaagggcaaactatacacctgctccgattcatcaaaacaaaccgaagccgaatgcaaagggaattatattacttataaagacggcgaggttgatcaccctataattcagccgcgcagctgggaaaacagcaaatttgactttgataacgttttggctgccatgatggcactttttacagtcagcactttcgagggctggccagagttgctgtatcgctcaatcgattcacacactgaagacaagggtccaatctacaattacagagtggagataagtatcttttttattatctacattatcattatcgcttttttcatgatgaacatcttcgtcgggttcgttattgtgacattccaggaacaaggtgagcaggaatacaaaaactgcgagctggacaagaatcagagacagtgcgttgagtatgctctaaaggcccgccccctcaggagatatatcccaaaaaaccagcaccagtataaggtgtggtatgtcgttaacagtacatatttcgagtacttgatgttcgttttaattctgttaaacacaatatgtctcgcaatgcagcattatgggcagtcttgcctttttaagatagcaatgaatatactcaatatgttgtttacaggactatttaccgtggaaatgatcttgaagctgatcgcttttaagcctaaggggtacttttcagatccatggaatgtgttcgatttcctcattgtgatagggtccataatagacgtcattctgagcgagaccaaccactacttctgcgatgcctggaatacttttgatgcccttatcgtggtgggatctattgtggatatcgccattactgaggtgaataacgccgaggagaatagtagaatttcaatcacatttttccgactatttagagtgatgaggctggtcaagctactctcccgcggagaagggatcaggacccttttgtggacttttatcaaatcctttcaagcactgccatatgtggcccttctcattgtaatgctattcttcatttacgccgtgataggcatgcaggtcttcggcaagatcgcactcaacgacaccaccgagatcaatcgaaataacaacttccaaaccttcccgcaagcggtgctcctcctgtttcggtgtgccactggtgaggcttggcaggatataatgttagcctgcatgcccgggaagaaatgcgcacccgagagcgagccgagcaattccaccgaaggcgaaacaccctgtggatccagcttcgccgtattctattttatctccttttacatgttgtgcgccttcttaattatcaatctgttcgttgccgttattatggacaactttgactacctcaccagggactggtccatcctgggcccccaccatctggatgaatttaagcgcatctgggctgagtacgaccccgaggcaaagggccgcataaagcatctcgacgtggttacactgcttcggaggattcaaccccccctcggcttcggcaaattatgcccgcatcgggttgcatgcaagcgattggtgtcaatgaacatgcctctgaactctgacgggactgtaatgtttaatgcaacacttttcgccctggtccgaactgccctgcggatcaaaaccgaggggaacctcgaacaggctaatgaggagctgagggcaattataaagaagatctggaaacgtacctccatgaaacttctggatcaagtcgtccctcctgctggcgacgatgaggtgactgttggtaagttctacgccacatttcttattcaggagtacttccgtaagtttaaaaagaggaaagaacaagggttggtaggcaagccatcccagaggaacgcgctgtcgttgcaggccggcctcaggacccttcacgacattggtcctgagataagacgcgcaattagcggcgacctgaccgccgaggaagaactcgacaaggccatgaaggaggccgttagcgctgcctcagaggatgatattttccgtagagccggcggtctgttcggcaaccacgtgtcttactatcagagtgacggccggtcggcctttcctcagacatttactactcaacgcccactgcacattaacaaggctgggagcagccaaggagacacagagtcgcccagtcacgagaaactggtggatagtaccttcacacccagctcctactccagtaccggcagtaacgcaaacattaataacgccaataataccgcccttggtagactgccacggcccgctggctatccctctactgtgagcaccgtggaggggcatgggccccctctctcgcctgctatccgtgttcaagaggtggcttggaaactatcttcaaatcggtgccacagccgcgaatcccaggcagctatggcagggcaggaagagacatcacaagacgaaacctacgaagtgaagatgaaccacgacacagaggcctgttcagagccctcactcctgagcaccgagatgctaagctaccaagatgatgaaaacaggcaactcacattgccggaggaggacaagcgtgatatacgccaatccccaaaaaggggctttttgcggtctgcctccctggggaggagggccagcttccatctggagtgcctgaaaaggcaaaaagaccggggcggcgacatctcacagaaaacagtactgcccctacatctggtacatcatcaagccttggccgtggcaggattgagtccgcttttgcaaaggagtcacagccctgcctcatttcctcggccctttgcaaccccacccgccacgcccggatccagagggtggccgcctcagccagtgcctacgcttaggttagagggcgtcgaatcttccgagaaactcaactcgtctttcccatccattcattgcggctcctgggccgaaaccacccctggtggtggcggatcaagtgcagctcgccgggtacgacctgtgagtctgatggtgccatcacaagccggagcccccggcagacagtttcatggctcagctagtagcttagtagaggctgtgctgatcagtgaaggactggggcaatttgcgcaggatcccaagttcattgaagttaccactcaggaacttgccgacgcttgcgatatgaccattgaagagatggaaagcgccgcggacaatatcctgagcggtggcgctccccagtcccccaacggcgccctgctgcctttcgtaaattgccgcgacgccggacaggaccgcgctggaggtgaggaggatgccggttgcgtgagggctcgggggaggccatcagaggaggagctgcaagacagccgggtgtatgttagttctctgtag

SEQ ID NO: 46944 - DNA, 6468 bp, Artificial Sequence
  derived and/or modified sequence
atggtgaatgaaaacaccaggatgtacatccctgaggagaaccaccagggcagcaactacggcagccccaggcctgcccacgccaacatgaatgccaatgctgctgctggcctggcccctgagcacatccccacccctggggccgccctgtcctggcaggccgccattgatgctgcccggcaggccaagctgatgggcagcgctggaaatgccaccatcagcacagtgagcagcacccagaggaagaggcagcagtatggcaagcccaagaagcagggcagcaccacagccacccggcccccccgggccctgctgtgcctgaccctgaagaaccccatccggcgggcctgcatcagcatcgtggagtggaagccctttgagatcatcatcctgctgaccatctttgccaactgtgtggccctggccatctacatccccttcccagaagatgacagcaatgccaccaacagcaacctggagcgggtggagtacctgttcctgatcatcttcaccgtggaggccttcctgaaggtgattgcctacggcctgctcttccaccccaatgcctacctgagaaatggctggaacctgctggacttcatcatcgtggtggtgggcctcttcagcgccatcctggagcaggccaccaaggcagatggagccaatgccctgggcggcaaaggagctggctttgatgtgaaggccctgcgggccttccgggtgctgcggcccctgcggctggtgtctggagtgcccagcctgcaggtggtgctgaacagcatcatcaaggccatggtgcccctgctgcacatcgccctgctggtgctgtttgtgatcatcatctatgccatcatcggcctggagctgttcatgggcaagatgcacaagacctgctacaaccaggagggcattgctgatgtgcctgcagaagatgaccccagcccctgtgccctggagaccggccacggccggcagtgccagaatggcaccgtgtgcaagccaggctgggatggccccaagcacggcatcaccaactttgacaactttgcctttgccatgctgactgtgttccagtgcatcaccatggagggctggacagatgtgctgtactgggtgaatgatgctgtgggccgggactggccctggatctactttgtgaccctcatcatcatcggcagcttctttgtgctgaacctggtgctgggcgtgctgtctggagagttcagcaaggagcgggagaaggccaaggcccggggggacttccagaagctgcgggagaagcagcagctggaggaggacctgaagggctacctggactggatcacccaggctgaagatattgatcctgaaaatgaagatgagggcatggatgaggagaagcccaggaacatgtccatgcccaccagcgagacagaatctgtgaacacagaaaatgtggccggcggggacatcgagggggagaactgtggggcccggctggcccaccgcatcagcaagagcaagttcagccgctactggaggcgctggaaccgcttctgcaggaggaagtgcagagctgctgtgaagagcaatgtgttctactggctggtgatcttcctggtgttcctgaacaccctgaccatcgccagcgagcactacaaccagcccaactggctgacagaggtgcaggacacagccaacaaggccctgctggccctcttcaccgctgagatgctgctgaagatgtacagcctgggcctgcaggcctactttgtgtccctcttcaacagatttgactgctttgtggtgtgtggcggcatcctggagaccatcctggtggagaccaagatcatgagccccctgggcatctctgtgctgcgctgtgtgcggctgctgcgcatcttcaagatcacccgctactggaacagcctgagcaacctggtggccagcctgctgaacagcgtgcgcagcatcgccagcctgctgctgctgctcttcctgttcatcatcatcttcagcctgctgggcatgcagctgtttggaggcaagttcaactttgatgagatgcagaccaggaggagcacctttgacaacttcccccagagcctgctgaccgtcttccagatcctgaccggggaggactggaacagcgtgatgtatgatggcatcatggcctatggaggccccagcttccctggcatgctggtgtgcatctacttcatcatcctcttcatctgtggcaactacatcctgctgaatgtgttcctggccatcgctgtggacaacctggctgatgctgagagcctgaccagcgcccagaaggaggaggaggaggagaaggagaggaagaagctggccaggacagccagccctgagaagaagcaggagctggtggagaagccagctgtgggggagagcaaggaggagaagattgagctgaagagcatcacagcagatggagagagccccccagccaccaagatcaacatggatgacctgcagcccaatgaaaatgaagacaagagcccctaccccaaccctgagaccactggagaggaggatgaggaggagcctgagatgcctgtgggcccccggccccggcccctgtctgagctgcacctgaaggagaaggctgtgcccatgcctgaggccagcgccttcttcatcttcagcagcaacaaccgcttccggctgcagtgccaccgcatcgtgaatgacaccatcttcaccaacctgatcctcttcttcatcctgctgagcagcatcagcctggccgctgaggaccctgtgcagcacaccagcttcaggaaccacatcctgggcaatgctgactatgtgttcaccagcatcttcaccctggagatcatcctgaagatgacagcctatggagccttcctgcacaagggcagcttctgcaggaactacttcaacatcctggacctgctggtggtgtctgtgtccctcatcagctttggcatccagagcagcgccatcaacgtggtgaagatcctgcgggtgctgcgggtgctgcggcccctgcgggccatcaacagagccaagggcctgaagcacgtggtgcagtgtgtgtttgtggccatccgcaccatcggcaacatcgtcatcgtgaccaccctgctgcagttcatgtttgcctgcatcggcgtgcagctgttcaagggcaagctgtacacctgcagcgacagcagcaagcagacagaagctgagtgcaagggcaactacatcacctacaaggatggagaggtggaccaccccatcatccagcccaggtcctgggagaacagcaagtttgattttgacaacgtgctggccgccatgatggccctcttcaccgtgtccacctttgagggctggccagagctgctgtaccgcagcattgacagccacacagaggacaagggccccatctacaactacagagtggagatcagcatcttcttcatcatctacatcatcatcatcgccttcttcatgatgaacatctttgtgggcttcgtcatcgtgaccttccaggagcagggcgagcaggagtacaagaactgtgagctggacaagaaccagaggcagtgtgtggagtatgccctgaaggcccggcccctgcggcgctacatccccaagaaccagcaccagtacaaggtgtggtacgtggtgaacagcacctactttgagtacctgatgtttgtgctgatcctgctgaacaccatctgcctggccatgcagcactacggccagagctgcctcttcaagatcgccatgaacatcctgaacatgctgttcaccggcctcttcaccgtggagatgatcctgaagctgattgccttcaagcccaagggctacttcagtgacccctggaatgtgtttgacttcctgattgtcatcggcagcatcattgatgtgatcctgtctgagaccaaccactacttctgtgatgcctggaacacctttgatgccctgattgtggtgggcagcatcgtggacatcgccatcacagaggtgaacaatgctgaggagaacagccgcatcagcatcaccttcttccgcctcttccgggtgatgaggctggtgaagctgctgagcagaggagagggcatccgcaccctgctgtggaccttcatcaagagcttccaggccctgccctacgtggccctgctgattgtgatgctgttcttcatctatgctgtgattggcatgcaggtgtttgggaagatcgccctgaatgacaccacagagatcaacagaaacaacaacttccagaccttcccccaggccgtgctgctgctcttccgctgtgccactggagaggcctggcaggacatcatgctggcctgcatgcctgggaagaagtgtgcccctgagagcgagcccagcaacagcacagaaggagagaccccctgtggcagcagctttgctgtgttctacttcatctccttctacatgctgtgtgccttcctgatcatcaacctgtttgtggccgtcatcatggacaactttgactacctgacccgggactggagcatcctgggcccccaccacctggatgagttcaagaggatctgggccgagtatgaccctgaggccaagggccgcatcaagcacctggatgtggtgaccctgctgcggcgcatccagccccccctgggctttgggaagctgtgcccccaccgggtggcctgcaagaggctggtgtccatgaacatgcccctgaacagtgatggcaccgtgatgtttaatgccaccctgtttgccctggtgaggacagccctgcgcatcaagacagagggcaacctggagcaggccaatgaggagctgcgggccatcatcaagaagatctggaagaggacctccatgaagctgctggaccaggtggtgcccccagctggagatgatgaggtgacagtgggcaagttctacgccaccttcctgatccaggagtacttcaggaagttcaagaagaggaaggagcagggcctggtgggcaagcccagccagagaaatgccctgagcctgcaggccggcctgcggaccctgcatgacatcggccctgagatcagaagagccatcagcggggacctgacagctgaggaggagctggacaaggccatgaaggaggccgtgtctgctgcctctgaagatgacatcttccggcgggccggcggcctgtttggaaatcatgtgtcctactaccagagtgatggccgcagcgccttcccccagaccttcaccacccagaggcccctgcacatcaacaaggccggcagcagccagggcgacacagagagccccagccatgagaagctggtggacagcaccttcacccccagcagctacagcagcacaggcagcaatgccaacatcaacaatgccaacaacacagccctgggccgcctgcccaggcctgctggctaccccagcacagtgtccacagtggagggccacggcccccccctgagccctgccatccgggtgcaggaggtggcctggaagctgagcagcaaccgctgccacagccgggagagccaggccgccatggccggccaggaggagaccagccaggatgagacctatgaggtgaagatgaaccacgacacagaggcctgcagcgagcccagcctgctgagcacagagatgctgagctaccaggatgatgagaaccggcagctgaccctgcctgaggaggacaagagggacatccggcagagccccaagaggggcttcctgcggagcgccagcctgggccggcgggccagcttccacctggagtgcctgaagaggcagaaggaccggggcggggacatcagccagaagacagtgctgcccctgcacctggtgcaccaccaggccctggccgtggccggcctgagccccctgctgcagaggagccacagccctgccagcttcccccggccctttgccaccccaccagccaccccaggcagccggggctggccaccccagcctgtgcccaccctgcggctggagggcgtggagagcagcgagaagctgaacagcagcttccccagcatccactgcggctcctgggccgagaccaccccaggcggcggcggcagcagcgctgcccggcgggtgcggcctgtgtccctgatggtgcccagccaggccggggcccctggccggcagttccacggcagcgccagcagcctggtggaggccgtgctgatcagcgagggcctgggccagtttgcccaggaccccaagttcatcgaggtgaccacccaggagctggctgatgcctgtgacatgaccatcgaggagatggagagcgctgctgacaacatcctgagcggcggggccccccagagccccaacggggccctgctgccctttgtgaactgcagagatgctggccaggacagagctggaggagaagaagatgctggctgtgtgcgggcccggggccggcccagcgaggaggagctgcaggacagccgggtgtatgtgagcagcctgtag

SEQ ID NO: 46945 - DNA, 6468 bp, Artificial Sequence
  derived and/or modified sequence
atggtgaacgagaacacccggatgtacatccccgaggagaaccaccagggcagcaattacggctcacctcgccccgcacacgctaacatgaatgccaatgccgcggccggactggctccagagcacatccctacacctggagccgcactgtcgtggcaagccgctattgacgcagctaggcaagccaagcttatggggtccgcaggcaatgcaacaattagcacagtctcaagcactcagcggaagcgtcaacaatatggaaagcccaagaagcagggttcaactacagctaccagacctccacgggccctgctatgccttacactgaagaatcccatcaggagggcatgtatttccatcgtggaatggaagccctttgagatcattatactgcttacaatattcgccaactgtgtcgctctagctatctacattccatttcccgaagatgattccaacgctacgaacagcaacctggaaagagtggagtatctctttcttataatcttcacggtggaagcgttcctgaaggtaatcgcctacgggctgctgttccaccccaatgcttatctcagaaatggatggaatctcctggatttcataatcgttgtggttggcttgttttccgccatccttgagcaggcaaccaaggcagacggcgccaacgctctgggcggtaagggagctgggttcgatgtcaaggccctcagagccttccgagttctacgcccccttaggctcgtgagtggcgtgccttccctgcaggtcgtcttaaatagtataattaaggccatggttccacttctgcatatagccctgctcgtcttgtttgtcatcatcatttacgcaatcataggactcgagctcttcatgggcaaaatgcacaagacctgctataaccaagaggggattgccgacgttccggccgaagatgaccccagcccctgcgccctggaaacaggacacggtaggcaatgccaaaacggcacagtttgtaagccgggttgggacggccctaaacacggaatcactaacttcgataatttcgcttttgcgatgctcacggtcttccagtgtatcaccatggagggctggacagatgtgctgtattgggtgaatgacgcagttgggagggattggccttggatctactttgttaccctaattatcattggcagctttttcgtactcaacctggtgctcggcgtattgtcaggcgagttttccaaggagcgggaaaaagccaaagcccgtggcgatttccaaaagctgcgagaaaagcaacaactggaagaggacctgaagggctatcttgattggattacacaggcagaagacatcgaccccgagaatgaggatgaaggtatggatgaagagaagccgcgaaatatgtctatgccaaccagcgaaactgagagcgttaacaccgagaacgttgccggcggggacatcgaaggagagaattgtggcgcccgcctcgctcacagaatttccaaatccaagttttccaggtattggcgacggtggaataggttttgtagaaggaaatgccgcgccgctgtcaagtctaatgtcttctattggctggtgatatttcttgtgttcctgaataccctgaccatcgctagcgagcactacaaccagccaaactggctcactgaagtacaggacactgccaacaaggcattactggctttattcaccgcagagatgttgcttaaaatgtatagcctggggctgcaggcctacttcgtcagcctgtttaatagatttgactgttttgtggtatgcggggggatactggagacaatactcgtggaaacaaagataatgtcaccattgggaataagcgtgttgcgctgcgtgcgcctgcttcggattttcaaaatcacaagatattggaatagcttgtcaaacctcgtagcaagcttgctgaattcggtgaggtctatagcttcattactgctgctcctgtttctatttatcattatttttagcctcttgggaatgcagctgttcggcggcaagtttaatttcgacgagatgcagacgagacggtctacctttgataattttccacagtctctgctcacagtgtttcagatcctcaccggagaagactggaactcagttatgtatgatggcattatggcatacggcgggccttcattccctggcatgctagtgtgtatatactttattattctcttcatttgtgggaactacattctcttgaacgtcttcctggccatagccgtggataatttggcggacgccgaatcacttacctcggcacaaaaggaagaagaggaggaaaaagaaaggaagaagctggctcgtaccgcttcaccggagaagaaacaggagcttgtcgagaaaccggccgtgggggaatcgaaggaggagaaaatcgaattaaagtctatcaccgccgatggcgagagcccacccgctactaagataaacatggacgatttgcagccgaacgaaaatgaggacaagagcccctacccaaacccggagaccacgggcgaggaagacgaagaagaacctgagatgccagtgggcccgcggccccggccactgtcagaactccacctgaaagagaaggcagtcccaatgcccgaagccagtgcattctttatattctcctctaataacagatttagactccaatgtcacaggattgtcaacgatactattttcaccaatctcatcctattcttcatacttttaagctcgatcagtttggccgctgaggatccagtccaacacacaagttttcgcaaccacattctaggaaatgcagactacgtgttcacttccatctttacactggagatcatactgaagatgacagcatacggtgctttcctccacaagggctctttttgcagaaactactttaatatactggacctgctggtagtgtctgtctctcttatctcattcggcattcagtcaagcgcaatcaatgttgttaaaattctgcgcgtcctccgcgtgttgcgccccctgagagcaatcaacagggcaaaggggcttaaacacgtcgtccagtgtgtgttcgttgccatcaggacaatcggaaatattgttatcgtgacaaccctactgcagttcatgttcgcttgcatcggagtgcaactttttaagggcaaactgtatacctgttccgatagctccaaacagacggaagcggagtgcaagggaaactatatcacctataaagatggtgaagttgatcatccgataattcagcctcgtagctgggaaaactcgaagttcgactttgacaacgtgctggctgcaatgatggctctgttcaccgtgtcgacttttgagggatggcctgagctgctgtatagaagcatcgacagccataccgaggataaagggcccatatacaactaccgggtggaaattagcattttcttcattatttacatcattatcattgctttctttatgatgaatatttttgtaggatttgttatcgttacattccaggagcagggtgagcaggagtacaagaattgtgaactcgacaagaaccaaaggcaatgtgtggagtacgcactcaaagcccgccctctgagaaggtatattccaaaaaaccagcatcaatataaagtctggtacgttgttaactctacatatttcgaatacctaatgtttgtgctgattctgctgaacaccatttgcctggccatgcagcactacgggcaatcgtgtctgttcaagattgctatgaacatactgaacatgctctttacagggctatttactgtggaaatgatactcaaactgatagccttcaagccgaaagggtactttagcgatccttggaacgtatttgacttcctgattgttatcgggagcatcatcgacgtgatcctatccgagactaatcattatttctgtgatgcttggaatacattcgatgccctgatcgttgtgggcagtattgtggacattgcaatcacggaggtcaacaatgccgaggagaatagtaggatttcaattacctttttccgtctgtttcgcgttatgaggctggtgaagctcctgagtaggggcgaggggatccggaccctgctatggactttcattaaaagtttccaggccctgccatacgtggcactgctaattgtcatgctgtttttcatatacgctgttatcggtatgcaggtgtttggaaagatcgcactgaatgacacgaccgaaataaacagaaacaataatttccaaacgtttccacaggcggtgctgttactctttcgctgtgcgactggcgaagcttggcaggatattatgctggcctgtatgccgggcaaaaagtgtgcacccgagagtgagccatccaattccacagaaggggagacaccttgtggctcatcttttgcagttttttacttcatcagtttctacatgctgtgcgcctttttaattataaacctcttcgtggctgtgattatggataatttcgactacctcaccagggactggagcattctgggccctcatcatcttgatgaatttaaacgcatctgggctgagtacgaccctgaagctaaaggacgcatcaaacacctcgacgtggtgaccctgctacgtcgaattcagcccccgttgggctttggtaaattatgccctcatagggtcgcgtgcaagcggctggtctcaatgaatatgcctctcaacagcgatgggaccgttatgttcaacgccacactttttgctctcgtaagaaccgccctgcgcataaaaaccgagggtaatctggagcaggccaatgaggaacttagagctatcattaaaaaaatatggaagcgtacatccatgaagttactggaccaggtggttcccccggcaggagatgacgaagtaaccgtgggaaaattctacgcaacctttctcattcaggagtatttccgaaaattcaagaaacgaaaggaacaggggcttgtcggcaagcctagccaacggaatgcattgtcattacaggctggactgcgcaccctgcacgacatcgggccagaaatccgacgggcaattagcggggacctgacagccgaagaagagctggacaaggccatgaaagaagccgtcagcgccgcctccgaagacgatatattcagaagggctggcgggctctttggaaatcatgttagctactaccagagtgacggccggtctgctttccctcagaccttcacaacccagaggcccctgcacatcaataaggccgggtcatctcagggggataccgaatcacctagccatgaaaagctggtcgactccacatttacgccttcatcctacagctccaccggctccaacgccaatatcaataacgccaataacaccgctctgggcagacttcctagacctgctgggtatccgagtaccgtctccaccgtggagggccacggacccccactttcacctgctatacgcgtccaggaggttgcctggaaattgtcaagcaatcgatgccactcccgtgaaagccaagcagccatggcagggcaggaggaaacctcccaagacgagacatacgaggtcaaaatgaatcatgacacagaagcatgttcagagccgagcctgctgtccaccgagatgttgtcatatcaggatgatgaaaatcggcaactgacccttcctgaggaagacaagcgggacattcggcagtccccgaagaggggcttcttgcggagtgcatctctaggcagaagggcctccttccatctcgaatgtctgaagagacaaaaagataggggaggggatatctcacagaaaaccgttctccccctccacttggtccatcatcaggcactcgccgtggccgggctctcgccactactgcagagatctcatagccccgcttcttttccaagaccgttcgccacacctcctgccacccctggttccaggggctggcccccccaacccgtaccaaccttaagacttgaaggggttgagtctagcgaaaaactgaactcatctttcccctccattcactgtggatcttgggcagaaactactcccggcggaggaggctcatccgcggctcgaagggtaaggccagtgtcccttatggtaccctctcaggcaggggcccctggcaggcagttccatggttccgcatcatctttagtggaagccgtgctgatctcagagggattaggccagttcgcgcaggatcctaaattcatcgaagtgactacccaagaacttgccgatgcatgcgatatgaccatcgaggaaatggagtccgctgccgacaatattctgagtggaggggctccacaatctcctaacggagcactcctgccatttgtgaactgcagagatgctggtcaagacagggccgggggcgaggaagacgctggctgcgtgcgggctagagggcggcctagcgaagaggagctgcaggactccagggtttacgtgtcctcactctag

SEQ ID NO: 46946 - DNA, 6468 bp, Artificial Sequence
  derived and/or modified sequence
atggtgaacgaaaacacacggatgtacatacccgaggagaaccaccagggctctaattatgggtcaccaaggcctgcccacgctaatatgaatgccaacgccgcagcagggctcgcccctgagcatatcccaacacccggagcggcactcagctggcaggccgcaatagatgcagcacggcaggctaagttgatggggtccgcaggcaacgcgacaatctctaccgtcagctcaactcaacgaaaacggcagcagtatggaaagcctaaaaaacaagggagtacaacggctacacgaccccctagggcactgctctgcctgactcttaagaaccctatccgcagggcttgcattagcatcgtcgaatggaagccatttgagataataattctgctcacaattttcgccaattgtgtcgccctggccatctacattccctttcccgaggacgacagcaacgccacgaattccaatctggagcgggtggagtatctgttcctcataatttttacagtcgaggcctttttgaaggtcatcgcctatggactgctcttccatccgaatgcgtacctccgaaacggctggaatctgctcgacttcatcatagtggtggttggcttattttcggcgatcttggaacaggccaccaaggctgacggagcgaatgcactaggcggaaagggagcgggttttgatgtgaaggctctgcgcgctttcagagtgcttcggcctctgaggctcgtttccggtgtaccttccctacaggtggtgctgaatagtataatcaaggcaatggtccctcttctgcacattgccctgctcgtgctgttcgttatcatcatctacgcaattattggactggagctgttcatggggaaaatgcacaagacatgctacaatcaagagggaattgccgatgtgcctgctgaagatgaccccagcccatgcgcactcgaaactgggcacggtcgacaatgtcaaaacggcacagtctgcaaaccgggatgggacggaccaaagcatggaataaccaatttcgataattttgcatttgccatgcttactgtgtttcaatgtattactatggagggatggacagacgtgctgtactgggtgaacgacgccgtgggcagggactggccttggatctactttgtgactttgatcattataggcagtttctttgttctgaatcttgtgttaggcgtgctcagcggtgaattcagcaaggagagggagaaagccaaggccaggggagacttccaaaagctgcgggagaaacagcagttagaagaggacctaaaggggtatctggactggataacccaggcagaggatattgaccctgaaaatgaagacgagggaatggacgaggaaaagcctcggaatatgtccatgccaacctccgagacggagtccgtgaatacggagaatgtcgcgggtggagacatcgagggtgaaaactgtggtgccagattagctcaccggatttcaaaaagcaagttctccaggtactggcgcaggtggaatagattctgtcgtcggaaatgccgcgcagccgttaaaagtaacgtgttttattggctggttattttcctggttttcttaaatactttgacaattgcaagtgagcactataaccagccaaactggcttacggaagtccaggacaccgccaataaagcgctccttgcccttttcactgctgagatgctgctcaaaatgtattccctggggctgcaggcatacttcgtttccctctttaacaggttcgattgcttcgtcgtttgcggcggaattttggagaccatcttggtcgagacaaaaatcatgagtcctctgggaatctcagtgctccgctgtgtgcgtttgctcagaattttcaagattacccgctactggaactcgctgtccaacctcgtggctagcttactgaactctgttcggtctatcgcatcacttttgctcctgctctttctttttataatcattttctctctgctggggatgcaactgtttggaggcaaattcaatttcgacgaaatgcagactagaagaagtactttcgataatttcccccagtctttgctgaccgtcttccagatccttactggcgaggactggaacagcgtgatgtatgacggaatcatggcctatgggggtccatcctttccgggtatgctggtatgcatttactttattattttatttatttgcgggaattatatactccttaacgtgtttcttgctatcgctgttgacaacctcgcggatgccgaaagcctgacatctgcacagaaggaggaggaggaggagaaagaaagaaaaaaactggccagaacagcatcaccagagaaaaagcaagaactggttgagaagccggctgtcggcgagtccaaggaagaaaagatagaactcaaatctataaccgcggacggtgagtccccgccagcaactaaaatcaacatggacgacttgcagcctaacgaaaatgaggataagtccccgtacccgaatccagagaccactggcgaagaggacgaggaggagcctgagatgcccgtgggaccgagaccaagacccctttcggaactccacctgaaagagaaggcagtcccaatgcccgaggcttctgcattcttcatctttagctctaacaatcggtttaggctccagtgtcataggatcgtaaatgacacaatattcactaaccttatcctgtttttcattcttctgtcttccataagcctcgcagcagaggatcccgtgcagcatactagtttccggaaccacatattagggaacgccgactatgtgtttacctctattttcacactcgaaataatactgaagatgacagcctacggcgcttttcttcataagggatccttttgcaggaattacttcaacatactggacctcttagtcgtgtcagtgagcctcatttcattcggtatccagtcatctgctataaatgtggtgaaaattctgagggtgcttagggtgttgcggcctttgagagccatcaaccgcgctaagggtctcaaacacgtagtccagtgcgtcttcgttgccatccgcacaattgggaacatcgtcatcgtcaccactctattacagttcatgttcgcctgtatcggtgtgcagctttttaaagggaaactgtatacttgtagcgacagctccaagcagacagaggcagaatgcaagggcaattatattacctataaggatggcgaggtagaccatccaatcatacagcccagatcctgggaaaactctaagttcgatttcgacaatgtcctcgctgccatgatggcccttttcactgtctctacatttgaaggatggccagaactcctctacagatctatcgatagccataccgaggacaaaggtcctatctacaactaccgagttgagatctctatcttttttattatctacatcatcatcatcgctttttttatgatgaatatctttgtcggtttcgtgatcgtgacctttcaggaacaaggtgaacaggaatataagaactgcgagcttgacaagaatcagcggcaatgcgtggaatatgctttaaaggccagacccttaagacggtacatccctaagaatcagcaccagtacaaggtttggtacgtggtgaactcaacctatttcgagtatcttatgttcgtcctgattcttctgaacaccatttgtctcgccatgcagcactatggacagtcctgtctgttcaaaattgcgatgaacatacttaacatgcttttcactggcctgttcacagttgaaatgatcctgaaactcattgcctttaagcccaagggttacttctcagacccttggaacgtgtttgactttctaatcgtcattggaagtatcatagacgtgatcctgagcgaaaccaatcactacttctgtgatgcatggaatactttcgacgcgcttattgtcgtggggtccatagtggatattgctattacggaagtgaacaacgctgaagagaactctcggatatccatcaccttttttcggctgttcagggtaatgcggctggtcaaattactgtcaagaggggagggcattcgaacactgctgtggactttcattaaatccttccaggcactgccttacgtggcactgttgattgttatgctattttttatttacgcagtgatcgggatgcaggtttttggcaagatcgccttaaacgacacaaccgagataaaccgaaataacaacttccaaacctttccacaggctgtcctgttattgtttcggtgcgctactggcgaggcgtggcaggatatcatgcttgcgtgtatgccgggaaagaagtgtgcccctgaatcagagccttctaactctactgagggagagactccatgcggatcgtccttcgcggtcttctatttcatttcattttacatgctgtgtgcttttctgatcattaatttgttcgtggctgtgatcatggataatttcgattatctcactagggattggtccattctgggccctcaccatctggacgagttcaagcgcatctgggcggaatatgatcctgaggccaaaggacggatcaagcacctggatgtcgtgactctgctgcgcagaattcagccacccctaggcttcggcaaactgtgcccacacagagttgcttgtaagagactcgtgtcaatgaatatgccacttaatagcgacggaaccgtgatgttcaacgccaccttattcgctctggtgagaaccgctctgcggataaaaaccgaaggaaacctcgagcaagctaacgaggaattaagggcgatcattaaaaagatctggaagagaaccagtatgaagttgcttgaccaggtggtacctcccgctggtgacgacgaggttaccgtgggtaaattctatgccacgtttcttatccaggaatactttcggaagtttaagaagagaaaagaacagggcttggtgggtaagccatcccagcgcaatgccctttctctgcaggctgggctgcgcacgctacacgacatcgggcctgagataaggcgagcgatctccggagacctgactgccgaggaggagctcgacaaggcaatgaaggaagcagtatccgccgctagtgaagacgacatcttccgcagggctggcggactgtttggtaatcacgttagctattaccagagcgatggcagaagcgctttcccacagacattcacaactcagcggccattacatataaacaaggccggtagcagtcagggggacactgagtccccgtctcacgaaaagctggtcgatagcactttcaccccctccagttactcctcaacagggtcaaatgccaacatcaacaatgcgaataatacggcccttggtagacttcctcgccctgcaggctacccgtctaccgtcagcacagtagagggtcacggtccgcctctctcccctgctattcgggtgcaggaggttgcatggaaattgtcaagcaacaggtgccactccagagagtctcaggccgctatggccggacaggaagagacttctcaggatgaaacgtatgaagtgaaaatgaatcacgacaccgaagcctgctccgagccgtcactgttatcaacagaaatgttaagctaccaggatgacgaaaaccgccagctaactttgcccgaggaagataagagagacatccgacaatccccgaaaaggggctttctgagatctgctagcctaggcaggcgggcttcatttcatctggaatgcctgaagcgtcagaaggatcggggaggagacatttctcaaaaaacggtgctccccctccatctggtgcatcatcaggccttggccgttgccggacttagcccccttctacagcggagccattcacccgcaagcttccctaggcctttcgcaactccccctgctactcctggcagtcgtgggtggcctcctcagccggtgccaacgctccgactggaaggtgtggagagcagcgagaaactgaacagctcatttcccagcattcattgcggatcctgggctgaaaccactccaggtggtggtggcagctcggccgctcgcagggttcggccagtcagtctcatggtgccttcccaggccggagcgcctgggcgacagtttcacggttccgcgagttcacttgtcgaggcagtgttaatttccgaaggattgggtcagttcgctcaagatccgaaattcattgaagtcaccacccaagaactggccgacgcctgtgatatgaccatcgaggaaatggagtccgccgctgataatatccttagcggtggcgcacctcagtcccctaatggcgcacttcttccctttgttaactgcagggacgctggccaagatagggcgggaggggaagaggatgcaggctgcgtccgcgctagaggcaggccatctgaggaggagcttcaggattcacgggtctatgttagctctctctag

SEQ ID NO: 46947 - DNA, 6562 bp, Artificial Sequence
  derived and/or modified sequence
atggtcaatgagaatacgaggatgtacattccagaggaaaaccaccaaggttccaactatgggagcccacgccccgcccatgccaacatgaatgccaatgcggcagcggggctggcccctgagcacatccccaccccgggggctgccctgtcgtggcaggcggccatcgacgcagcccggcaggctaagctgatgggcagcgctggcaatgcgaccatctccacagtcagctccacgcagcggaagcggcagcaatatgggaaacccaagaagcagggcagcaccacggccacacgcccgccccgagccctgctctgcctgaccctgaagaaccccatccggagggcctgcatcagcattgtcgaatggaaaccatttgaaataattattttactgactatttttgccaattgtgtggccttagcgatctatattccctttccagaagatgattccaacgccaccaattccaacctggaacgagtggaatatctctttctcataatttttacggtggaagcgtttttaaaagtaatcgcctatggactcctctttcaccccaatgcctacctccgcaacggctggaacctactagattttataattgtggttgtggggctttttagtgcaattttagaacaagcaaccaaagcagatggggcaaacgctctcggagggaaaggggccggatttgatgtgaaggcgctgagggccttccgcgtgctgcgccccctgcggctggtgtccggagtcccaagtctccaggtggtcctgaattccatcatcaaggccatggtccccctgctgcacatcgccctgcttgtgctgtttgtcatcatcatctacgccatcatcggcttggagctcttcatggggaagatgcacaagacctgctacaaccaggagggcatagcagatgttccagcagaagatgacccttccccttgtgcgctggaaacgggccacgggcggcagtgccagaacggcacggtgtgcaagcccggctgggatggtcccaagcacggcatcaccaactttgacaactttgccttcgccatgctcacggtgttccagtgcatcaccatggagggctggacggacgtgctgtactgggtcaatgatgccgtaggaagggactggccctggatctattttgttacactaatcatcatagggtcattttttgtacttaacttggttctcggtgtgcttagcggagagttttccaaagagagggagaaggccaaggcccggggagatttccagaagctgcgggagaagcagcagctagaagaggatctcaaaggctacctggattggatcactcaggccgaagacatcgatcctgagaatgaggacgaaggcatggatgaggagaagccccgaaacatgagcatgcccaccagtgagaccgagtccgtcaacaccgaaaacgtggctggaggtgacatcgagggagaaaactgcggggccaggctggcccaccggatctccaagtcaaagttcagccgctactggcgccggtggaatcggttctgcagaaggaagtgccgcgccgcagtcaagtctaatgtcttctactggctggtgattttcctggtgttcctcaacacgctcaccattgcctctgagcactacaaccagcccaactggctcacagaagtccaagacacggcaaacaaggccctgctggccctgttcacggcagagatgctcctgaagatgtacagcctgggcctgcaggcctacttcgtgtccctcttcaaccgctttgactgcttcgtcgtgtgtggcggcatcctggagaccatcctggtggagaccaagatcatgtccccactgggcatctccgtgctcagatgcgtccggctgctgaggattttcaagatcacgaggtactggaactccttgagcaacctggtggcatccttgctgaactctgtgcgctccatcgcctccctgctccttctcctcttcctcttcatcatcatcttctccctcctggggatgcagctctttggaggaaagttcaactttgatgagatgcagacccggaggagcacattcgataacttcccccagtccctcctcactgtgtttcagatcctgaccggggaggactggaattcggtgatgtatgatgggatcatggcttatggcggcccctcttttccagggatgttagtctgtatttacttcatcatcctcttcatctgtggaaactatatcctactgaatgtgttcttggccattgctgtggacaacctggctgatgctgagagcctcacatctgcccaaaaggaggaggaagaggagaaggagagaaagaagctggccaggactgccagcccagagaagaaacaagagttggtggagaagccggcagtgggggaatccaaggaggagaagattgagctgaaatccatcacggctgacggagagtctccacccgccaccaagatcaacatggatgacctccagcccaatgaaaatgaggataagagcccctaccccaacccagaaactacaggagaagaggatgaggaggagccagagatgcctgtcggccctcgcccacgaccactctctgagcttcaccttaaggaaaaggcagtgcccatgccagaagccagcgcgtttttcatcttcagctctaacaacaggtttcgcctccagtgccaccgcattgtcaatgacacgatcttcaccaacctgatcctcttcttcattctgctcagcagcatttccctggctgctgaggacccggtccagcacacctccttcaggaaccatatcctaggcaatgcagactatgtcttcactagtatctttacattagaaattatccttaagatgactgcttatggggctttcttgcacaagggttctttctgccggaactacttcaacatcctggacctgctggtggtcagcgtgtccctcatctcctttggcatccagtccagtgcaatcaatgtcgtgaagatcttgcgagtcctgcgagtactcaggcccctgagggccatcaacagggccaaggggctaaagcatgtggttcagtgtgtgtttgtcgccatccggaccatcgggaacatcgtgattgtcaccaccctgctgcagttcatgtttgcctgcatcggggtccagctcttcaagggaaagctgtacacctgttcagacagttccaagcagacagaggcggaatgcaagggcaactacatcacgtacaaagacggggaggttgaccaccccatcatccaaccccgcagctgggagaacagcaagtttgactttgacaatgttctggcagccatgatggccctcttcaccgtctccaccttcgaagggtggccagagctgctgtaccgctccatcgactcccacacggaagacaagggccccatctacaactaccgtgtggagatctccatcttcttcatcatctacatcatcatcatcgccttcttcatgatgaacatcttcgtgggcttcgtcatcgtcacctttcaggagcagggggagcaggagtacaagaactgtgagctggacaagaaccagcgacagtgcgtggaatacgccctcaaggcccggcccctgcggaggtacatccccaagaaccagcaccagtacaaagtgtggtacgtggtcaactccacctacttcgagtacctgatgttcgtcctcatcctgctcaacaccatctgcctggccatgcagcactacggccagagctgcctgttcaaaatcgccatgaacatcctcaacatgctcttcactggcctcttcaccgtggagatgatcctgaagctcattgccttcaaacccaagggttactttagtgatccctggaatgtttttgacttcctcatcgtaattggcagcataattgacgtcattctcagtgagactaatcactatttctgtgatgcatggaatacatttgacgccttgattgttgtgggtagcattgttgatatagcaatcaccgaggtaaacaacgcagaggaaaactcccgcatctccatcaccttcttccgcctgttccgggtcatgcgtctggtgaagctgctgagccgtggggagggcatccggacgctgctgtggaccttcatcaagtccttccaggccctgccctatgtggccctcctgatcgtgatgctgttcttcatctacgcggtgatcgggatgcaggtgtttgggaaaattgccctgaatgataccacagagatcaaccggaacaacaactttcagaccttcccccaggccgtgctgctcctcttcaggtgtgccaccggggaggcctggcaggacatcatgctggcctgcatgccaggcaagaagtgtgccccagagtccgagcccagcaacagcacggagggtgaaacaccctgtggtagcagctttgctgtcttctacttcatcagcttctacatgctctgtgccttcctgatcatcaacctctttgtagctgtcatcatggacaactttgactacctgacaagggactggtccatccttggtccccaccacctggatgagtttaaaagaatctgggcagagtatgaccctgaagccaagggtcgtatcaaacacctggatgtggtgaccctcctccggcggattcagccgccactaggttttgggaagctgtgccctcaccgcgtggcttgcaaacgcctggtctccatgaacatgcctctgaacagcgacgggacagtcatgttcaatgccaccctgtttgccctggtcaggacggccctgaggatcaaaacagaagggaacctagaacaagccaatgaggagctgcgggcgatcatcaagaagatctggaagcggaccagcatgaagctgctggaccaggtggtgccccctgcaggtgatgatgaggtcaccgttggcaagttctacgccacgttcctgatccaggagtacttccggaagttcaagaagcgcaaagagcagggccttgtgggcaagccctcccagaggaacgcgctgtctctgcaggctggcttgcgcacactgcatgacatcgggcctgagatccgacgggccatctctggagatctcaccgctgaggaggagctggacaaggccatgaaggaggctgtgtccgctgcttctgaagatgacatcttcaggagggccggtggcctgttcggcaaccacgtcagctactaccaaagcgacggccggagcgccttcccccagaccttcaccactcagcgcccgctgcacatcaacaaggcgggcagcagccagggcgacactgagtcgccatcccacgagaagctggtggactccaccttcaccccgagcagctactcgtccaccggctccaacgccaacatcaacaacgccaacaacaccgccctgggtcgcctccctcgccccgccggctaccccagcacggtcagcactgtggagggccacgggccccccttgtcccctgccatccgggtgcaggaggtggcgtggaagctcagctccaacaggtgccactcccgggagagccaggcagccatggcgggtcaggaggagacgtctcaggatgagacctatgaagtgaagatgaaccatgacacggaggcctgcagtgagcccagcctgctctccacagagatgctctcctaccaggatgacgaaaatcggcaactgacgctcccagaggaggacaagagggacatccggcaatctccgaagaggggtttcctccgctctgcctcactaggtcgaagggcctccttccacctggaatgtctgaagcgacagaaggaccgagggggagacatctctcagaagacagtcctgcccttgcatctggttcatcatcaggcattggcagtggcaggcctgagccccctcctccagagaagccattcccctgcctcattccctaggccttttgccaccccaccagccacacctggcagccgaggctggcccccacagcccgtccccaccctgcggcttgagggggtcgagtccagtgagaaactcaacagcagcttcccatccatccactgcggctcctgggctgagaccacccccggtggcgggggcagcagcgccgcccggagagtccggcccgtctccctcatggtgcccagccaggctggggccccagggaggcagttccacggcagtgccagcagcctggtggaagcggtcttgatttcagaaggactggggcagtttgctcaagatcccaagttcatcgaggtcaccacccaggagctggccgacgcctgcgacatgaccatagaggagatggagagcgcggccgacaacatcctcagcgggggcgccccacagagccccaatggcgccctcttaccctttgtgaactgcagggacgcggggcaggaccgagccgggggcgaagaggacgcgggctgtgtgcgcgcgcggggtcgaccgagtgaggaggagctccaggacagcagggtctacgtcagcagcctgtagtgggcgctgccagatgcgggcttttttttatttgtttcaatgttcctaatgggttcgtttcagaagtgcctcactgttctcgtgacctggagtt

SEQ ID NO: 46948 - DNA, 6468 bp, Artificial Sequence
  derived and/or modified sequence
atggtgaacgagaacaccagaatgtacatccccgaggagaaccaccagggcagcaactacggcagccccagacccgcccacgccaacatgaacgccaacgccgccgccggcctggcccccgagcacatccccacccccggcgccgccctgagctggcaggccgccatcgacgccgccagacaggccaagctgatgggcagcgccggcaacgccaccatcagcaccgtgagcagcacccagagaaagagacagcagtacggcaagcccaagaagcagggcagcaccaccgccaccagaccccccagagccctgctgtgcctgaccctgaagaaccccatcagaagagcctgcatcagcatcgtggagtggaagcccttcgagatcatcatcctgctgaccatcttcgccaactgcgtggccctggccatctacatccccttccccgaggacgacagcaacgccaccaacagcaacctggagagagtggagtacctgttcctgatcatcttcaccgtggaggccttcctgaaggtgatcgcctacggcctgctgttccaccccaacgcctacctgagaaacggctggaacctgctggacttcatcatcgtggtggtgggcctgttcagcgccatcctggagcaggccaccaaggccgacggcgccaacgccctgggcggcaagggcgccggcttcgacgtgaaggccctgagagccttcagagtgctgagacccctgagactggtgagcggcgtgcccagcctgcaggtggtgctgaacagcatcatcaaggccatggtgcccctgctgcacatcgccctgctggtgctgttcgtgatcatcatctacgccatcatcggcctggagctgttcatgggcaagatgcacaagacctgctacaaccaggagggcatcgccgacgtgcccgccgaggacgaccccagcccctgcgccctggagaccggccacggcagacagtgccagaacggcaccgtgtgcaagcccggctgggacggccccaagcacggcatcaccaacttcgacaacttcgccttcgccatgctgaccgtgttccagtgcatcaccatggagggctggaccgacgtgctgtactgggtgaacgacgccgtgggcagagactggccctggatctacttcgtgaccctgatcatcatcggcagcttcttcgtgctgaacctggtgctgggcgtgctgagcggcgagttcagcaaggagagagagaaggccaaggccagaggcgacttccagaagctgagagagaagcagcagctggaggaggacctgaagggctacctggactggatcacccaggccgaggacatcgaccccgagaacgaggacgagggcatggacgaggagaagcccagaaacatgagcatgcccaccagcgagaccgagagcgtgaacaccgagaacgtggccggcggcgacatcgagggcgagaactgcggcgccagactggcccacagaatcagcaagagcaagttcagcagatactggagaagatggaacagattctgcagaagaaagtgcagagccgccgtgaagagcaacgtgttctactggctggtgatcttcctggtgttcctgaacaccctgaccatcgccagcgagcactacaaccagcccaactggctgaccgaggtgcaggacaccgccaacaaggccctgctggccctgttcaccgccgagatgctgctgaagatgtacagcctgggcctgcaggcctacttcgtgagcctgttcaacagattcgactgcttcgtggtgtgcggcggcatcctggagaccatcctggtggagaccaagatcatgagccccctgggcatcagcgtgctgagatgcgtgagactgctgagaatcttcaagatcaccagatactggaacagcctgagcaacctggtggccagcctgctgaacagcgtgagaagcatcgccagcctgctgctgctgctgttcctgttcatcatcatcttcagcctgctgggcatgcagctgttcggcggcaagttcaacttcgacgagatgcagaccagaagaagcaccttcgacaacttcccccagagcctgctgaccgtgttccagatcctgaccggcgaggactggaacagcgtgatgtacgacggcatcatggcctacggcggccccagcttccccggcatgctggtgtgcatctacttcatcatcctgttcatctgcggcaactacatcctgctgaacgtgttcctggccatcgccgtggacaacctggccgacgccgagagcctgaccagcgcccagaaggaggaggaggaggagaaggagagaaagaagctggccagaaccgccagccccgagaagaagcaggagctggtggagaagcccgccgtgggcgagagcaaggaggagaagatcgagctgaagagcatcaccgccgacggcgagagcccccccgccaccaagatcaacatggacgacctgcagcccaacgagaacgaggacaagagcccctaccccaaccccgagaccaccggcgaggaggacgaggaggagcccgagatgcccgtgggccccagacccagacccctgagcgagctgcacctgaaggagaaggccgtgcccatgcccgaggccagcgccttcttcatcttcagcagcaacaacagattcagactgcagtgccacagaatcgtgaacgacaccatcttcaccaacctgatcctgttcttcatcctgctgagcagcatcagcctggccgccgaggaccccgtgcagcacaccagcttcagaaaccacatcctgggcaacgccgactacgtgttcaccagcatcttcaccctggagatcatcctgaagatgaccgcctacggcgccttcctgcacaagggcagcttctgcagaaactacttcaacatcctggacctgctggtggtgagcgtgagcctgatcagcttcggcatccagagcagcgccatcaacgtggtgaagatcctgagagtgctgagagtgctgagacccctgagagccatcaacagagccaagggcctgaagcacgtggtgcagtgcgtgttcgtggccatcagaaccatcggcaacatcgtgatcgtgaccaccctgctgcagttcatgttcgcctgcatcggcgtgcagctgttcaagggcaagctgtacacctgcagcgacagcagcaagcagaccgaggccgagtgcaagggcaactacatcacctacaaggacggcgaggtggaccaccccatcatccagcccagaagctgggagaacagcaagttcgacttcgacaacgtgctggccgccatgatggccctgttcaccgtgagcaccttcgagggctggcccgagctgctgtacagaagcatcgacagccacaccgaggacaagggccccatctacaactacagagtggagatcagcatcttcttcatcatctacatcatcatcatcgccttcttcatgatgaacatcttcgtgggcttcgtgatcgtgaccttccaggagcagggcgagcaggagtacaagaactgcgagctggacaagaaccagagacagtgcgtggagtacgccctgaaggccagacccctgagaagatacatccccaagaaccagcaccagtacaaggtgtggtacgtggtgaacagcacctacttcgagtacctgatgttcgtgctgatcctgctgaacaccatctgcctggccatgcagcactacggccagagctgcctgttcaagatcgccatgaacatcctgaacatgctgttcaccggcctgttcaccgtggagatgatcctgaagctgatcgccttcaagcccaagggctacttcagcgacccctggaacgtgttcgacttcctgatcgtgatcggcagcatcatcgacgtgatcctgagcgagaccaaccactacttctgcgacgcctggaacaccttcgacgccctgatcgtggtgggcagcatcgtggacatcgccatcaccgaggtgaacaacgccgaggagaacagcagaatcagcatcaccttcttcagactgttcagagtgatgagactggtgaagctgctgagcagaggcgagggcatcagaaccctgctgtggaccttcatcaagagcttccaggccctgccctacgtggccctgctgatcgtgatgctgttcttcatctacgccgtgatcggcatgcaggtgttcggcaagatcgccctgaacgacaccaccgagatcaacagaaacaacaacttccagaccttcccccaggccgtgctgctgctgttcagatgcgccaccggcgaggcctggcaggacatcatgctggcctgcatgcccggcaagaagtgcgcccccgagagcgagcccagcaacagcaccgagggcgagaccccctgcggcagcagcttcgccgtgttctacttcatcagcttctacatgctgtgcgccttcctgatcatcaacctgttcgtggccgtgatcatggacaacttcgactacctgaccagagactggagcatcctgggcccccaccacctggacgagttcaagagaatctgggccgagtacgaccccgaggccaagggcagaatcaagcacctggacgtggtgaccctgctgagaagaatccagccccccctgggcttcggcaagctgtgcccccacagagtggcctgcaagagactggtgagcatgaacatgcccctgaacagcgacggcaccgtgatgttcaacgccaccctgttcgccctggtgagaaccgccctgagaatcaagaccgagggcaacctggagcaggccaacgaggagctgagagccatcatcaagaagatctggaagagaaccagcatgaagctgctggaccaggtggtgccccccgccggcgacgacgaggtgaccgtgggcaagttctacgccaccttcctgatccaggagtacttcagaaagttcaagaagagaaaggagcagggcctggtgggcaagcccagccagagaaacgccctgagcctgcaggccggcctgagaaccctgcacgacatcggccccgagatcagaagagccatcagcggcgacctgaccgccgaggaggagctggacaaggccatgaaggaggccgtgagcgccgccagcgaggacgacatcttcagaagagccggcggcctgttcggcaaccacgtgagctactaccagagcgacggcagaagcgccttcccccagaccttcaccacccagagacccctgcacatcaacaaggccggcagcagccagggcgacaccgagagccccagccacgagaagctggtggacagcaccttcacccccagcagctacagcagcaccggcagcaacgccaacatcaacaacgccaacaacaccgccctgggcagactgcccagacccgccggctaccccagcaccgtgagcaccgtggagggccacggcccccccctgagccccgccatcagagtgcaggaggtggcctggaagctgagcagcaacagatgccacagcagagagagccaggccgccatggccggccaggaggagaccagccaggacgagacctacgaggtgaagatgaaccacgacaccgaggcctgcagcgagcccagcctgctgagcaccgagatgctgagctaccaggacgacgagaacagacagctgaccctgcccgaggaggacaagagagacatcagacagagccccaagagaggcttcctgagaagcgccagcctgggcagaagagccagcttccacctggagtgcctgaagagacagaaggacagaggcggcgacatcagccagaagaccgtgctgcccctgcacctggtgcaccaccaggccctggccgtggccggcctgagccccctgctgcagagaagccacagccccgccagcttccccagacccttcgccaccccccccgccacccccggcagcagaggctggcccccccagcccgtgcccaccctgagactggagggcgtggagagcagcgagaagctgaacagcagcttccccagcatccactgcggcagctgggccgagaccacccccggcggcggcggcagcagcgccgccagaagagtgagacccgtgagcctgatggtgcccagccaggccggcgcccccggcagacagttccacggcagcgccagcagcctggtggaggccgtgctgatcagcgagggcctgggccagttcgcccaggaccccaagttcatcgaggtgaccacccaggagctggccgacgcctgcgacatgaccatcgaggagatggagagcgccgccgacaacatcctgagcggcggcgccccccagagccccaacggcgccctgctgcccttcgtgaactgcagagacgccggccaggacagagccggcggcgaggaggacgccggctgcgtgagagccagaggcagacccagcgaggaggagctgcaggacagcagagtgtacgtgagcagcctgtag

SEQ ID NO: 46949 - protein, 2146 aa, Artificial Sequence
  derived and/or modified sequence
MVNENTRMYIPEENHQGSNYGSPRPAHANMNANAAAGLAPEHIPTPGAALSWQAAIDAARQAKLMGSAGNATISTVSSTQRKRQQYGKPKKQGSTTATRPPRALLCLTLKNPIRRACISIVEWKPFEIIILLTIFANCVALAIYIPFPEDDSNATNSNLERVEYLFLIIFTVEAFLKVIAYGLLFHPNAYLRNGWNLLDFIIVVVGLFSAILEQATKADGANALGGKGAGFDVKALRAFRVLRPLRLVSGVPSLQVVLNSIIKAMVPLLHIALLVLFVIIIYAIIGLELFMGKMHKTCYNQEGIADVPAEDDPSPCALETGHGRQCQNGTVCKPGWDGPKHGITNFDNFAFAMLTVFQCITMEGWTDVLYWVNDAVGRDWPWIYFVTLIIIGSFFVLNLVLGVLSGEFSKEREKAKARGDFQKLREKQQLEEDLKGYLDWITQAEDIDPENEDEGMDEEKPRNMSMPTSETESVNTENVAGGDIEGENCGARLAHRISKSKFSRYWRRWNRFCRRKCRAAVKSNVFYWLVIFLVFLNTLTIASEHYNQPNWLTEVQDTANKALLALFTAEMLLKMYSLGLQAYFVSLFNRFDCFVVCGGILETILVETKIMSPLGISVLRCVRLLRIFKITRYWNSLSNLVASLLNSVRSIASLLLLLFLFIIIFSLLGMQLFGGKFNFDEMQTRRSTFDNFPQSLLTVFQILTGEDWNSVMYDGIMAYGGPSFPGMLVCIYFIILFICGNYILLNVFLAIAVDNLADAESLTSAQKEEEEEKERKKLARTASPEKKQELVEKPAVGESKEEKIELKSITADGESPPATKINMDDLQPNENEDKSPYPNPETTGEEDEEEPEMPVGPRPRPLSELHLKEKAVPMPEASAFFIFSSNNRFRLQCHRIVNDTIFTNLILFFILLSSISLAAEDPVQHTSFRNHILFYFDIVFTTIFTIEIALKMTAYGAFLHKGSFCRNYFNILDLLVVSVSLISFGIQSSAINVVKILRVLRVLRPLRAINRAKGLKHVVQCVFVAIRTIGNIVIVTTLLQFMFACIGVQLFKGKLYTCSDSSKQTEAECKGNYITYKDGEVDHPIIQPRSWENSKFDFDNVLAAMMALFTVSTFEGWPELLYRSIDSHTEDKGPIYNYRVEISIFFIIYIIIIAFFMMNIFVGFVIVTFQEQGEQEYKNCELDKNQRQCVEYALKARPLRRYIPKNQHQYKVWYVVNSTYFEYLMFVLILLNTICLAMQHYGQSCLFKIAMNILNMLFTGLFTVEMILKLIAFKPKHYFCDAWNTFDALIVVGSIVDIAITEVNNAEENSRISITFFRLFRVMRLVKLLSRGEGIRTLLWTFIKSFQALPYVALLIVMLFFIYAVIGMQVFGKIALNDTTEINRNNNFQTFPQAVLLLFRCATGEAWQDIMLACMPGKKCAPESEPSNSTEGETPCGSSFAVFYFISFYMLCAFLIINLFVAVIMDNFDYLTRDWSILGPHHLDEFKRIWAEYDPEAKGRIKHLDVVTLLRRIQPPLGFGKLCPHRVACKRLVSMNMPLNSDGTVMFNATLFALVRTALRIKTEEGPSPSEAHQGAEDPFRPAGNLEQANEELRAIIKKIWKRTSMKLLDQVVPPAGDDEVTVGKFYATFLIQEYFRKFKKRKEQGLVGKPSQRNALSLQAGLRTLHDIGPEIRRAISGDLTAEEELDKAMKEAVSAASEDDIFRRAGGLFGNHVSYYQSDGRSAFPQTFTTQRPLHINKAGSSQGDTESPSHEKLVDSTFTPSSYSSTGSNANINNANNTALGRLPRPAGYPSTVSTVEGHGPPLSPAIRVQEVAWKLSSNRCHSRESQAAMAGQEETSQDETYEVKMNHDTEACSEPSLLSTEMLSYQDDENRQLTLPEEDKRDIRQSPKRGFLRSASLGRRASFHLECLKRQKDRGGDISQKTVLPLHLVHHQALAVAGLSPLLQRSHSPASFPRPFATPPATPGSRGWPPQPVPTLRLEGVESSEKLNSSFPSIHCGSWAETTPGGGGSSAARRVRPVSLMVPSQAGAPGRQFHGSASSLVEAVLISEGLGQFAQDPKFIEVTTQELADACDMTIEEMESAADNILSGGAPQSPNGALLPFVNCRDAGQDRAGGEEDAGCVRARGRPSEEELQDSRVYVSSL

SEQ ID NO: 46950 - DNA, 13504 bp, Artificial Sequence
  derived and/or modified sequence
ttattttttcaaatggtgtagccgccggaggtgcggtgctcagttcttggaaggggcccggatgtactgaggatgcgttacagtttcactcgaggaggcagtagtggaaaggagcagtttttggggtttgatgccataatgggaatcaggtaatcgtcggcggggaagaagaaacgctgcagaccacggcttcctcgaatcttgcgcgaaagccgccggcctcggaggagggattaatccagacccgccggggggtgttttcacatttcttcctcttcgtggctgctcctcctattaaaaccatttttggtccatggtcaatgagaatacgaggatgtacattccagaggaaaaccaccaaggttccaactatgggagcccacgccccgcccatgccaacatgaatgccaatgcggcagcggggctggcccctgagcacatccccaccccgggggctgccctgtcgtggcaggcggccatcgacgcagcccggcaggctaagctgatgggcagcgctggcaatgcgaccatctccacagtcagctccacgcagcggaagcggcagcaatatgggaaacccaagaagcagggcagcaccacggccacacgcccgccccgagccctgctctgcctgaccctgaagaaccccatccggagggcctgcatcagcattgtcgaatggaaaccatttgaaataattattttactgactatttttgccaattgtgtggccttagcgatctatattccctttccagaagatgattccaacgccaccaattccaacctggaacgagtggaatatctctttctcataatttttacggtggaagcgtttttaaaagtaatcgcctatggactcctctttcaccccaatgcctacctccgcaacggctggaacctactagattttataattgtggttgtggggctttttagtgcaattttagaacaagcaaccaaagcagatggggcaaacgctctcggagggaaaggggccggatttgatgtgaaggcgctgagggccttccgcgtgctgcgccccctgcggctggtgtccggagtcccaagtctccaggtggtcctgaattccatcatcaaggccatggtccccctgctgcacatcgccctgcttgtgctgtttgtcatcatcatctacgccatcatcggcttggagctcttcatggggaagatgcacaagacctgctacaaccaggagggcatagcagatgttccagcagaagatgacccttccccttgtgcgctggaaacgggccacgggcggcagtgccagaacggcacggtgtgcaagcccggctgggatggtcccaagcacggcatcaccaactttgacaactttgccttcgccatgctcacggtgttccagtgcatcaccatggagggctggacggacgtgctgtactgggtcaatgatgccgtaggaagggactggccctggatctattttgttacactaatcatcatagggtcattttttgtacttaacttggttctcggtgtgcttagcggagagttttccaaagagagggagaaggccaaggcccggggagatttccagaagctgcgggagaagcagcagctagaagaggatctcaaaggctacctggattggatcactcaggccgaagacatcgatcctgagaatgaggacgaaggcatggatgaggagaagccccgaaacatgagcatgcccaccagtgagaccgagtccgtcaacaccgaaaacgtggctggaggtgacatcgagggagaaaactgcggggccaggctggcccaccggatctccaagtcaaagttcagccgctactggcgccggtggaatcggttctgcagaaggaagtgccgcgccgcagtcaagtctaatgtcttctactggctggtgattttcctggtgttcctcaacacgctcaccattgcctctgagcactacaaccagcccaactggctcacagaagtccaagacacggcaaacaaggccctgctggccctgttcacggcagagatgctcctgaagatgtacagcctgggcctgcaggcctacttcgtgtccctcttcaaccgctttgactgcttcgtcgtgtgtggcggcatcctggagaccatcctggtggagaccaagatcatgtccccactgggcatctccgtgctcagatgcgtccggctgctgaggattttcaagatcacgaggtactggaactccttgagcaacctggtggcatccttgctgaactctgtgcgctccatcgcctccctgctccttctcctcttcctcttcatcatcatcttctccctcctggggatgcagctctttggaggaaagttcaactttgatgagatgcagacccggaggagcacattcgataacttcccccagtccctcctcactgtgtttcagatcctgaccggggaggactggaattcggtgatgtatgatgggatcatggcttatggcggcccctcttttccagggatgttagtctgtatttacttcatcatcctcttcatctgtggaaactatatcctactgaatgtgttcttggccattgctgtggacaacctggctgatgctgagagcctcacatctgcccaaaaggaggaggaagaggagaaggagagaaagaagctggccaggactgccagcccagagaagaaacaagagttggtggagaagccggcagtgggggaatccaaggaggagaagattgagctgaaatccatcacggctgacggagagtctccacccgccaccaagatcaacatggatgacctccagcccaatgaaaatgaggataagagcccctaccccaacccagaaactacaggagaagaggatgaggaggagccagagatgcctgtcggccctcgcccacgaccactctctgagcttcaccttaaggaaaaggcagtgcccatgccagaagccagcgcgtttttcatcttcagctctaacaacaggtttcgcctccagtgccaccgcattgtcaatgacacgatcttcaccaacctgatcctcttcttcattctgctcagcagcatttccctggctgctgaggacccggtccagcacacctccttcaggaaccatattctgttttattttgatattgtttttaccaccattttcaccattgaaattgctctgaagatgactgcttatggggctttcttgcacaagggttctttctgccggaactacttcaacatcctggacctgctggtggtcagcgtgtccctcatctcctttggcatccagtccagtgcaatcaatgtcgtgaagatcttgcgagtcctgcgagtactcaggcccctgagggccatcaacagggccaaggggctaaagcatgtggttcagtgtgtgtttgtcgccatccggaccatcgggaacatcgtgattgtcaccaccctgctgcagttcatgtttgcctgcatcggggtccagctcttcaagggaaagctgtacacctgttcagacagttccaagcagacagaggcggaatgcaagggcaactacatcacgtacaaagacggggaggttgaccaccccatcatccaaccccgcagctgggagaacagcaagtttgactttgacaatgttctggcagccatgatggccctcttcaccgtctccaccttcgaagggtggccagagctgctgtaccgctccatcgactcccacacggaagacaagggccccatctacaactaccgtgtggagatctccatcttcttcatcatctacatcatcatcatcgccttcttcatgatgaacatcttcgtgggcttcgtcatcgtcacctttcaggagcagggggagcaggagtacaagaactgtgagctggacaagaaccagcgacagtgcgtggaatacgccctcaaggcccggcccctgcggaggtacatccccaagaaccagcaccagtacaaagtgtggtacgtggtcaactccacctacttcgagtacctgatgttcgtcctcatcctgctcaacaccatctgcctggccatgcagcactacggccagagctgcctgttcaaaatcgccatgaacatcctcaacatgctcttcactggcctcttcaccgtggagatgatcctgaagctcattgccttcaaacccaagcactatttctgtgatgcatggaatacatttgacgccttgattgttgtgggtagcattgttgatatagcaatcaccgaggtaaacaacgcagaggaaaactcccgcatctccatcaccttcttccgcctgttccgggtcatgcgtctggtgaagctgctgagccgtggggagggcatccggacgctgctgtggaccttcatcaagtccttccaggccctgccctatgtggccctcctgatcgtgatgctgttcttcatctacgcggtgatcgggatgcaggtgtttgggaaaattgccctgaatgataccacagagatcaaccggaacaacaactttcagaccttcccccaggccgtgctgctcctcttcaggtgtgccaccggggaggcctggcaggacatcatgctggcctgcatgccaggcaagaagtgtgccccagagtccgagcccagcaacagcacggagggtgaaacaccctgtggtagcagctttgctgtcttctacttcatcagcttctacatgctctgtgccttcctgatcatcaacctctttgtagctgtcatcatggacaactttgactacctgacaagggactggtccatccttggtccccaccacctggatgagtttaaaagaatctgggcagagtatgaccctgaagccaagggtcgtatcaaacacctggatgtggtgaccctcctccggcggattcagccgccactaggttttgggaagctgtgccctcaccgcgtggcttgcaaacgcctggtctccatgaacatgcctctgaacagcgacgggacagtcatgttcaatgccaccctgtttgccctggtcaggacggccctgaggatcaaaacagaagagggacccagcccatcagaggcccaccaaggggctgaggatcctttccgccctgcagggaacctagaacaagccaatgaggagctgcgggcgatcatcaagaagatctggaagcggaccagcatgaagctgctggaccaggtggtgccccctgcaggtgatgatgaggtcaccgttggcaagttctacgccacgttcctgatccaggagtacttccggaagttcaagaagcgcaaagagcagggccttgtgggcaagccctcccagaggaacgcgctgtctctgcaggctggcttgcgcacactgcatgacatcgggcctgagatccgacgggccatctctggagatctcaccgctgaggaggagctggacaaggccatgaaggaggctgtgtccgctgcttctgaagatgacatcttcaggagggccggtggcctgttcggcaaccacgtcagctactaccaaagcgacggccggagcgccttcccccagaccttcaccactcagcgcccgctgcacatcaacaaggcgggcagcagccagggcgacactgagtcgccatcccacgagaagctggtggactccaccttcaccccgagcagctactcgtccaccggctccaacgccaacatcaacaacgccaacaacaccgccctgggtcgcctccctcgccccgccggctaccccagcacggtcagcactgtggagggccacgggccccccttgtcccctgccatccgggtgcaggaggtggcgtggaagctcagctccaacaggtgccactcccgggagagccaggcagccatggcgggtcaggaggagacgtctcaggatgagacctatgaagtgaagatgaaccatgacacggaggcctgcagtgagcccagcctgctctccacagagatgctctcctaccaggatgacgaaaatcggcaactgacgctcccagaggaggacaagagggacatccggcaatctccgaagaggggtttcctccgctctgcctcactaggtcgaagggcctccttccacctggaatgtctgaagcgacagaaggaccgagggggagacatctctcagaagacagtcctgcccttgcatctggttcatcatcaggcattggcagtggcaggcctgagccccctcctccagagaagccattcccctgcctcattccctaggccttttgccaccccaccagccacacctggcagccgaggctggcccccacagcccgtccccaccctgcggcttgagggggtcgagtccagtgagaaactcaacagcagcttcccatccatccactgcggctcctgggctgagaccacccccggtggcgggggcagcagcgccgcccggagagtccggcccgtctccctcatggtgcccagccaggctggggccccagggaggcagttccacggcagtgccagcagcctggtggaagcggtcttgatttcagaaggactggggcagtttgctcaagatcccaagttcatcgaggtcaccacccaggagctggccgacgcctgcgacatgaccatagaggagatggagagcgcggccgacaacatcctcagcgggggcgccccacagagccccaatggcgccctcttaccctttgtgaactgcagggacgcggggcaggaccgagccgggggcgaagaggacgcgggctgtgtgcgcgcgcggggtcgaccgagtgaggaggagctccaggacagcagggtctacgtcagcagcctgtagtgggcgctgccagatgcgggcttttttttatttgtttcaatgttcctaatgggttcgtttcagaagtgcctcactgttctcgtgacctggagttaaccggaacagcgtcttcattcatttctgttgggaccagacgcggagcctgggtgcgcgagccgccctccgggaggaaggcgcccggctgcgtctgcagaggcggggagaggaggcggcgagggtcccggggcgcgaggaaggcgcctgccctctcccagctcgcaggccccgggcccggccgcgcctccgcggggagagcaccccggcttcccgcgcgccctcaccaaaaggaccctacagcaaacgggtgtctttcgactctgcttgtagaaaccatttgcacatattctgtacgagcctcgctgtctccctagagccagggccctgcggatttggagaagggagcggggcaggacttccaggaggaccccaacccggcccggagagggaggaggaggcctccaggggcgcggagctctggggatgggcgtcgggccggcagtggtgcggctcactccgtccctgcccacctgcgacgggatcccccgaccggcacgggccacgccgagctcccggccagccgccggcccgcaggcagcgcgagggaggagctgcgccgccggctccgcccaaccaggtggtgctgagcttccgctgagcgctcttttgttttgtggtttgacacttttcttgacagcatgttgcagtttcttttcggttttggttttttttaaatgttttattttgctttcccagcgggaggggaggaagaagagtgtttacaaagtcctgtagccccctcacctttctgttttcacttttgccaatgtacatcgggtttggttttcttgtattatttaaacggttgtggtttcctttttccacggaggttcaatagaagccgctgcaggagagttttaccaaccattgtgtatgcccaataatttgttatcatttccttaggtagtaacctatttttgttctggtttggttcggttatctaatggaaaggtaactggcaatgcacttgatgtggtcttgcacatgtgggtgatagagttgggttcctttttatgctgggtgtacaggtgggtttgggagagaggagcatgcgcgagagagtctccgagtgtgtgcgacgcgtgtgtgtgtggtgggttgtctgtgtgcatatgtcctgcccgtgtatatgcacccacaccatgtgcccgtgcacaccagtgactacgcagtcccccctttctggtttagctgtgggaagatctgaatctggggccgtttgaaagcaaaaacaaaccactgtctctgcttctgaaacgggaatcagtaactctttgcattttctgtcccacaagatatgcaaaaacaatgcaataatattcatttaaaaatacaattgtgagttgtgttggcattaaaactgtattttaaaaaaagacagaaatttaagggaaaaacacaagaaggcattttgcttcaatatattccgtgtaatgttttattgcattgataatgtttctgttgaagaaaccgttatacttgaattcaggtcagtttcagtatttttcaaatatttttttaaaactgaattgcaattgtgccaagcgaatataatgaattgaattaagttggttttcggattcacttcttgtatattttgctgcatgtaaagtaaatcattttgtatttggagtgtgacaagctttacctttgaactcaagtgcttttctatatgtggttgggggaaagggaacaagttttctttagtttgcacaatgagcaaaggtatcaccagtgtagtcattattctgctctccacaaacaggtttggacattactgttttgcatatcttgtgtttgcttacatttccctcaatttttccaaaatcgtttgctgggtatgtttgtaccgcctcttgctgtgagagaccaggacctattttattccagtcttcactctgtccactctgctctggtcatctgatttggtacttctccaagaacagcccttcactgtgaggtgcagggaggcgttctgatgagccctcagtcactgggccgtcatccgcatcccccatggaagaggtagctggctttcccttcccttccaccacacggaattttctctttggcttccttaggaaagtgtacactaaccgggaggataaaattaaagtcaggctgcttggagggaggggcatcctcacttccggattcttgttgctctacccaacaaggacagcaggggctcgagaaaggaactggtgaaaccctgatccatctgaaagtcaactctgcgtgctcctttctccatcccttcctcactctggagcagcctttccttcaggcttgccctaatgtttgggctgccggggagggggccaggacaagggaagaggcatccggagctcacagtgggggtgggaacagatttttgtgggggcatctctaatgctcacttatatctccctagaacatcactcttttggtgctgtgtccttcaaatgtatgtcaacagtggtggctgaaaagggactgctttggggaaaacaggacccaaccattcacccagaattgacccattaaatctcttccagtcctagtgttccctgagcccctcttggcacatatataagtaagctagaaattacaataagggacagtccattcctctatgacagcttgctggactgattcatgacaaagtggagaaatgtactcaatactccccggttaacacagtctagaaacagagtttctttatggatatccacacccaagtcatccaaactttcttgattccttttcactgccatcaaggtcctctagaaattgagtttaggtatcatcctttgaaaagttcccaagatttctaccaggaggtacacacaggcgttccctgtctagggcaggaggactatcctagcttgaccttctgatccactagaataagactggcgtatgatgcctgtcatcagaacagactggcacaagtagtgacatcaatgaaccacagcacaatcttccaagtgatgtctactctccacctaaaatggaattttccccatgaccttgtaaaacataattgtcacatcttccatacccctcctgacagcccccaagtgtcaggagaaaacagtcaggggctaagggcccaagggacttgaagaaacaacagtttaaggtctgcagtttggtcaacttaattcttgtcctccgaccagccctgcctctttcatttccagaccttggagaatttttcccagctttgattcagaaggtactagttataacccctttccttcttcttaatccaataggcctcactctcactgggaaatccactcaaaggaacaaggcaatgtctctcattctatttcccagttccaaattccaggtgcttgtctggagtgaagctacccgttactttctcccagcttttctccacccagcatgtctcctgcccatgcagctgaagacagtggggcaacctcaggagaagcagacctttccatgcccaagttcatctcctgagcaacagtgacacctagaaaatgaggactttggaagtcacccaaaagatggtggctactttatggagtcctgaagatacacagccaccactcctaaaggcaaagaaagaaaacacgaatgtaggtcagggatagagtggaaccctggtcatcggggtttttagcctcatcgtgggaaaggtggtaaaggaggatgatggcatctccatccctagaggccaagaattgaaatatcattgtcaaggattagaaacaattcagcaaagaggccacaaaaagggcctgctgactcccagaagacctctttaaaccccaggggaggcaaatacttgctgatggagtctgggccgtttccatattttaaagaagacctgcctctggggcaaatgtcagcacagagaggactgggaggagaatggaggcaagaaaagggcatattttgactccctctgtgcctcttcccagttcatggaaggatgtgttcagcttacccacccacagtgaccagtgtggtggagccgctgacatctcaaggatctatttgggaaggtgagaagagtactcattccatctgggggtgttgttccagccacatcagcctacctggtgggatgtgggggtgtctgccaccctgtcccccctctgctgatgtccctcccctcaggctgtccaggtgccacctgacacaggctgctgtgcaaagacaggcggggaagcccaaacctcactcccagggaggccctcagccgccagagtccaggttctccagaggctacgatttgaggaggttgagggggaagacaggagggaaagaaaagtcctacaactgtcaggaatggggcacctttccctgtccctaagcaaagctccctcttcccactgccctccccagccccagctccctgtcctccccaacacctagtgagaaagacggtgcgtggaagggagtcccatgggcagatgcttacacgacctctttgtgaagcctcttctgggtttaacttcattcatcaatttattcttatgtcaaagcaatgaaacttttctttctggagccagataccaatacaacaggtgaacgggtttctgccacatctctacattgacgggggatgcttgaacaacccccctcactacacagacacacaccgttaaggcacaagggctggggttgagctctagatgagggactttcctgctcctgcaagggtgagcactgtatacacagacaaggagggtgcagtagagtgactcccttggatggaagtagtaccatcagaacctactattattatgacataaattctatttacatacattgagagaatactacaatcaacactttttcctgggatgactttaagaggtttgagccacagcacctgaagtggcaaagatccatggtctttgtagggtattagagaactcttccagtcacctctgaaagcactctagatcttgcagctgagtggatgaagtgtaacaaatctgttgcacgctgagaggagtcagaattagcatttttcatgaaagttccccacgtctctactaagaatgaggaagaaaagactaagactaggtaattacacagaggcttgaaatgttacatcaccagagccaagtcctctcccttcagatcagttactggctgctacacagggacacccccaccttttcagggcatcccatgcactccacttctcaggatctaaggaatttgactttgtagggatcccagaaagggcactgtgccacttcccctggtgtgaatcagacatacattgtacattcatttctaaaattcactcatgcacctcaaaccaaggtcattatccaaaaaaaaaaaaaaaaagctctgggtggaagagtttgtaagttttaagagagggtcatttctatgtgaggaaatgcagaaatggacagaatgattcttattcactgtttgggtctggagaattcccattgtggaaatcttagagatctcaagtttattaccaagggaataaggaaaaaaaggtgagcaggcaccaggccaagcagtggctcccttgccaaggaacctgaggctgcaggtttcagggacccccttgaagaaacctctcctggccattggccaggagaaaagagaagtctctcctgtagagtcacaagagaagcaaaagagggtgggtcactgggtcctggacatagcccccaaccccaagacttcccaatatggagaaactacaccaatgtttaaaaggggaaaaggaaagaacttgtacatcaagggaagatgatttgtaaacacacagtcctgtgcagaaagatccccttcaggaggtgtctccagcatcccaaagctgtgcgcaccttctcttttcctgcctcaggccacctatgcatccagctgcagcccatacccacacctgaaatccatctcttgaatcccagccaggttatataccaccccattgccatgtcctgtcctggccagaatgcatgctgttcccccaagcctcgtgggagtgaggccatgggaaacagagatgagcatgtctggacaagtctgtgatggtagtggatgagaataacccatggcaaaacacgcacattcattaagaaatagggcgacagattccccgttggtgaagcactgaaaggtctattactctcataatattgctgttttattttaatccaccagagctaccatgcaaaactttcctcctgtgaaacgctccagataaagctcctctaatctccccttccctcatgtcctccagctcaaacccaccttcatcccccaaaccaatctgtatcatgcctgttatcagagaggcacagaaagatgggcagtgcctccgttgtcaccattccccacacccctacacacccccacaccctcccctccaggctccacgacttcacagtcttactgttgtaaatatcattgtacagtttgtaatcctcaaataatcccattgtcagaggcctcgcctgatgggccttctcaccctcgagaaaggccagggaatctagaaggggcaacccttcaaggagagcttcagggtcatctctgtgtgagacactattgtatattcctgtaagattgcatttttatctaaggaatgatgttatttaaaaaacaaacaaaaaacacaaaaaataagaattgcaaataaatttcttaacaatgtct

SEQ ID NO: 46951 - DNA, 6441 bp, Artificial Sequence
  derived and/or modified sequence
atggttaatgagaatacacgcatgtacattcccgaagagaatcatcagggaagcaattacgggagcccgcgcccggctcacgctaatatgaatgcaaatgccgccgcaggcctggcgcccgaacatattccaactccaggcgctgctctctcttggcaggccgccattgatgctgctcgccaggccaaactgatgggcagtgcagggaacgcaactatctctactgtgagttcaacccagaggaagcgacagcagtatggcaagccaaaaaagcaaggctcaaccaccgctactcggccaccacgcgcgctgttgtgcctcacactaaagaatcccatacgccgagcttgcatatccatagtcgagtggaaaccgttcgaaatcatcatcctcctcacaatatttgccaactgtgtggcgttggctatctacataccctttccagaggacgacagcaatgccaccaattcgaatctcgagcgcgtggagtatctgttcctgatcatctttaccgttgaagcgttccttaaagtcatcgcatatggccttctcttccaccccaacgcctacttgcggaacggatggaatctgctggactttattatagtagtggtgggcctctttagcgccatcttggagcaggcaacaaaagccgatggggctaacgcacttggcggcaaaggggctgggtttgacgtgaaggccctgcgagcctttagagtgcttaggccacttagactggtcagcggggtgccctcattacaggtggtactgaattccatcattaaggcgatggttcctctgcttcacattgctctgctggtcctttttgtgatcatcatctatgccattattggccttgagctctttatgggaaagatgcataagacctgttataatcaggagggaatcgcagacgtgcccgctgaggatgatccgtccccatgtgctctagaaaccgggcacggtagacagtgccagaacgggacggtgtgcaagccgggttgggacggcccgaaacacgggattacgaatttcgataatttcgctttcgcaatgctaaccgtattccagtgcatcactatggagggctggactgacgtgctatactgggtgaacgatgctgtgggccgcgactggccctggatctactttgtaaccctcattatcatcggatccttcttcgtgctgaacctcgtactcggcgtgttgtccggggagttttctaaggagcgtgagaaagcgaaagccaggggcgacttccaaaaactccgagagaagcaacagctcgaggaagatttgaaaggatatctcgactggatcactcaggccgaggacatagaccccgagaacgaggacgaggggatggacgaagagaaaccgcgcaacatgagcatgcccacgtcggagactgaatcagtgaacaccgagaatgttgccggtggggatatagagggagaaaactgcggcgcacgtctcgcacacagaattagcaagagcaaattctcaaggtactggcgcaggtggaacaggttctgtcgcaggaagtgccgggcagccgtaaagtccaatgtgttttactggctagtcatcttcctggtgtttcttaacaccctcacaatcgctagcgagcattataaccagccaaactggctgactgaagttcaggatactgccaataaagctctgctcgctctattcactgcggaaatgctgctgaagatgtattcccttggccttcaggcctactttgtatcactgtttaaccggtttgactgcttcgtcgtttgcggaggtatcctggaaactatactggtggagactaaaatcatgtctcccttgggaatttctgtcctgagatgcgtcaggctgctgcgtatctttaagataacaagatattggaactcactctctaacctggtggccagcctgcttaattcggtacggagcatcgcctcattgctcttgctgctcttcttatttataatcatcttctcactccttggtatgcagctctttgggggcaagtttaacttcgacgaaatgcagacccggcgctctaccttcgataatttcccacagtcactgcttaccgttttccagatcctgaccggtgaggactggaatagcgtcatgtatgacggtattatggcctatggcggcccttcctttcccgggatgctggtatgcatctacttcataatcctattcatttgcggaaattacattcttctgaacgtttttctagcaatcgctgttgacaacttggcagacgccgagtcactgaccagcgcccaaaaggaggaggaggaggagaaagaacgaaagaaactagcgagaaccgccagccctgaaaagaagcaggagttggtcgagaaacctgcagtcggcgaatccaaagaagaaaaaattgagctgaagagcattacagccgatggggagtcaccccctgccaccaaaataaatatggacgacctgcaacctaacgagaacgaggataagtccccttaccccaatcccgagaccaccggcgaggaagatgaagaagagcccgaaatgcccgtgggtccccgccccagacccctctccgagctgcacctcaaggaaaaagctgtgcctatgcccgaagcctccgccttctttatcttcagctcaaataacagattccggttgcaatgtcatcgcattgtgaatgacactatttttaccaatctgattctgttttttattctcctttcttccatttctctcgctgccgaagaccccgtccagcatacctcctttagaaaccatatactgttctacttcgatatcgtttttaccaccatatttactattgaaatcgctctgaagatgaccgcttacggcgcctttctccacaagggttccttctgtcgaaattatttcaacattttggacctgctggtcgtttccgtcagtctgatttcgttcggtattcagtcttcggccatcaatgtggtaaaaatcctgcgagttttacgggtgctacggccccttcgcgctattaacagggcaaaggggctgaagcatgtagtgcaatgtgttttcgtcgctattcgcacaatcggcaacatcgtgatcgttacaaccctgctccaattcatgtttgcctgcattggcgtgcagctgtttaaagggaaactttacacgtgtagtgatagttccaagcagacagaagctgaatgcaagggtaactacattacttacaaggacggagaagtggatcacccaataattcaacctcgcagctgggagaatagtaagttcgacttcgataatgtgctggctgctatgatggcgttgtttactgtgagcacctttgaaggctggccggaactcctttaccgatcgatagattcccacaccgaagataaaggccccatctacaattatagggtcgaaatttcaatcttctttatcatttatattatcatcattgccttctttatgatgaatatctttgtgggcttcgtgattgtgaccttccaggagcagggcgagcaggagtacaaaaactgcgagctggacaagaaccagagacagtgcgtggaatatgcattaaaggctcgaccactgcgaagatacatacctaagaatcagcaccagtacaaggtttggtacgtcgttaacagcacctattttgagtatcttatgtttgttctcatactgctcaacacaatctgtttggctatgcagcattacggccaatcatgtctcttcaaaattgcaatgaacatcctgaatatgctgttcaccggcctgtttactgtcgagatgatattgaaactgatcgcatttaagcctaaacactacttctgcgatgcctggaataccttcgatgccctaattgtggtgggcagtatcgtcgacattgctatcaccgaagttaataacgccgaggaaaactcgaggatttccatcacgttcttcagactctttagggtgatgcggctggtaaagctcttgtcgaggggagaggggataagaaccctgttgtggacatttattaaaagcttccaggcccttccctacgtggcactgctaatcgtgatgttgttcttcatctatgctgtgattggaatgcaggtatttggaaagatcgcactaaatgacactactgagatcaacaggaataacaattttcagacattcccgcaagccgtgctactgctatttcgttgcgctaccggtgaggcctggcaggacatcatgctggcctgcatgcctggcaagaaatgcgctcccgagtcagagcctagcaatagcaccgagggcgaaacaccatgcggaagttcctttgccgtgttttattttatttccttctacatgctgtgcgcttttctgatcataaacctgttcgtcgccgtgattatggataactttgattatctgactcgggactggagcatcttaggacctcatcatttggatgaattcaagcgcatttgggcagagtacgacccagaagccaaaggacggatcaaacacttggacgtggtcaccttgctgcgaaggattcagccacccctggggtttgggaaattatgtccgcaccgagtggcttgtaaacggctcgtcagtatgaacatgccgttaaacagcgacggaactgttatgttcaatgctaccctctttgccctagttaggaccgccctcagaattaaaacagaggaaggcccgagccccagtgaagcgcaccagggtgcagaggatcctttccgaccagcagggaacctggagcaggctaatgaagagctgcgcgccataattaaaaagatatggaaacggacatctatgaagctcctggaccaggtcgtgccacctgcaggggatgatgaggtgactgtcgggaaattctacgctaccttcttaatccaggagtatttcaggaaattcaagaagcggaaagaacagggactcgtaggtaagccttcccagagaaatgcactgagtctgcaggccggcctgaggaccttacatgatattggcccagaaattaggcgggctatttcgggagatctgactgcggaggaagaacttgataaagccatgaaagaagctgtctcagcagcgagcgaggatgatatttttaggagagccggggggcttttcggaaatcacgttagttattatcaatctgatggccgctctgcctttccacagactttcacaacacagcgtcctctgcacatcaataaggcaggcagttcccagggtgatactgagtccccgtcacacgaaaagcttgttgactctacctttacacctagcagttattcaagcactggttcaaatgctaatattaataatgctaacaacactgcgttgggtcggctgccaaggcccgcaggttatccatccacagtctcgaccgtagaaggtcatggtcctcccctgtcacctgctataagggttcaggaggtcgcatggaaactctcatctaaccggtgccactctcgggagagtcaagccgcaatggccgggcaggaggaaacctctcaggacgagacctatgaagtaaagatgaatcacgacacggaagcttgcagcgagcctagcctcctgagcaccgagatgctgagctaccaagacgacgagaacagacagctgacattgcccgaggaagacaaaagagacatccgtcaatcacccaagagaggttttctcagaagcgcgtcactgggcaggcgcgccagctttcatctggagtgcttgaaacgccagaaagatagagggggcgatataagccagaaaaccgtcctaccgttgcacctggtacatcaccaagccctggccgtggctgggctgtcacccttacttcagcgaagccatagcccagcctcttttcccagacctttcgcgacaccaccagcgacacctgggagcagaggatggcctcctcagcctgtgcctacactccgactagagggagtggagtcaagcgaaaaactgaatagctcctttccttccattcattgtggctcgtgggctgaaacgaccccaggcgggggagggtccagtgccgcaagaagggtcagaccagtgtcactgatggtcccaagtcaggccggagctccgggaagacaattccacggcagtgcttcttcgttagttgaggccgttctgatctccgaggggctcggccaattcgctcaggacccaaagttcattgaggttacaactcaggagcttgctgacgcctgcgatatgactattgaagaaatggagagcgccgccgacaacatcctctcgggcggggcgcctcagtctccaaatggcgcattgctcccattcgttaactgtcgcgacgccggccaagaccgcgccggaggcgaggaggatgccggatgcgttcgtgcccgcggccggccatccgaggaagaactgcaggattcacgggtgtatgtcagcagtctgtag

SEQ ID NO: 46952 - DNA, 6441 bp, Artificial Sequence
  derived and/or modified sequence
atggtgaatgaaaacaccaggatgtacatccctgaggagaaccaccagggcagcaactacggcagccccaggcctgcccacgccaacatgaatgccaatgctgctgctggcctggcccctgagcacatccccacccctggggccgccctgtcctggcaggccgccattgatgctgcccggcaggccaagctgatgggcagcgctggaaatgccaccatcagcacagtgagcagcacccagaggaagaggcagcagtatggcaagcccaagaagcagggcagcaccacagccacccggcccccccgggccctgctgtgcctgaccctgaagaaccccatccggcgggcctgcatcagcatcgtggagtggaagccctttgagatcatcatcctgctgaccatctttgccaactgtgtggccctggccatctacatccccttcccagaagatgacagcaatgccaccaacagcaacctggagcgggtggagtacctgttcctgatcatcttcaccgtggaggccttcctgaaggtgattgcctacggcctgctcttccaccccaatgcctacctgagaaatggctggaacctgctggacttcatcatcgtggtggtgggcctcttcagcgccatcctggagcaggccaccaaggcagatggagccaatgccctgggcggcaaaggagctggctttgatgtgaaggccctgcgggccttccgggtgctgcggcccctgcggctggtgtctggagtgcccagcctgcaggtggtgctgaacagcatcatcaaggccatggtgcccctgctgcacatcgccctgctggtgctgtttgtgatcatcatctatgccatcatcggcctggagctgttcatgggcaagatgcacaagacctgctacaaccaggagggcattgctgatgtgcctgcagaagatgaccccagcccctgtgccctggagaccggccacggccggcagtgccagaatggcaccgtgtgcaagccaggctgggatggccccaagcacggcatcaccaactttgacaactttgcctttgccatgctgactgtgttccagtgcatcaccatggagggctggacagatgtgctgtactgggtgaatgatgctgtgggccgggactggccctggatctactttgtgaccctcatcatcatcggcagcttctttgtgctgaacctggtgctgggcgtgctgtctggagagttcagcaaggagcgggagaaggccaaggcccggggggacttccagaagctgcgggagaagcagcagctggaggaggacctgaagggctacctggactggatcacccaggctgaagatattgatcctgaaaatgaagatgagggcatggatgaggagaagcccaggaacatgtccatgcccaccagcgagacagaatctgtgaacacagaaaatgtggccggcggggacatcgagggggagaactgtggggcccggctggcccaccgcatcagcaagagcaagttcagccgctactggaggcgctggaaccgcttctgcaggaggaagtgcagagctgctgtgaagagcaatgtgttctactggctggtgatcttcctggtgttcctgaacaccctgaccatcgccagcgagcactacaaccagcccaactggctgacagaggtgcaggacacagccaacaaggccctgctggccctcttcaccgctgagatgctgctgaagatgtacagcctgggcctgcaggcctactttgtgtccctcttcaacagatttgactgctttgtggtgtgtggcggcatcctggagaccatcctggtggagaccaagatcatgagccccctgggcatctctgtgctgcgctgtgtgcggctgctgcgcatcttcaagatcacccgctactggaacagcctgagcaacctggtggccagcctgctgaacagcgtgcgcagcatcgccagcctgctgctgctgctcttcctgttcatcatcatcttcagcctgctgggcatgcagctgtttggaggcaagttcaactttgatgagatgcagaccaggaggagcacctttgacaacttcccccagagcctgctgaccgtcttccagatcctgaccggggaggactggaacagcgtgatgtatgatggcatcatggcctatggaggccccagcttccctggcatgctggtgtgcatctacttcatcatcctcttcatctgtggcaactacatcctgctgaatgtgttcctggccatcgctgtggacaacctggctgatgctgagagcctgaccagcgcccagaaggaggaggaggaggagaaggagaggaagaagctggccaggacagccagccctgagaagaagcaggagctggtggagaagccagctgtgggggagagcaaggaggagaagattgagctgaagagcatcacagcagatggagagagccccccagccaccaagatcaacatggatgacctgcagcccaatgaaaatgaagacaagagcccctaccccaaccctgagaccactggagaggaggatgaggaggagcctgagatgcctgtgggcccccggccccggcccctgtctgagctgcacctgaaggagaaggctgtgcccatgcctgaggccagcgccttcttcatcttcagcagcaacaaccgcttccggctgcagtgccaccgcatcgtgaatgacaccatcttcaccaacctgatcctcttcttcatcctgctgagcagcatcagcctggccgctgaggaccctgtgcagcacaccagcttcaggaaccacatcctcttctactttgacatcgtgttcaccaccatcttcaccatcgagatcgccctgaagatgacagcctatggagccttcctgcacaagggcagcttctgcaggaactacttcaacatcctggacctgctggtggtgtctgtgtccctcatcagctttggcatccagagcagcgccatcaacgtggtgaagatcctgcgggtgctgcgggtgctgcggcccctgcgggccatcaacagagccaagggcctgaagcacgtggtgcagtgtgtgtttgtggccatccgcaccatcggcaacatcgtcatcgtgaccaccctgctgcagttcatgtttgcctgcatcggcgtgcagctgttcaagggcaagctgtacacctgcagcgacagcagcaagcagacagaagctgagtgcaagggcaactacatcacctacaaggatggagaggtggaccaccccatcatccagcccaggtcctgggagaacagcaagtttgattttgacaacgtgctggccgccatgatggccctcttcaccgtgtccacctttgagggctggccagagctgctgtaccgcagcattgacagccacacagaggacaagggccccatctacaactacagagtggagatcagcatcttcttcatcatctacatcatcatcatcgccttcttcatgatgaacatctttgtgggcttcgtcatcgtgaccttccaggagcagggcgagcaggagtacaagaactgtgagctggacaagaaccagaggcagtgtgtggagtatgccctgaaggcccggcccctgcggcgctacatccccaagaaccagcaccagtacaaggtgtggtacgtggtgaacagcacctactttgagtacctgatgtttgtgctgatcctgctgaacaccatctgcctggccatgcagcactacggccagagctgcctcttcaagatcgccatgaacatcctgaacatgctgttcaccggcctcttcaccgtggagatgatcctgaagctgattgccttcaagcccaagcactacttctgtgatgcctggaacacctttgatgccctgattgtggtgggcagcatcgtggacatcgccatcacagaggtgaacaatgctgaggagaacagccgcatcagcatcaccttcttccgcctcttccgggtgatgaggctggtgaagctgctgagcagaggagagggcatccgcaccctgctgtggaccttcatcaagagcttccaggccctgccctacgtggccctgctgattgtgatgctgttcttcatctatgctgtgattggcatgcaggtgtttgggaagatcgccctgaatgacaccacagagatcaacagaaacaacaacttccagaccttcccccaggccgtgctgctgctcttccgctgtgccactggagaggcctggcaggacatcatgctggcctgcatgcctgggaagaagtgtgcccctgagagcgagcccagcaacagcacagaaggagagaccccctgtggcagcagctttgctgtgttctacttcatctccttctacatgctgtgtgccttcctgatcatcaacctgtttgtggccgtcatcatggacaactttgactacctgacccgggactggagcatcctgggcccccaccacctggatgagttcaagaggatctgggccgagtatgaccctgaggccaagggccgcatcaagcacctggatgtggtgaccctgctgcggcgcatccagccccccctgggctttgggaagctgtgcccccaccgggtggcctgcaagaggctggtgtccatgaacatgcccctgaacagtgatggcaccgtgatgtttaatgccaccctgtttgccctggtgaggacagccctgcgcatcaagacagaggagggccccagccccagcgaggcccaccagggcgctgaggaccccttccggcctgctggcaacctggagcaggccaatgaggagctgcgggccatcatcaagaagatctggaagaggacctccatgaagctgctggaccaggtggtgcccccagctggagatgatgaggtgacagtgggcaagttctacgccaccttcctgatccaggagtacttcaggaagttcaagaagaggaaggagcagggcctggtgggcaagcccagccagagaaatgccctgagcctgcaggccggcctgcggaccctgcatgacatcggccctgagatccggcgggccatcagcggggacctgacagctgaggaggagctggacaaggccatgaaggaggccgtgtctgctgcctctgaagatgacatcttcagaagagctgggggcctgtttggaaaccacgtgtcctactaccagagtgatggccgcagcgccttcccccagaccttcaccacccagaggcccctgcacatcaacaaggccggcagcagccagggcgacacagagagccccagccatgagaagctggtggacagcaccttcacccccagcagctacagcagcacaggcagcaatgccaacatcaacaatgccaacaacacagccctgggccgcctgcccaggcctgctggctaccccagcacagtgtccacagtggagggccacggcccccccctgagccctgccatccgggtgcaggaggtggcctggaagctgagcagcaaccgctgccacagccgggagagccaggccgccatggccggccaggaggagaccagccaggatgagacctatgaggtgaagatgaaccacgacacagaggcctgcagcgagcccagcctgctgagcacagagatgctgagctaccaggatgatgaaaatcggcagctgaccctgcctgaggaggacaagagggacatccggcagagccccaagaggggcttcctgcggagcgccagcctgggcagaagagccagcttccacctggagtgcctgaagaggcagaaggacagaggaggagacatcagccagaagacagtgctgcccctgcacctggtgcaccaccaggccctggccgtggccggcctgagccccctgctgcagaggagccacagccctgccagcttcccccggccctttgccaccccaccagccaccccaggcagccggggctggccaccccagcctgtgcccaccctgcggctggagggcgtggagagcagcgagaagctgaacagcagcttccccagcatccactgcggctcctgggccgagaccacccctgggggcggcggcagcagcgctgccaggagagtgcggcctgtgtccctgatggtgcccagccaggccggggcccctggccggcagttccacggcagcgccagcagcctggtggaggccgtgctgatcagcgagggcctgggccagtttgcccaggaccccaagttcatcgaggtgaccacccaggagctggctgatgcctgtgacatgaccatcgaggagatggagagcgctgctgacaacatcctgtctggaggagccccccagagccccaatggagccctgctgccctttgtgaactgcagagatgctggccaggaccgggccggcggggaggaggatgctggctgtgtgcgggcccggggccggcccagcgaggaggagctgcaggacagccgggtgtatgtgagcagcctgtag

SEQ ID NO: 46953 - DNA, 6441 bp, Artificial Sequence
  derived and/or modified sequence
atggtgaacgagaacacccggatgtacatccccgaggagaaccaccaaggctcaaactatggctccccccgacccgctcacgctaatatgaacgccaatgctgccgcaggccttgctccagaacatatccctacaccaggggcggcgttatcatggcaagcagctatagacgctgccagacaggcaaagctcatgggctccgctggcaacgctacaatcagcacagtctcttctacccaaagaaaacgtcagcagtatggtaagcccaagaaacagggcagtaccacagccacccgacctccaagagctctattgtgcttgactcttaagaatccaataagacgggcctgcatctccattgtggagtggaaacccttcgaaatcataattctcctgaccatctttgcaaactgcgtcgctctcgcaatatacatcccttttccggaggatgacagtaatgcgaccaattccaacctcgaaagagtggagtatctctttttaataattttcactgtggaggcctttctgaaagtgattgcatacgggctgctttttcaccccaatgcctaccttcggaacggctggaacctgctggacttcattatcgtcgttgtggggctgttctccgccatcctggaacaggccacaaaggctgacggagccaatgctcttggcggcaaaggcgcaggatttgacgttaaggctctcagggctttccgcgtcctcagacctctgcgcctcgtaagcggtgtcccatctcttcaagtggtgctgaacagcatcatcaaagcaatggttcccttattacacatcgctctgcttgtactgtttgtgattatcatatatgctatcattggactcgaactgtttatgggtaagatgcataagacatgttacaaccaggagggcatcgccgacgtgcctgctgaagacgacccaagtccctgcgccctagagaccggtcacggaaggcagtgccagaacggcaccgtatgtaaacctggctgggatggccctaaacatggcatcactaatttcgataatttcgcttttgccatgctcactgttttccagtgcatcaccatggaagggtggactgatgttctctactgggttaatgatgccgtaggccgtgactggccttggatctacttcgttaccctgattataatcggaagtttcttcgtcctaaatttggtgttgggggtgctgtctggcgagttcagcaaagagcgggagaaggccaaggcacgaggtgatttccagaagctgcgagaaaaacaacagctagaagaagacctaaagggctatctagattggattacacaggctgaagacatcgacccagagaacgaagacgaaggcatggacgaagagaaacctcgcaacatgagtatgcccacttctgagacagagtccgtcaacacagagaacgtagcgggaggagatatcgaaggggaaaactgcggagcacggctagcccatcgcatctcaaaatcgaagtttagccgctactggagacgttggaaccgcttctgcaggcgaaagtgccgtgccgccgtgaagagcaacgttttttactggctggtgatctttctggtattcctaaacaccctcaccattgcctccgaacattacaatcagcccaactggttgaccgaagtccaggacacagcaaataaagctcttcttgcactgttcaccgctgaaatgctcctaaaaatgtactctctcggtctgcaggcctacttcgtcagcctgttcaacagattcgattgcttcgtggtgtgtggaggaatcttagagaccatactggtggaaacaaagatcatgtcacccttaggtataagcgtcctgaggtgcgtgcggctgctccgcatttttaaaattactcgatattggaattcactgagcaatctcgtggcatcgttactgaactctgtcaggtccatcgctagcctgcttcttctgctctttcttttcattatcatcttctccttgctcgggatgcagctgtttggcggaaaattcaacttcgatgagatgcagacaagaaggagtacatttgacaacttcccccagtctctgctgactgtgtttcagatcttgacaggcgaggactggaacagtgtgatgtatgacgggataatggcctatggagggccgagctttcccggcatgctcgtgtgtatctactttattatcctgtttatatgtggcaactatatcctgctcaatgtctttcttgccattgctgtcgacaatttggcagacgccgagagcctgacctcagctcaaaaagaggaggaagaagaaaaagagcggaagaaactagccaggacagcctctcccgaaaagaagcaggaattagtcgagaagccagctgttggcgagtcaaaggaagagaaaattgaactcaaaagtattacagcagacggtgaatccccaccagcaaccaagatcaacatggatgacctccaacctaatgagaatgaagacaaatctccataccccaaccccgagactacaggcgaggaagatgaggaggaacctgaaatgcccgtaggacctcgtcctcggcccctgtcagaactgcacctgaaggagaaggctgtgcccatgcctgaagccagcgccttctttattttttcctctaacaaccgattccggctgcaatgccatagaattgttaacgatacaatctttaccaatttgattctctttttcattttgcttagttccatttccctggcggctgaggatcccgtgcagcacacaagcttcagaaaccatatcctgttttatttcgatattgtgttcactactatctttaccattgaaatcgccttgaaaatgactgcttacggtgccttcctgcataagggctcattttgtagaaactacttcaacatccttgacctacttgttgtttcagtgtcgttaatcagttttggcatccagagctcagctatcaacgttgtcaagatcctccgcgtgctgagggtgctgcgccccctaagagctatcaaccgcgccaagggcctgaaacatgtagtgcagtgcgtgtttgtcgcaattaggacgatagggaatatagtaatcgtgacgacactgttgcaattcatgttcgcatgcataggcgtccagctgttcaagggaaagctgtacacctgcagcgatagctctaaacagacagaggccgaatgcaaaggtaattacataacttacaaggacggcgaggtagatcaccctataattcaacctagatcttgggaaaattcgaagttcgacttcgataatgtgctggctgccatgatggctctgttcacggtctcaacctttgaagggtggccggagctgctataccgctcaatcgactcccacaccgaggacaaagggccaatctacaattacagggtagaaatctcgattttttttattatttatatcatcatcattgctttcttcatgatgaacatttttgtagggtttgtgattgtcacttttcaggaacagggtgaacaagagtacaaaaactgcgaactggataagaatcaaagacagtgtgtggaatatgccttgaaagcacgccctctccgccgatacatacccaaaaaccagcatcaatacaaggtgtggtatgtagtcaactctacctattttgaatacctgatgttcgtgttgatactactaaataccatttgtctggcaatgcagcattatgggcaaagctgcctgttcaaaatagccatgaatattctaaacatgttatttacaggtttatttactgtggagatgatactgaagctgattgccttcaagccaaagcattatttttgtgatgcatggaataccttcgacgcccttatcgttgtagggtccatcgtcgacattgccatcacggaggtcaacaatgccgaagaaaattcccgcattagtatcactttttttaggcttttcagggtgatgagactagttaagctgttgtccaggggggagggcattcggactcttctctggacatttatcaagtcattccaggctctgccatatgtggccctcctcatcgtcatgttgttcttcatctacgctgtgataggcatgcaggtgtttggcaagatcgccctcaatgataccaccgaaatcaatagaaacaacaattttcaaaccttcccgcaggcagtactgctactcttcaggtgtgctaccggtgaggcctggcaggacataatgcttgcttgcatgcccggcaagaaatgtgctccggaatcagagccaagtaacagtaccgagggcgagactccttgtgggtctagcttcgccgtcttttacttcatttccttttacatgttatgcgcattcttgatcatcaacctcttcgtcgccgtgatcatggacaacttcgattatcttacccgtgactggtctatccttgggccccaccacctggatgaattcaagaggatctgggcagaatacgaccccgaagccaagggaaggatcaaacacctggatgttgtcaccctgcttagacggatccagcctccccttggctttggaaagttgtgtccccaccgagttgcttgcaagcggctggttagcatgaatatgcctttaaatagtgacgggaccgtgatgttcaacgccaccttgtttgcgctggttcggaccgccctccgcattaaaaccgaggagggtccatccccgagcgaggctcatcagggcgctgaggacccttttcgtcctgccggcaatcttgagcaggctaacgaagaactacgcgccatcattaagaagatctggaagcgtacatccatgaagctgctcgatcaggtggtgccgcccgcgggcgacgatgaagtcaccgtgggcaaattttatgcgacattcctgattcaggaatacttcagaaagttcaagaaaagaaaggagcagggcctcgtggggaagccgtcccagcgcaacgccctatctctccaggcaggcttacgcaccctccacgacattggccccgagatccgcagggcgattagcggcgacctgacggctgaagaggagctcgacaaggcaatgaaagaggctgtctccgctgctagcgaggatgatatatttcgacgagccggcggcctgttcggaaaccatgtatcatactatcagtcggatggacggtccgcttttccgcagacattcaccacacaacggccactgcacataaacaaagcggggagctcccagggtgatactgagtccccctcccacgagaaactggttgatagcaccttcaccccctcatcttactctagcaccggctccaatgctaatatcaacaacgcaaacaacaccgctctcggcagactgccgcggccggcaggatatcccagcactgtgtccaccgttgaaggacatggcccgccacttagtccggctatccgagtgcaggaggtagcttggaagctctcaagtaacaggtgccatagccgcgaatcccaggctgctatggcaggtcaggaggagaccagccaggacgagacctatgaagtgaaaatgaaccacgacacagaggcatgcagtgaaccctcgctcttgtctactgagatgttgtcatatcaggacgacgaaaatcgccagttgacactgcccgaggaagacaagagggacatccggcagtctcccaaaagaggcttccttcggagcgccagcttagggaggagagcctcttttcacctggagtgtctgaagcggcagaaggacaggggcggcgatatcagccaaaaaaccgtactgcctctccacctggttcatcaccaggcactggccgttgcgggactgtcaccgctcctgcagcgttcccacagtcctgctagtttcccgagaccttttgcaacacctcctgcaacccctgggtctcggggatggcccccccagccggtgcccacgcttaggttagagggcgtggagagttctgagaagttgaatagctctttcccatctatacactgcggctcctgggccgagactacaccaggaggagggggatctagtgccgctcgtagagtacgacctgtgtctctgatggttccttcccaggcaggggcccccggtcggcagttccacggctcagcctccagtctggtcgaggccgtactaattagcgaaggactggggcaattcgcacaggatcccaaatttattgaggttacaacacaggagctcgcagatgcttgtgacatgaccatcgaggaaatggaatctgctgccgataatattctatcaggcggagccccacagagcccaaacggggcactactaccattcgtaaactgccgagacgcaggacaagaccgggctggcggggaggaagacgcaggttgtgtgcgggcgaggggccggccttccgaggaggagttacaggactctagggtctatgtgagcagtttgtag

SEQ ID NO: 46954 - DNA, 6440 bp, Artificial Sequence
  derived and/or modified sequence
atggtcaatgagaacactcggatgtatattccagaggagaatcaccagggtagcaactatgggagccctaggcctgctcatgccaacatgaacgcaaacgccgcagctggactggcccctgaacacattcctacccctggggctgcacttagctggcaggcagctatagatgcagcgaggcaagccaagttgatgggcagcgctggcaacgcaaccattagcaccgtttctagtacccagcgaaaacgtcaacaatatggcaagcccaagaaacagggctccaccaccgccacacggccacctcgtgcattgctttgccttacattaaaaaatcccattcgaagggcatgcatcagcattgtcgaatggaaacccttcgagatcatcattctgctgaccatattcgccaattgtgtggcactcgccatttacatccctttcccagaagatgatagtaatgcaaccaattccaatctggaacgcgtggaatacctcttcctgattatctttactgtcgaagcatttctgaaggtcatcgcatatggtcttctatttcacccaaatgcctatttacggaacggctggaacctgcttgactttatcatagttgtggtgggccttttctcagccatcttggaacaggcaaccaaggccgatggagccaacgcccttggaggaaagggggctggattcgacgtcaaagcccttcgcgcttttcgggtactgcggcctcttcggctggtgtcgggggttccctcactgcaggtcgtgctgaactccataatcaaggcaatggttccgctgctgcatatcgccctcttggttctgttcgtgattattatatacgccatcatcggattggagctcttcatgggaaagatgcacaagacctgttataaccaagaaggcattgcagatgtgccggctgaagatgacccatcaccgtgcgccctggaaaccggacatggtcgacagtgtcagaatgggacggtctgcaaacctggatgggacggccctaagcacggcatcacaaatttcgataactttgcgtttgccatgctgaccgtttttcaatgcattacaatggaaggatggaccgatgtgctatattgggtgaacgatgcagtgggtcgcgactggccgtggatctattttgtaactttgattattattgggtccttttttgtgctgaacttggtgctgggcgtcctctccggcgaattcagcaaggagagggagaaagccaaagctcgcggagactttcagaaacttcgtgaaaagcagcagttagaggaggatcttaagggatacttggactggattacccaggccgaggatatagatcctgagaatgaagacgagggcatggatgaggagaaaccccgaaatatgtcaatgccaacatcagagaccgaaagcgtcaacactgagaacgtcgccggaggggacatagagggggagaattgtggggctaggctggctcatcggatctcgaagagcaagttttccaggtattggaggcggtggaacaggttctgtcgccgaaaatgccgggctgcagtgaagagcaacgtgttttactggcttgtgatctttctcgttttcctgaatacactgacaattgcctctgagcattataatcagccaaattggctaacagaggtgcaagacacggctaacaaggctctgctggctctgttcactgctgaaatgctgctgaagatgtacagcctgggtttgcaggcctatttcgtgtccctcttcaatagatttgactgcttcgtggtgtgtgggggaattcttgagaccattcttgtagaaactaaaattatgtcacctcttggtatttctgtactccggtgtgtgagactgttaagaatctttaaaattacccgatattggaactctctgagtaacctggtcgccagcctgctgaatagcgtccggagtattgcctctttgttgttactgctctttctgtttatcattatcttcagcctgttgggcatgcaacttttcggaggaaagtttaacttcgacgaaatgcagacccgcagatcaacctttgataacttcccacagtctctccttactgtgtttcagattttgacaggcgaggattggaattccgttatgtatgacgggataatggcttatgggggaccatcgttccctggaatgctggtctgtatttactttatcatcctctttatttgcggaaattacatcctgcttaatgtctttctggccatcgccgttgacaatctcgccgatgccgaaagtcttacgtctgctcagaaggaggaggaagaggagaaggaacggaagaaactggccagaactgctagccctgaaaagaaacaggaattggtggagaaaccagcagtgggagagtcaaaggaggagaagatcgagcttaagtcaattaccgccgacggagaatcccctccggctaccaagataaacatggatgacctccaacctaacgagaacgaagacaaaagcccttatcctaacccagaaaccacaggggaggaggatgaagaggagccagaaatgccggtgggaccccgtcccagaccccttagtgagttgcaccttaaggagaaagcagttccaatgcctgaggcaagcgccttttttattttctctagcaataaccgattccgtctccagtgccatcggatcgtgaatgacacaattttcacgaaccttatcttgtttttcatactgctgagcagcatttccctggccgctgaagaccctgtgcagcataccagttttcgcaaccacatattgttctactttgatattgtgtttaccacgatcttcaccattgagatcgccctgaagatgaccgcatatggtgcttttcttcataagggatccttctgtaggaactattttaacatcttggacttactggtggtatctgtgagtctcattagttttggtatccagagctcggctattaacgtcgttaagatcctgagagtgctccgtgtgctgcgcccattgcgcgctatcaatcgggctaaagggctgaagcacgtggtccaatgtgtgttcgtggccattcgcaccatcggtaacatcgtcatcgtaaccactttgctgcagttcatgtttgcctgtattggagtccaattattcaagggcaagctgtacacttgtagtgattcctccaagcaaaccgaggccgagtgcaaaggcaattacattacatacaaggatggagaggtagatcatcctatcatccagccccgttcctgggagaactccaagtttgatttcgacaacgtgctggcagctatgatggctctctttacagtatccacattcgaagggtggcctgagctgctgtacagatcgatagactcccataccgaggacaagggcccaatttacaactatcgggtggaaatctccattttcttcatcatttacatcataattattgcctttttcatgatgaatatttttgtcgggttcgtaatcgttacatttcaagagcaaggggagcaggaatacaaaaattgtgagttagacaaaaaccagcgccagtgcgtggagtacgcactcaaagccagaccgctccggagatatattccaaaaaaccaacatcaatacaaggtctggtatgtggtgaactccacttactttgaatacttgatgttcgtcctcatccttctgaacacaatttgcctggccatgcagcattatggccagagctgtctgtttaagatcgcaatgaacatcctgaacatgctgttcactggcttattcacagttgaaatgatcctgaagctgattgcattcaaacctaaacactatttttgtgatgcctggaacacatttgacgctcttattgtggtgggctctattgtcgacatcgcaatcaccgaggtcaataacgccgaggagaactctcggatcagcataacattttttaggctgttccgggtcatgaggcttgtgaaactcttgagcaggggtgagggcattcgcacgctgctttggactttcatcaaatcctttcaagcgcttccctacgttgccttactaattgtcatgctattttttatctatgccgttattggcatgcaggtcttcggcaaaatcgctcttaatgatacgaccgaaattaacagaaataataacttccagacattcccgcaagctgtgcttttactgttccggtgtgctaccggggaggcttggcaggatatcatgttagcctgcatgccaggcaagaagtgcgcaccagagtctgagccgagcaacagcaccgaaggagaaaccccctgcggctcttccttcgctgtcttttacttcatcagcttttacatgttgtgcgccttcttaatcatcaacctctttgttgctgtcataatggataacttcgactacctgacaagagattggagtattctaggtcctcaccatttagacgaattcaagcgcatttgggctgaatacgatcccgaggccaaaggccgaattaagcacctggatgttgtcactctgctacgcaggatccaaccaccacttggattcggaaagctgtgcccccaccgagtggcctgcaagcgcttggtttccatgaacatgcccctaaatagtgacggtacagtcatgttcaatgctaccctgtttgctttggtgaggacagcccttcgaattaagaccgaagaagggccatcccctagcgaagcgcaccagggcgctgaggatccctttcgcccagccggaaacttagagcaggcgaacgaggagctgcgcgcaatcataaagaagatctggaagaggacgagcatgaagctcctggaccaagtggtcccaccagcgggtgacgacgaggtaaccgtcgggaaattctacgccacatttctgattcaagagtacttccgcaagtttaagaaaaggaaagagcagggactggtcggcaaaccctcccagagaaacgccctgtccctgcaagcgggactgcgcactttgcacgatatcggaccagaaatccgacgcgcaatctctggggacctgacagctgaagaagagctggataaagcaatgaaggaagctgtttctgccgctagcgaggatgatatttttcggagggcaggcggtttattcggcaaccacgttagttactatcaaagcgacggcagatctgcatttccgcagactttcaccacccagcggccattacatatcaacaaggcagggtcttcacaaggagatacggaatctccaagtcacgagaagctggttgactccactttcactccttcctcctacagctccaccggctcgaatgccaacattaacaatgcaaacaacaccgctctgggcagactaccacggccagcaggctatccctctacggtgagtaccgttgagggccacgggccacccctgagcccagctattagagttcaggaagttgcatggaaactctctagcaaccggtgtcatagtagagaaagccaggctgcaatggctggccaggaagagaccagtcaggatgaaacatacgaggtgaaaatgaatcatgacactgaggcctgctccgaaccttctcttctcagcaccgagatgctgagctaccaggacgatgagaacaggcagttaactctgccggaggaggataagcgcgacataaggcagtctcccaaacgcggtttcctgcgaagcgcttccctcggacgcagagcctctttccacctggagtgcctcaaacggcagaaagacaggggaggagacatttcacagaagaccgtactgccgcttcatctggtacaccaccaggctctcgccgtggccggactgagcccattactgcagagaagtcactctccagccagtttcccaaggccattcgctacacccccagccacgcccggtagtcggggatggccccctcagcctgtgcccacgctcaggttagagggcgtggaatctagtgagaaactgaactcgtcattcccctcaattcactgtggcagctgggccgaaactacacctggcggtggcggttcctcagcagcccgacgcgtaaggcccgtgagcctaatggtgccttctcaggctggggcaccaggaaggcagtttcacggttccgccagttcgctcgtggaagcagtcctcatttctgaagggctcggccagtttgctcaagatccaaagttcatagaggtgaccacacaggagctggcggacgcatgtgacatgactatcgaagagatggagtcggccgctgacaacatccttagcggaggcgctccccaatctcccaacggagcactgctcccctttgtgaattgcagagacgccggtcaagaccgcgctgggggagaagaagatgccggttgtgtaagagcacgaggacgtccgtccgaagaggaacttcaagacagcagagtttacgtaagcagtctgta

SEQ ID NO: 46955 - DNA, 6535 bp, Artificial Sequence
  derived and/or modified sequence
atggtcaatgagaatacgaggatgtacattccagaggaaaaccaccaaggttccaactatgggagcccacgccccgcccatgccaacatgaatgccaatgcggcagcggggctggcccctgagcacatccccaccccgggggctgccctgtcgtggcaggcggccatcgacgcagcccggcaggctaagctgatgggcagcgctggcaatgcgaccatctccacagtcagctccacgcagcggaagcggcagcaatatgggaaacccaagaagcagggcagcaccacggccacacgcccgccccgagccctgctctgcctgaccctgaagaaccccatccggagggcctgcatcagcattgtcgaatggaaaccatttgaaataattattttactgactatttttgccaattgtgtggccttagcgatctatattccctttccagaagatgattccaacgccaccaattccaacctggaacgagtggaatatctctttctcataatttttacggtggaagcgtttttaaaagtaatcgcctatggactcctctttcaccccaatgcctacctccgcaacggctggaacctactagattttataattgtggttgtggggctttttagtgcaattttagaacaagcaaccaaagcagatggggcaaacgctctcggagggaaaggggccggatttgatgtgaaggcgctgagggccttccgcgtgctgcgccccctgcggctggtgtccggagtcccaagtctccaggtggtcctgaattccatcatcaaggccatggtccccctgctgcacatcgccctgcttgtgctgtttgtcatcatcatctacgccatcatcggcttggagctcttcatggggaagatgcacaagacctgctacaaccaggagggcatagcagatgttccagcagaagatgacccttccccttgtgcgctggaaacgggccacgggcggcagtgccagaacggcacggtgtgcaagcccggctgggatggtcccaagcacggcatcaccaactttgacaactttgccttcgccatgctcacggtgttccagtgcatcaccatggagggctggacggacgtgctgtactgggtcaatgatgccgtaggaagggactggccctggatctattttgttacactaatcatcatagggtcattttttgtacttaacttggttctcggtgtgcttagcggagagttttccaaagagagggagaaggccaaggcccggggagatttccagaagctgcgggagaagcagcagctagaagaggatctcaaaggctacctggattggatcactcaggccgaagacatcgatcctgagaatgaggacgaaggcatggatgaggagaagccccgaaacatgagcatgcccaccagtgagaccgagtccgtcaacaccgaaaacgtggctggaggtgacatcgagggagaaaactgcggggccaggctggcccaccggatctccaagtcaaagttcagccgctactggcgccggtggaatcggttctgcagaaggaagtgccgcgccgcagtcaagtctaatgtcttctactggctggtgattttcctggtgttcctcaacacgctcaccattgcctctgagcactacaaccagcccaactggctcacagaagtccaagacacggcaaacaaggccctgctggccctgttcacggcagagatgctcctgaagatgtacagcctgggcctgcaggcctacttcgtgtccctcttcaaccgctttgactgcttcgtcgtgtgtggcggcatcctggagaccatcctggtggagaccaagatcatgtccccactgggcatctccgtgctcagatgcgtccggctgctgaggattttcaagatcacgaggtactggaactccttgagcaacctggtggcatccttgctgaactctgtgcgctccatcgcctccctgctccttctcctcttcctcttcatcatcatcttctccctcctggggatgcagctctttggaggaaagttcaactttgatgagatgcagacccggaggagcacattcgataacttcccccagtccctcctcactgtgtttcagatcctgaccggggaggactggaattcggtgatgtatgatgggatcatggcttatggcggcccctcttttccagggatgttagtctgtatttacttcatcatcctcttcatctgtggaaactatatcctactgaatgtgttcttggccattgctgtggacaacctggctgatgctgagagcctcacatctgcccaaaaggaggaggaagaggagaaggagagaaagaagctggccaggactgccagcccagagaagaaacaagagttggtggagaagccggcagtgggggaatccaaggaggagaagattgagctgaaatccatcacggctgacggagagtctccacccgccaccaagatcaacatggatgacctccagcccaatgaaaatgaggataagagcccctaccccaacccagaaactacaggagaagaggatgaggaggagccagagatgcctgtcggccctcgcccacgaccactctctgagcttcaccttaaggaaaaggcagtgcccatgccagaagccagcgcgtttttcatcttcagctctaacaacaggtttcgcctccagtgccaccgcattgtcaatgacacgatcttcaccaacctgatcctcttcttcattctgctcagcagcatttccctggctgctgaggacccggtccagcacacctccttcaggaaccatattctgttttattttgatattgtttttaccaccattttcaccattgaaattgctctgaagatgactgcttatggggctttcttgcacaagggttctttctgccggaactacttcaacatcctggacctgctggtggtcagcgtgtccctcatctcctttggcatccagtccagtgcaatcaatgtcgtgaagatcttgcgagtcctgcgagtactcaggcccctgagggccatcaacagggccaaggggctaaagcatgtggttcagtgtgtgtttgtcgccatccggaccatcgggaacatcgtgattgtcaccaccctgctgcagttcatgtttgcctgcatcggggtccagctcttcaagggaaagctgtacacctgttcagacagttccaagcagacagaggcggaatgcaagggcaactacatcacgtacaaagacggggaggttgaccaccccatcatccaaccccgcagctgggagaacagcaagtttgactttgacaatgttctggcagccatgatggccctcttcaccgtctccaccttcgaagggtggccagagctgctgtaccgctccatcgactcccacacggaagacaagggccccatctacaactaccgtgtggagatctccatcttcttcatcatctacatcatcatcatcgccttcttcatgatgaacatcttcgtgggcttcgtcatcgtcacctttcaggagcagggggagcaggagtacaagaactgtgagctggacaagaaccagcgacagtgcgtggaatacgccctcaaggcccggcccctgcggaggtacatccccaagaaccagcaccagtacaaagtgtggtacgtggtcaactccacctacttcgagtacctgatgttcgtcctcatcctgctcaacaccatctgcctggccatgcagcactacggccagagctgcctgttcaaaatcgccatgaacatcctcaacatgctcttcactggcctcttcaccgtggagatgatcctgaagctcattgccttcaaacccaagcactatttctgtgatgcatggaatacatttgacgccttgattgttgtgggtagcattgttgatatagcaatcaccgaggtaaacaacgcagaggaaaactcccgcatctccatcaccttcttccgcctgttccgggtcatgcgtctggtgaagctgctgagccgtggggagggcatccggacgctgctgtggaccttcatcaagtccttccaggccctgccctatgtggccctcctgatcgtgatgctgttcttcatctacgcggtgatcgggatgcaggtgtttgggaaaattgccctgaatgataccacagagatcaaccggaacaacaactttcagaccttcccccaggccgtgctgctcctcttcaggtgtgccaccggggaggcctggcaggacatcatgctggcctgcatgccaggcaagaagtgtgccccagagtccgagcccagcaacagcacggagggtgaaacaccctgtggtagcagctttgctgtcttctacttcatcagcttctacatgctctgtgccttcctgatcatcaacctctttgtagctgtcatcatggacaactttgactacctgacaagggactggtccatccttggtccccaccacctggatgagtttaaaagaatctgggcagagtatgaccctgaagccaagggtcgtatcaaacacctggatgtggtgaccctcctccggcggattcagccgccactaggttttgggaagctgtgccctcaccgcgtggcttgcaaacgcctggtctccatgaacatgcctctgaacagcgacgggacagtcatgttcaatgccaccctgtttgccctggtcaggacggccctgaggatcaaaacagaagagggacccagcccatcagaggcccaccaaggggctgaggatcctttccgccctgcagggaacctagaacaagccaatgaggagctgcgggcgatcatcaagaagatctggaagcggaccagcatgaagctgctggaccaggtggtgccccctgcaggtgatgatgaggtcaccgttggcaagttctacgccacgttcctgatccaggagtacttccggaagttcaagaagcgcaaagagcagggccttgtgggcaagccctcccagaggaacgcgctgtctctgcaggctggcttgcgcacactgcatgacatcgggcctgagatccgacgggccatctctggagatctcaccgctgaggaggagctggacaaggccatgaaggaggctgtgtccgctgcttctgaagatgacatcttcaggagggccggtggcctgttcggcaaccacgtcagctactaccaaagcgacggccggagcgccttcccccagaccttcaccactcagcgcccgctgcacatcaacaaggcgggcagcagccagggcgacactgagtcgccatcccacgagaagctggtggactccaccttcaccccgagcagctactcgtccaccggctccaacgccaacatcaacaacgccaacaacaccgccctgggtcgcctccctcgccccgccggctaccccagcacggtcagcactgtggagggccacgggccccccttgtcccctgccatccgggtgcaggaggtggcgtggaagctcagctccaacaggtgccactcccgggagagccaggcagccatggcgggtcaggaggagacgtctcaggatgagacctatgaagtgaagatgaaccatgacacggaggcctgcagtgagcccagcctgctctccacagagatgctctcctaccaggatgacgaaaatcggcaactgacgctcccagaggaggacaagagggacatccggcaatctccgaagaggggtttcctccgctctgcctcactaggtcgaagggcctccttccacctggaatgtctgaagcgacagaaggaccgagggggagacatctctcagaagacagtcctgcccttgcatctggttcatcatcaggcattggcagtggcaggcctgagccccctcctccagagaagccattcccctgcctcattccctaggccttttgccaccccaccagccacacctggcagccgaggctggcccccacagcccgtccccaccctgcggcttgagggggtcgagtccagtgagaaactcaacagcagcttcccatccatccactgcggctcctgggctgagaccacccccggtggcgggggcagcagcgccgcccggagagtccggcccgtctccctcatggtgcccagccaggctggggccccagggaggcagttccacggcagtgccagcagcctggtggaagcggtcttgatttcagaaggactggggcagtttgctcaagatcccaagttcatcgaggtcaccacccaggagctggccgacgcctgcgacatgaccatagaggagatggagagcgcggccgacaacatcctcagcgggggcgccccacagagccccaatggcgccctcttaccctttgtgaactgcagggacgcggggcaggaccgagccgggggcgaagaggacgcgggctgtgtgcgcgcgcggggtcgaccgagtgaggaggagctccaggacagcagggtctacgtcagcagcctgtagtgggcgctgccagatgcgggcttttttttatttgtttcaatgttcctaatgggttcgtttcagaagtgcctcactgttctcgtgacctggagtt

SEQ ID NO: 46956 - DNA, 6441 bp, Artificial Sequence
  derived and/or modified sequence
atggtgaacgagaacaccagaatgtacatccccgaggagaaccaccagggcagcaactacggcagccccagacccgcccacgccaacatgaacgccaacgccgccgccggcctggcccccgagcacatccccacccccggcgccgccctgagctggcaggccgccatcgacgccgccagacaggccaagctgatgggcagcgccggcaacgccaccatcagcaccgtgagcagcacccagagaaagagacagcagtacggcaagcccaagaagcagggcagcaccaccgccaccagaccccccagagccctgctgtgcctgaccctgaagaaccccatcagaagagcctgcatcagcatcgtggagtggaagcccttcgagatcatcatcctgctgaccatcttcgccaactgcgtggccctggccatctacatccccttccccgaggacgacagcaacgccaccaacagcaacctggagagagtggagtacctgttcctgatcatcttcaccgtggaggccttcctgaaggtgatcgcctacggcctgctgttccaccccaacgcctacctgagaaacggctggaacctgctggacttcatcatcgtggtggtgggcctgttcagcgccatcctggagcaggccaccaaggccgacggcgccaacgccctgggcggcaagggcgccggcttcgacgtgaaggccctgagagccttcagagtgctgagacccctgagactggtgagcggcgtgcccagcctgcaggtggtgctgaacagcatcatcaaggccatggtgcccctgctgcacatcgccctgctggtgctgttcgtgatcatcatctacgccatcatcggcctggagctgttcatgggcaagatgcacaagacctgctacaaccaggagggcatcgccgacgtgcccgccgaggacgaccccagcccctgcgccctggagaccggccacggcagacagtgccagaacggcaccgtgtgcaagcccggctgggacggccccaagcacggcatcaccaacttcgacaacttcgccttcgccatgctgaccgtgttccagtgcatcaccatggagggctggaccgacgtgctgtactgggtgaacgacgccgtgggcagagactggccctggatctacttcgtgaccctgatcatcatcggcagcttcttcgtgctgaacctggtgctgggcgtgctgagcggcgagttcagcaaggagagagagaaggccaaggccagaggcgacttccagaagctgagagagaagcagcagctggaggaggacctgaagggctacctggactggatcacccaggccgaggacatcgaccccgagaacgaggacgagggcatggacgaggagaagcccagaaacatgagcatgcccaccagcgagaccgagagcgtgaacaccgagaacgtggccggcggcgacatcgagggcgagaactgcggcgccagactggcccacagaatcagcaagagcaagttcagcagatactggagaagatggaacagattctgcagaagaaagtgcagagccgccgtgaagagcaacgtgttctactggctggtgatcttcctggtgttcctgaacaccctgaccatcgccagcgagcactacaaccagcccaactggctgaccgaggtgcaggacaccgccaacaaggccctgctggccctgttcaccgccgagatgctgctgaagatgtacagcctgggcctgcaggcctacttcgtgagcctgttcaacagattcgactgcttcgtggtgtgcggcggcatcctggagaccatcctggtggagaccaagatcatgagccccctgggcatcagcgtgctgagatgcgtgagactgctgagaatcttcaagatcaccagatactggaacagcctgagcaacctggtggccagcctgctgaacagcgtgagaagcatcgccagcctgctgctgctgctgttcctgttcatcatcatcttcagcctgctgggcatgcagctgttcggcggcaagttcaacttcgacgagatgcagaccagaagaagcaccttcgacaacttcccccagagcctgctgaccgtgttccagatcctgaccggcgaggactggaacagcgtgatgtacgacggcatcatggcctacggcggccccagcttccccggcatgctggtgtgcatctacttcatcatcctgttcatctgcggcaactacatcctgctgaacgtgttcctggccatcgccgtggacaacctggccgacgccgagagcctgaccagcgcccagaaggaggaggaggaggagaaggagagaaagaagctggccagaaccgccagccccgagaagaagcaggagctggtggagaagcccgccgtgggcgagagcaaggaggagaagatcgagctgaagagcatcaccgccgacggcgagagcccccccgccaccaagatcaacatggacgacctgcagcccaacgagaacgaggacaagagcccctaccccaaccccgagaccaccggcgaggaggacgaggaggagcccgagatgcccgtgggccccagacccagacccctgagcgagctgcacctgaaggagaaggccgtgcccatgcccgaggccagcgccttcttcatcttcagcagcaacaacagattcagactgcagtgccacagaatcgtgaacgacaccatcttcaccaacctgatcctgttcttcatcctgctgagcagcatcagcctggccgccgaggaccccgtgcagcacaccagcttcagaaaccacatcctgttctacttcgacatcgtgttcaccaccatcttcaccatcgagatcgccctgaagatgaccgcctacggcgccttcctgcacaagggcagcttctgcagaaactacttcaacatcctggacctgctggtggtgagcgtgagcctgatcagcttcggcatccagagcagcgccatcaacgtggtgaagatcctgagagtgctgagagtgctgagacccctgagagccatcaacagagccaagggcctgaagcacgtggtgcagtgcgtgttcgtggccatcagaaccatcggcaacatcgtgatcgtgaccaccctgctgcagttcatgttcgcctgcatcggcgtgcagctgttcaagggcaagctgtacacctgcagcgacagcagcaagcagaccgaggccgagtgcaagggcaactacatcacctacaaggacggcgaggtggaccaccccatcatccagcccagaagctgggagaacagcaagttcgacttcgacaacgtgctggccgccatgatggccctgttcaccgtgagcaccttcgagggctggcccgagctgctgtacagaagcatcgacagccacaccgaggacaagggccccatctacaactacagagtggagatcagcatcttcttcatcatctacatcatcatcatcgccttcttcatgatgaacatcttcgtgggcttcgtgatcgtgaccttccaggagcagggcgagcaggagtacaagaactgcgagctggacaagaaccagagacagtgcgtggagtacgccctgaaggccagacccctgagaagatacatccccaagaaccagcaccagtacaaggtgtggtacgtggtgaacagcacctacttcgagtacctgatgttcgtgctgatcctgctgaacaccatctgcctggccatgcagcactacggccagagctgcctgttcaagatcgccatgaacatcctgaacatgctgttcaccggcctgttcaccgtggagatgatcctgaagctgatcgccttcaagcccaagcactacttctgcgacgcctggaacaccttcgacgccctgatcgtggtgggcagcatcgtggacatcgccatcaccgaggtgaacaacgccgaggagaacagcagaatcagcatcaccttcttcagactgttcagagtgatgagactggtgaagctgctgagcagaggcgagggcatcagaaccctgctgtggaccttcatcaagagcttccaggccctgccctacgtggccctgctgatcgtgatgctgttcttcatctacgccgtgatcggcatgcaggtgttcggcaagatcgccctgaacgacaccaccgagatcaacagaaacaacaacttccagaccttcccccaggccgtgctgctgctgttcagatgcgccaccggcgaggcctggcaggacatcatgctggcctgcatgcccggcaagaagtgcgcccccgagagcgagcccagcaacagcaccgagggcgagaccccctgcggcagcagcttcgccgtgttctacttcatcagcttctacatgctgtgcgccttcctgatcatcaacctgttcgtggccgtgatcatggacaacttcgactacctgaccagagactggagcatcctgggcccccaccacctggacgagttcaagagaatctgggccgagtacgaccccgaggccaagggcagaatcaagcacctggacgtggtgaccctgctgagaagaatccagccccccctgggcttcggcaagctgtgcccccacagagtggcctgcaagagactggtgagcatgaacatgcccctgaacagcgacggcaccgtgatgttcaacgccaccctgttcgccctggtgagaaccgccctgagaatcaagaccgaggagggccccagccccagcgaggcccaccagggcgccgaggaccccttcagacccgccggcaacctggagcaggccaacgaggagctgagagccatcatcaagaagatctggaagagaaccagcatgaagctgctggaccaggtggtgccccccgccggcgacgacgaggtgaccgtgggcaagttctacgccaccttcctgatccaggagtacttcagaaagttcaagaagagaaaggagcagggcctggtgggcaagcccagccagagaaacgccctgagcctgcaggccggcctgagaaccctgcacgacatcggccccgagatcagaagagccatcagcggcgacctgaccgccgaggaggagctggacaaggccatgaaggaggccgtgagcgccgccagcgaggacgacatcttcagaagagccggcggcctgttcggcaaccacgtgagctactaccagagcgacggcagaagcgccttcccccagaccttcaccacccagagacccctgcacatcaacaaggccggcagcagccagggcgacaccgagagccccagccacgagaagctggtggacagcaccttcacccccagcagctacagcagcaccggcagcaacgccaacatcaacaacgccaacaacaccgccctgggcagactgcccagacccgccggctaccccagcaccgtgagcaccgtggagggccacggcccccccctgagccccgccatcagagtgcaggaggtggcctggaagctgagcagcaacagatgccacagcagagagagccaggccgccatggccggccaggaggagaccagccaggacgagacctacgaggtgaagatgaaccacgacaccgaggcctgcagcgagcccagcctgctgagcaccgagatgctgagctaccaggacgacgagaacagacagctgaccctgcccgaggaggacaagagagacatcagacagagccccaagagaggcttcctgagaagcgccagcctgggcagaagagccagcttccacctggagtgcctgaagagacagaaggacagaggcggcgacatcagccagaagaccgtgctgcccctgcacctggtgcaccaccaggccctggccgtggccggcctgagccccctgctgcagagaagccacagccccgccagcttccccagacccttcgccaccccccccgccacccccggcagcagaggctggcccccccagcccgtgcccaccctgagactggagggcgtggagagcagcgagaagctgaacagcagcttccccagcatccactgcggcagctgggccgagaccacccccggcggcggcggcagcagcgccgccagaagagtgagacccgtgagcctgatggtgcccagccaggccggcgcccccggcagacagttccacggcagcgccagcagcctggtggaggccgtgctgatcagcgagggcctgggccagttcgcccaggaccccaagttcatcgaggtgaccacccaggagctggccgacgcctgcgacatgaccatcgaggagatggagagcgccgccgacaacatcctgagcggcggcgccccccagagccccaacggcgccctgctgcccttcgtgaactgcagagacgccggccaggacagagccggcggcgaggaggacgccggctgcgtgagagccagaggcagacccagcgaggaggagctgcaggacagcagagtgtacgtgagcagcctgtag

SEQ ID NO: 46957 - protein, 2146 aa, Artificial Sequence
  derived and/or modified sequence
MVNENTRMYIPEENHQGSNYGSPRPAHANMNANAAAGLAPEHIPTPGAALSWQAAIDAARQAKLMGSAGNATISTVSSTQRKRQQYGKPKKQGSTTATRPPRALLCLTLKNPIRRACISIVEWKPFEIIILLTIFANCVALAIYIPFPEDDSNATNSNLERVEYLFLIIFTVEAFLKVIAYGLLFHPNAYLRNGWNLLDFIIVVVGLFSAILEQATKADGANALGGKGAGFDVKALRAFRVLRPLRLVSGVPSLQVVLNSIIKAMVPLLHIALLVLFVIIIYAIIGLELFMGKMHKTCYNQEGIADVPAEDDPSPCALETGHGRQCQNGTVCKPGWDGPKHGITNFDNFAFAMLTVFQCITMEGWTDVLYWVNDAVGRDWPWIYFVTLIIIGSFFVLNLVLGVLSGEFSKEREKAKARGDFQKLREKQQLEEDLKGYLDWITQAEDIDPENEDEGMDEEKPRNMSMPTSETESVNTENVAGGDIEGENCGARLAHRISKSKFSRYWRRWNRFCRRKCRAAVKSNVFYWLVIFLVFLNTLTIASEHYNQPNWLTEVQDTANKALLALFTAEMLLKMYSLGLQAYFVSLFNRFDCFVVCGGILETILVETKIMSPLGISVLRCVRLLRIFKITRYWNSLSNLVASLLNSVRSIASLLLLLFLFIIIFSLLGMQLFGGKFNFDEMQTRRSTFDNFPQSLLTVFQILTGEDWNSVMYDGIMAYGGPSFPGMLVCIYFIILFICGNYILLNVFLAIAVDNLADAESLTSAQKEEEEEKERKKLARTASPEKKQELVEKPAVGESKEEKIELKSITADGESPPATKINMDDLQPNENEDKSPYPNPETTGEEDEEEPEMPVGPRPRPLSELHLKEKAVPMPEASAFFIFSSNNRFRLQCHRIVNDTIFTNLILFFILLSSISLAAEDPVQHTSFRNHILGNADYVFTSIFTLEIILKMTAYGAFLHKGSFCRNYFNILDLLVVSVSLISFGIQSSAINVVKILRVLRVLRPLRAINRAKGLKHVVQCVFVAIRTIGNIVIVTTLLQFMFACIGVQLFKGKLYTCSDSSKQTEAECKGNYITYKDGEVDHPIIQPRSWENSKFDFDNVLAAMMALFTVSTFEGWPELLYRSIDSHTEDKGPIYNYRVEISIFFIIYIIIIAFFMMNIFVGFVIVTFQEQGEQEYKNCELDKNQRQCVEYALKARPLRRYIPKNQHQYKVWYVVNSTYFEYLMFVLILLNTICLAMQHYGQSCLFKIAMNILNMLFTGLFTVEMILKLIAFKPKHYFCDAWNTFDALIVVGSIVDIAITEVNNAEENSRISITFFRLFRVMRLVKLLSRGEGIRTLLWTFIKSFQALPYVALLIVMLFFIYAVIGMQVFGKIALNDTTEINRNNNFQTFPQAVLLLFRCATGEAWQDIMLACMPGKKCAPESEPSNSTEGETPCGSSFAVFYFISFYMLCAFLIINLFVAVIMDNFDYLTRDWSILGPHHLDEFKRIWAEYDPEAKGRIKHLDVVTLLRRIQPPLGFGKLCPHRVACKRLVSMNMPLNSDGTVMFNATLFALVRTALRIKTEEGPSPSEAHQGAEDPFRPAGNLEQANEELRAIIKKIWKRTSMKLLDQVVPPAGDDEVTVGKFYATFLIQEYFRKFKKRKEQGLVGKPSQRNALSLQAGLRTLHDIGPEIRRAISGDLTAEEELDKAMKEAVSAASEDDIFRRAGGLFGNHVSYYQSDGRSAFPQTFTTQRPLHINKAGSSQGDTESPSHEKLVDSTFTPSSYSSTGSNANINNANNTALGRLPRPAGYPSTVSTVEGHGPPLSPAIRVQEVAWKLSSNRCHSRESQAAMAGQEETSQDETYEVKMNHDTEACSEPSLLSTEMLSYQDDENRQLTLPEEDKRDIRQSPKRGFLRSASLGRRASFHLECLKRQKDRGGDISQKTVLPLHLVHHQALAVAGLSPLLQRSHSPASFPRPFATPPATPGSRGWPPQPVPTLRLEGVESSEKLNSSFPSIHCGSWAETTPGGGGSSAARRVRPVSLMVPSQAGAPGRQFHGSASSLVEAVLISEGLGQFAQDPKFIEVTTQELADACDMTIEEMESAADNILSGGAPQSPNGALLPFVNCRDAGQDRAGGEEDAGCVRARGRPSEEELQDSRVYVSSL

SEQ ID NO: 46958 - DNA, 13504 bp, Artificial Sequence
  derived and/or modified sequence
ttattttttcaaatggtgtagccgccggaggtgcggtgctcagttcttggaaggggcccggatgtactgaggatgcgttacagtttcactcgaggaggcagtagtggaaaggagcagtttttggggtttgatgccataatgggaatcaggtaatcgtcggcggggaagaagaaacgctgcagaccacggcttcctcgaatcttgcgcgaaagccgccggcctcggaggagggattaatccagacccgccggggggtgttttcacatttcttcctcttcgtggctgctcctcctattaaaaccatttttggtccatggtcaatgagaatacgaggatgtacattccagaggaaaaccaccaaggttccaactatgggagcccacgccccgcccatgccaacatgaatgccaatgcggcagcggggctggcccctgagcacatccccaccccgggggctgccctgtcgtggcaggcggccatcgacgcagcccggcaggctaagctgatgggcagcgctggcaatgcgaccatctccacagtcagctccacgcagcggaagcggcagcaatatgggaaacccaagaagcagggcagcaccacggccacacgcccgccccgagccctgctctgcctgaccctgaagaaccccatccggagggcctgcatcagcattgtcgaatggaaaccatttgaaataattattttactgactatttttgccaattgtgtggccttagcgatctatattccctttccagaagatgattccaacgccaccaattccaacctggaacgagtggaatatctctttctcataatttttacggtggaagcgtttttaaaagtaatcgcctatggactcctctttcaccccaatgcctacctccgcaacggctggaacctactagattttataattgtggttgtggggctttttagtgcaattttagaacaagcaaccaaagcagatggggcaaacgctctcggagggaaaggggccggatttgatgtgaaggcgctgagggccttccgcgtgctgcgccccctgcggctggtgtccggagtcccaagtctccaggtggtcctgaattccatcatcaaggccatggtccccctgctgcacatcgccctgcttgtgctgtttgtcatcatcatctacgccatcatcggcttggagctcttcatggggaagatgcacaagacctgctacaaccaggagggcatagcagatgttccagcagaagatgacccttccccttgtgcgctggaaacgggccacgggcggcagtgccagaacggcacggtgtgcaagcccggctgggatggtcccaagcacggcatcaccaactttgacaactttgccttcgccatgctcacggtgttccagtgcatcaccatggagggctggacggacgtgctgtactgggtcaatgatgccgtaggaagggactggccctggatctattttgttacactaatcatcatagggtcattttttgtacttaacttggttctcggtgtgcttagcggagagttttccaaagagagggagaaggccaaggcccggggagatttccagaagctgcgggagaagcagcagctagaagaggatctcaaaggctacctggattggatcactcaggccgaagacatcgatcctgagaatgaggacgaaggcatggatgaggagaagccccgaaacatgagcatgcccaccagtgagaccgagtccgtcaacaccgaaaacgtggctggaggtgacatcgagggagaaaactgcggggccaggctggcccaccggatctccaagtcaaagttcagccgctactggcgccggtggaatcggttctgcagaaggaagtgccgcgccgcagtcaagtctaatgtcttctactggctggtgattttcctggtgttcctcaacacgctcaccattgcctctgagcactacaaccagcccaactggctcacagaagtccaagacacggcaaacaaggccctgctggccctgttcacggcagagatgctcctgaagatgtacagcctgggcctgcaggcctacttcgtgtccctcttcaaccgctttgactgcttcgtcgtgtgtggcggcatcctggagaccatcctggtggagaccaagatcatgtccccactgggcatctccgtgctcagatgcgtccggctgctgaggattttcaagatcacgaggtactggaactccttgagcaacctggtggcatccttgctgaactctgtgcgctccatcgcctccctgctccttctcctcttcctcttcatcatcatcttctccctcctggggatgcagctctttggaggaaagttcaactttgatgagatgcagacccggaggagcacattcgataacttcccccagtccctcctcactgtgtttcagatcctgaccggggaggactggaattcggtgatgtatgatgggatcatggcttatggcggcccctcttttccagggatgttagtctgtatttacttcatcatcctcttcatctgtggaaactatatcctactgaatgtgttcttggccattgctgtggacaacctggctgatgctgagagcctcacatctgcccaaaaggaggaggaagaggagaaggagagaaagaagctggccaggactgccagcccagagaagaaacaagagttggtggagaagccggcagtgggggaatccaaggaggagaagattgagctgaaatccatcacggctgacggagagtctccacccgccaccaagatcaacatggatgacctccagcccaatgaaaatgaggataagagcccctaccccaacccagaaactacaggagaagaggatgaggaggagccagagatgcctgtcggccctcgcccacgaccactctctgagcttcaccttaaggaaaaggcagtgcccatgccagaagccagcgcgtttttcatcttcagctctaacaacaggtttcgcctccagtgccaccgcattgtcaatgacacgatcttcaccaacctgatcctcttcttcattctgctcagcagcatttccctggctgctgaggacccggtccagcacacctccttcaggaaccatatcctaggcaatgcagactatgtcttcactagtatctttacattagaaattatccttaagatgactgcttatggggctttcttgcacaagggttctttctgccggaactacttcaacatcctggacctgctggtggtcagcgtgtccctcatctcctttggcatccagtccagtgcaatcaatgtcgtgaagatcttgcgagtcctgcgagtactcaggcccctgagggccatcaacagggccaaggggctaaagcatgtggttcagtgtgtgtttgtcgccatccggaccatcgggaacatcgtgattgtcaccaccctgctgcagttcatgtttgcctgcatcggggtccagctcttcaagggaaagctgtacacctgttcagacagttccaagcagacagaggcggaatgcaagggcaactacatcacgtacaaagacggggaggttgaccaccccatcatccaaccccgcagctgggagaacagcaagtttgactttgacaatgttctggcagccatgatggccctcttcaccgtctccaccttcgaagggtggccagagctgctgtaccgctccatcgactcccacacggaagacaagggccccatctacaactaccgtgtggagatctccatcttcttcatcatctacatcatcatcatcgccttcttcatgatgaacatcttcgtgggcttcgtcatcgtcacctttcaggagcagggggagcaggagtacaagaactgtgagctggacaagaaccagcgacagtgcgtggaatacgccctcaaggcccggcccctgcggaggtacatccccaagaaccagcaccagtacaaagtgtggtacgtggtcaactccacctacttcgagtacctgatgttcgtcctcatcctgctcaacaccatctgcctggccatgcagcactacggccagagctgcctgttcaaaatcgccatgaacatcctcaacatgctcttcactggcctcttcaccgtggagatgatcctgaagctcattgccttcaaacccaagcactatttctgtgatgcatggaatacatttgacgccttgattgttgtgggtagcattgttgatatagcaatcaccgaggtaaacaacgcagaggaaaactcccgcatctccatcaccttcttccgcctgttccgggtcatgcgtctggtgaagctgctgagccgtggggagggcatccggacgctgctgtggaccttcatcaagtccttccaggccctgccctatgtggccctcctgatcgtgatgctgttcttcatctacgcggtgatcgggatgcaggtgtttgggaaaattgccctgaatgataccacagagatcaaccggaacaacaactttcagaccttcccccaggccgtgctgctcctcttcaggtgtgccaccggggaggcctggcaggacatcatgctggcctgcatgccaggcaagaagtgtgccccagagtccgagcccagcaacagcacggagggtgaaacaccctgtggtagcagctttgctgtcttctacttcatcagcttctacatgctctgtgccttcctgatcatcaacctctttgtagctgtcatcatggacaactttgactacctgacaagggactggtccatccttggtccccaccacctggatgagtttaaaagaatctgggcagagtatgaccctgaagccaagggtcgtatcaaacacctggatgtggtgaccctcctccggcggattcagccgccactaggttttgggaagctgtgccctcaccgcgtggcttgcaaacgcctggtctccatgaacatgcctctgaacagcgacgggacagtcatgttcaatgccaccctgtttgccctggtcaggacggccctgaggatcaaaacagaagagggacccagcccatcagaggcccaccaaggggctgaggatcctttccgccctgcagggaacctagaacaagccaatgaggagctgcgggcgatcatcaagaagatctggaagcggaccagcatgaagctgctggaccaggtggtgccccctgcaggtgatgatgaggtcaccgttggcaagttctacgccacgttcctgatccaggagtacttccggaagttcaagaagcgcaaagagcagggccttgtgggcaagccctcccagaggaacgcgctgtctctgcaggctggcttgcgcacactgcatgacatcgggcctgagatccgacgggccatctctggagatctcaccgctgaggaggagctggacaaggccatgaaggaggctgtgtccgctgcttctgaagatgacatcttcaggagggccggtggcctgttcggcaaccacgtcagctactaccaaagcgacggccggagcgccttcccccagaccttcaccactcagcgcccgctgcacatcaacaaggcgggcagcagccagggcgacactgagtcgccatcccacgagaagctggtggactccaccttcaccccgagcagctactcgtccaccggctccaacgccaacatcaacaacgccaacaacaccgccctgggtcgcctccctcgccccgccggctaccccagcacggtcagcactgtggagggccacgggccccccttgtcccctgccatccgggtgcaggaggtggcgtggaagctcagctccaacaggtgccactcccgggagagccaggcagccatggcgggtcaggaggagacgtctcaggatgagacctatgaagtgaagatgaaccatgacacggaggcctgcagtgagcccagcctgctctccacagagatgctctcctaccaggatgacgaaaatcggcaactgacgctcccagaggaggacaagagggacatccggcaatctccgaagaggggtttcctccgctctgcctcactaggtcgaagggcctccttccacctggaatgtctgaagcgacagaaggaccgagggggagacatctctcagaagacagtcctgcccttgcatctggttcatcatcaggcattggcagtggcaggcctgagccccctcctccagagaagccattcccctgcctcattccctaggccttttgccaccccaccagccacacctggcagccgaggctggcccccacagcccgtccccaccctgcggcttgagggggtcgagtccagtgagaaactcaacagcagcttcccatccatccactgcggctcctgggctgagaccacccccggtggcgggggcagcagcgccgcccggagagtccggcccgtctccctcatggtgcccagccaggctggggccccagggaggcagttccacggcagtgccagcagcctggtggaagcggtcttgatttcagaaggactggggcagtttgctcaagatcccaagttcatcgaggtcaccacccaggagctggccgacgcctgcgacatgaccatagaggagatggagagcgcggccgacaacatcctcagcgggggcgccccacagagccccaatggcgccctcttaccctttgtgaactgcagggacgcggggcaggaccgagccgggggcgaagaggacgcgggctgtgtgcgcgcgcggggtcgaccgagtgaggaggagctccaggacagcagggtctacgtcagcagcctgtagtgggcgctgccagatgcgggcttttttttatttgtttcaatgttcctaatgggttcgtttcagaagtgcctcactgttctcgtgacctggagttaaccggaacagcgtcttcattcatttctgttgggaccagacgcggagcctgggtgcgcgagccgccctccgggaggaaggcgcccggctgcgtctgcagaggcggggagaggaggcggcgagggtcccggggcgcgaggaaggcgcctgccctctcccagctcgcaggccccgggcccggccgcgcctccgcggggagagcaccccggcttcccgcgcgccctcaccaaaaggaccctacagcaaacgggtgtctttcgactctgcttgtagaaaccatttgcacatattctgtacgagcctcgctgtctccctagagccagggccctgcggatttggagaagggagcggggcaggacttccaggaggaccccaacccggcccggagagggaggaggaggcctccaggggcgcggagctctggggatgggcgtcgggccggcagtggtgcggctcactccgtccctgcccacctgcgacgggatcccccgaccggcacgggccacgccgagctcccggccagccgccggcccgcaggcagcgcgagggaggagctgcgccgccggctccgcccaaccaggtggtgctgagcttccgctgagcgctcttttgttttgtggtttgacacttttcttgacagcatgttgcagtttcttttcggttttggttttttttaaatgttttattttgctttcccagcgggaggggaggaagaagagtgtttacaaagtcctgtagccccctcacctttctgttttcacttttgccaatgtacatcgggtttggttttcttgtattatttaaacggttgtggtttcctttttccacggaggttcaatagaagccgctgcaggagagttttaccaaccattgtgtatgcccaataatttgttatcatttccttaggtagtaacctatttttgttctggtttggttcggttatctaatggaaaggtaactggcaatgcacttgatgtggtcttgcacatgtgggtgatagagttgggttcctttttatgctgggtgtacaggtgggtttgggagagaggagcatgcgcgagagagtctccgagtgtgtgcgacgcgtgtgtgtgtggtgggttgtctgtgtgcatatgtcctgcccgtgtatatgcacccacaccatgtgcccgtgcacaccagtgactacgcagtcccccctttctggtttagctgtgggaagatctgaatctggggccgtttgaaagcaaaaacaaaccactgtctctgcttctgaaacgggaatcagtaactctttgcattttctgtcccacaagatatgcaaaaacaatgcaataatattcatttaaaaatacaattgtgagttgtgttggcattaaaactgtattttaaaaaaagacagaaatttaagggaaaaacacaagaaggcattttgcttcaatatattccgtgtaatgttttattgcattgataatgtttctgttgaagaaaccgttatacttgaattcaggtcagtttcagtatttttcaaatatttttttaaaactgaattgcaattgtgccaagcgaatataatgaattgaattaagttggttttcggattcacttcttgtatattttgctgcatgtaaagtaaatcattttgtatttggagtgtgacaagctttacctttgaactcaagtgcttttctatatgtggttgggggaaagggaacaagttttctttagtttgcacaatgagcaaaggtatcaccagtgtagtcattattctgctctccacaaacaggtttggacattactgttttgcatatcttgtgtttgcttacatttccctcaatttttccaaaatcgtttgctgggtatgtttgtaccgcctcttgctgtgagagaccaggacctattttattccagtcttcactctgtccactctgctctggtcatctgatttggtacttctccaagaacagcccttcactgtgaggtgcagggaggcgttctgatgagccctcagtcactgggccgtcatccgcatcccccatggaagaggtagctggctttcccttcccttccaccacacggaattttctctttggcttccttaggaaagtgtacactaaccgggaggataaaattaaagtcaggctgcttggagggaggggcatcctcacttccggattcttgttgctctacccaacaaggacagcaggggctcgagaaaggaactggtgaaaccctgatccatctgaaagtcaactctgcgtgctcctttctccatcccttcctcactctggagcagcctttccttcaggcttgccctaatgtttgggctgccggggagggggccaggacaagggaagaggcatccggagctcacagtgggggtgggaacagatttttgtgggggcatctctaatgctcacttatatctccctagaacatcactcttttggtgctgtgtccttcaaatgtatgtcaacagtggtggctgaaaagggactgctttggggaaaacaggacccaaccattcacccagaattgacccattaaatctcttccagtcctagtgttccctgagcccctcttggcacatatataagtaagctagaaattacaataagggacagtccattcctctatgacagcttgctggactgattcatgacaaagtggagaaatgtactcaatactccccggttaacacagtctagaaacagagtttctttatggatatccacacccaagtcatccaaactttcttgattccttttcactgccatcaaggtcctctagaaattgagtttaggtatcatcctttgaaaagttcccaagatttctaccaggaggtacacacaggcgttccctgtctagggcaggaggactatcctagcttgaccttctgatccactagaataagactggcgtatgatgcctgtcatcagaacagactggcacaagtagtgacatcaatgaaccacagcacaatcttccaagtgatgtctactctccacctaaaatggaattttccccatgaccttgtaaaacataattgtcacatcttccatacccctcctgacagcccccaagtgtcaggagaaaacagtcaggggctaagggcccaagggacttgaagaaacaacagtttaaggtctgcagtttggtcaacttaattcttgtcctccgaccagccctgcctctttcatttccagaccttggagaatttttcccagctttgattcagaaggtactagttataacccctttccttcttcttaatccaataggcctcactctcactgggaaatccactcaaaggaacaaggcaatgtctctcattctatttcccagttccaaattccaggtgcttgtctggagtgaagctacccgttactttctcccagcttttctccacccagcatgtctcctgcccatgcagctgaagacagtggggcaacctcaggagaagcagacctttccatgcccaagttcatctcctgagcaacagtgacacctagaaaatgaggactttggaagtcacccaaaagatggtggctactttatggagtcctgaagatacacagccaccactcctaaaggcaaagaaagaaaacacgaatgtaggtcagggatagagtggaaccctggtcatcggggtttttagcctcatcgtgggaaaggtggtaaaggaggatgatggcatctccatccctagaggccaagaattgaaatatcattgtcaaggattagaaacaattcagcaaagaggccacaaaaagggcctgctgactcccagaagacctctttaaaccccaggggaggcaaatacttgctgatggagtctgggccgtttccatattttaaagaagacctgcctctggggcaaatgtcagcacagagaggactgggaggagaatggaggcaagaaaagggcatattttgactccctctgtgcctcttcccagttcatggaaggatgtgttcagcttacccacccacagtgaccagtgtggtggagccgctgacatctcaaggatctatttgggaaggtgagaagagtactcattccatctgggggtgttgttccagccacatcagcctacctggtgggatgtgggggtgtctgccaccctgtcccccctctgctgatgtccctcccctcaggctgtccaggtgccacctgacacaggctgctgtgcaaagacaggcggggaagcccaaacctcactcccagggaggccctcagccgccagagtccaggttctccagaggctacgatttgaggaggttgagggggaagacaggagggaaagaaaagtcctacaactgtcaggaatggggcacctttccctgtccctaagcaaagctccctcttcccactgccctccccagccccagctccctgtcctccccaacacctagtgagaaagacggtgcgtggaagggagtcccatgggcagatgcttacacgacctctttgtgaagcctcttctgggtttaacttcattcatcaatttattcttatgtcaaagcaatgaaacttttctttctggagccagataccaatacaacaggtgaacgggtttctgccacatctctacattgacgggggatgcttgaacaacccccctcactacacagacacacaccgttaaggcacaagggctggggttgagctctagatgagggactttcctgctcctgcaagggtgagcactgtatacacagacaaggagggtgcagtagagtgactcccttggatggaagtagtaccatcagaacctactattattatgacataaattctatttacatacattgagagaatactacaatcaacactttttcctgggatgactttaagaggtttgagccacagcacctgaagtggcaaagatccatggtctttgtagggtattagagaactcttccagtcacctctgaaagcactctagatcttgcagctgagtggatgaagtgtaacaaatctgttgcacgctgagaggagtcagaattagcatttttcatgaaagttccccacgtctctactaagaatgaggaagaaaagactaagactaggtaattacacagaggcttgaaatgttacatcaccagagccaagtcctctcccttcagatcagttactggctgctacacagggacacccccaccttttcagggcatcccatgcactccacttctcaggatctaaggaatttgactttgtagggatcccagaaagggcactgtgccacttcccctggtgtgaatcagacatacattgtacattcatttctaaaattcactcatgcacctcaaaccaaggtcattatccaaaaaaaaaaaaaaaaagctctgggtggaagagtttgtaagttttaagagagggtcatttctatgtgaggaaatgcagaaatggacagaatgattcttattcactgtttgggtctggagaattcccattgtggaaatcttagagatctcaagtttattaccaagggaataaggaaaaaaaggtgagcaggcaccaggccaagcagtggctcccttgccaaggaacctgaggctgcaggtttcagggacccccttgaagaaacctctcctggccattggccaggagaaaagagaagtctctcctgtagagtcacaagagaagcaaaagagggtgggtcactgggtcctggacatagcccccaaccccaagacttcccaatatggagaaactacaccaatgtttaaaaggggaaaaggaaagaacttgtacatcaagggaagatgatttgtaaacacacagtcctgtgcagaaagatccccttcaggaggtgtctccagcatcccaaagctgtgcgcaccttctcttttcctgcctcaggccacctatgcatccagctgcagcccatacccacacctgaaatccatctcttgaatcccagccaggttatataccaccccattgccatgtcctgtcctggccagaatgcatgctgttcccccaagcctcgtgggagtgaggccatgggaaacagagatgagcatgtctggacaagtctgtgatggtagtggatgagaataacccatggcaaaacacgcacattcattaagaaatagggcgacagattccccgttggtgaagcactgaaaggtctattactctcataatattgctgttttattttaatccaccagagctaccatgcaaaactttcctcctgtgaaacgctccagataaagctcctctaatctccccttccctcatgtcctccagctcaaacccaccttcatcccccaaaccaatctgtatcatgcctgttatcagagaggcacagaaagatgggcagtgcctccgttgtcaccattccccacacccctacacacccccacaccctcccctccaggctccacgacttcacagtcttactgttgtaaatatcattgtacagtttgtaatcctcaaataatcccattgtcagaggcctcgcctgatgggccttctcaccctcgagaaaggccagggaatctagaaggggcaacccttcaaggagagcttcagggtcatctctgtgtgagacactattgtatattcctgtaagattgcatttttatctaaggaatgatgttatttaaaaaacaaacaaaaaacacaaaaaataagaattgcaaataaatttcttaacaatgtct

SEQ ID NO: 46959 - DNA, 6441 bp, Artificial Sequence
  derived and/or modified sequence
atggtgaacgaaaacactcggatgtatatccccgaagagaaccatcaaggctctaactatggttcaccaagaccggctcacgccaatatgaacgccaacgccgcagcagggctcgcaccagaacacataccgacccccggtgccgccttgagttggcaggccgctatcgatgctgcaaggcaggcgaaactgatgggatccgcaggaaatgccacaatttctaccgtctctagcacacagcggaagcgccagcaatacggcaagcctaagaagcagggctcaactacagcgactcgtcctccaagggcccttctgtgtctgacactgaaaaatccaatacgccgcgcttgcatttcaatcgttgagtggaaaccatttgaaattatcatactgctgacaatcttcgcgaactgcgtcgctctcgctatctatataccatttcctgaggatgattccaatgccacgaattctaatctcgagcgcgtagaatatctcttcctcatcatttttactgtagaggccttcctgaaggtgattgcctacgggctgttgttccacccaaatgcttatttgcggaacggctggaatctcttagattttattatcgtcgtggtggggctcttcagcgctattctggagcaggcaacaaaggccgatggcgcaaacgctctgggtggcaaaggagctggcttcgatgtcaaagcacttagagccttcagggtgctacggccgctgcgcctcgtctctggggtgccttccctacaggtggtgctgaacagcatcattaaggccatggtccctctacttcacatcgcactgctggtcttattcgtgattataatatacgctatcatcggtctggaactgtttatgggcaagatgcacaagacgtgttacaatcaagaaggcattgcagacgtgcctgcagaagacgatccaagcccctgcgctctggaaaccggccacggaagacagtgtcagaacggaacagtgtgcaagcctggatgggatgggcctaagcatggcattacgaattttgataatttcgctttcgccatgctgaccgtattccaatgtatcaccatggaaggctggactgatgtcttgtattgggtgaacgatgcagtaggacgtgactggccttggatttacttcgtgaccttaatcataattgggtcattctttgtgctgaacctcgtcctgggcgtgctcagcggcgagtttagcaaggaacgggagaaggccaaggctcggggagactttcagaagttgagggagaagcaacagctggaagaggatcttaaaggatacctggattggatcactcaggctgaagacatcgaccctgagaacgaggatgaggggatggatgaggagaagccccgcaatatgagcatgcctacgtccgagaccgagtctgtgaacactgagaatgtggccggcggggacatagagggggagaattgcggcgctagacttgcacaccgaatctccaaaagcaagtttagccgatactggagaaggtggaatcgattctgcagaaggaagtgccgggccgctgtaaagtcaaacgtattttactggttggtcatttttctggtcttcctaaataccttgacaatagcctcagaacactacaatcagcccaattggctaactgaagtgcaggataccgccaataaagcactacttgccttgttcaccgcagaaatgctcttgaaaatgtactctcttgggctacaggcttacttcgtgtccctttttaatcgcttcgactgttttgtcgtctgtggagggatcttagagacaatattagtggagacgaagataatgtctcccctgggcatcagtgtgctccgatgcgtgcggctactgaggatcttcaaaattaccaggtactggaactccctcagcaacttggtggcgagcctgctgaacagtgtgcgcagcatagcgagcctcctgctgttgctgttcctgtttattatcattttttctctcttggggatgcagctcttcggcggcaagtttaacttcgacgagatgcagactcggaggtctactttcgataatttcccacagagcctgctgaccgtcttccaaattctgaccggcgaggactggaacagtgttatgtacgatggaattatggcctacggaggcccatccttccctggcatgctggtttgcatctacttcattattctttttatctgtgggaactacatactgcttaacgtgttcttggccatcgcagtggataatctggctgatgctgaaagcctgacctctgcgcagaaggaggaagaggaagaaaaggagcggaagaagctggctcggacagccagtcccgagaagaaacaggagctcgtagaaaaacctgcggttggagagtctaaggaagaaaagatcgagctgaaatcaattactgccgacggcgaatctccgcctgctactaaaatcaacatggacgacttgcagcctaatgagaatgaagacaagtccccgtacccaaaccctgagacgacaggagaggaggacgaggaggagcccgagatgcctgtgggaccgagaccgagaccgctgtcagagctccacctgaaggagaaggccgttcccatgcctgaggcctcggccttctttatcttctcatccaataacagatttaggctccagtgccataggatcgtcaacgatactatcttcactaacctcatcctgttcttcatcctgttgagtagcatttcactcgccgctgaggatccagtccagcacacctctttcagaaaccatatccttgggaacgccgactatgtgttcacgagcatctttacccttgagatcattctaaagatgactgcgtacggcgcctttctacataaagggagcttttgccgcaactatttcaacattttggatctgctggtcgtgtctgtaagcttgatcagcttcgggatccagagttccgctattaatgtggtgaagattttacgcgtcttgcgcgttctcagaccactgcgcgccattaatagggctaaggggctcaagcatgttgtgcagtgtgtctttgtggcgattcgaacaattggaaacattgtgatagtgaccactctcctgcagtttatgttcgcatgcatcggggttcagctgtttaaaggcaagctctatacctgttcggattcaagtaagcagactgaggcagaatgcaaaggcaattacatcacctataaagacggagaggtagatcacccaattatacagccaaggtcgtgggaaaactcaaagtttgatttcgataacgtgttggctgcaatgatggccttgtttaccgttagcacattcgagggctggccggagctactgtaccgtagcatcgattcccatactgaggacaagggacccatctacaattacagagttgaaatctccattttctttattatttatattatcatcatcgcgttttttatgatgaacatttttgtgggcttcgtcatcgtcacttttcaggaacagggagagcaggagtataaaaactgcgaacttgataaaaaccaacgccagtgcgtggaatatgccctgaaggcacgacccctgcggaggtacattccgaagaaccagcaccaatacaaggtttggtatgttgtgaactctacatattttgaatatctaatgtttgtcctgatactcttaaataccatttgtctcgctatgcaacactacggccaatcgtgcctgttcaagatagctatgaacatcttgaacatgctgttcactggcctctttaccgttgagatgatcctgaaactgatagcattcaaacctaagcactatttttgcgacgcctggaataccttcgacgcattaattgtggtgggatctatagtggacatcgcaatcacagaggtaaacaatgcagaggagaattccagaatctccattacatttttccgacttttcagggtcatgagacttgttaagctcctgagccgaggtgaggggatcaggactctgctgtggacattcattaagagctttcaagctctcccttatgtggcactgcttatagttatgctgttctttatttatgccgtgatcggcatgcaggtcttcgggaagatagctttgaatgatactacggagataaatagaaacaacaacttccagacgttccctcaggcggtcctcctactgttcaggtgcgccactggcgaggcctggcaggacattatgttagcttgtatgccaggcaaaaagtgcgcccccgagagcgaaccaagcaacagcaccgaaggcgagactccttgtggcagcagcttcgctgtgttttacttcatctcattctacatgctgtgcgcttttcttattatcaacctctttgtggcagtaattatggacaactttgactacctcacacgggactggagcatactggggcctcaccacttggatgagttcaaacgaatttgggctgagtacgatcctgaggctaagggacggatcaaacatctggatgttgtcaccctcctgcgccggatccaacctcctctgggcttcggaaagctgtgtccccaccgggtagcctgcaagcggttggtttccatgaatatgccactaaactctgacgggaccgtcatgttcaatgcaactctatttgcactggtgagaaccgctctccggatcaaaaccgaggagggccccagtccttccgaggcacaccagggagctgaggaccccttccgccccgctggcaacctggagcaggccaacgaagaactcagggctattattaagaaaatatggaagcgaaccagtatgaaacttctggaccaggtcgtccctccagccggcgatgacgaggtcacggtgggaaagttttatgccacctttcttatccaggagtactttcgcaagttcaagaagaggaaagagcagggactggtgggcaaacccagccagagaaatgccctgtcattacaggctggcctccggacactccatgacataggacctgaaatccgtcgtgctatttctggcgatctgacggcagaggaagagcttgacaaagctatgaaggaggcggtgtctgccgcatctgaggatgacatcttccgccgggccggtggtctgtttggaaaccatgtgagctactaccagtccgacggtaggtccgcgttcccccagacatttactacacaacggccccttcacattaataaggcaggttcgagccagggggataccgaatcaccttcccacgagaaactcgtcgattccacatttacgcccagcagttactcttcaaccgggtcgaacgcaaatataaataacgctaacaacacggcattggggcgtctgccccggccggctggatacccatctaccgtgtccaccgtcgaaggccacggaccccctctctccccagcgatccgtgtgcaggaggtcgcttggaagctgagctccaaccgctgccatagtcgtgagagtcaggcggcaatggctggacaggaagagaccagtcaggatgagacctatgaggtcaaaatgaaccatgatacagaggcctgtagcgaaccctctctgctctccaccgagatgctgagctaccaggatgatgagaacaggcaactgacgttgccagaggaggataagagagatatccggcagagccccaagagagggttcctgagaagtgcttccttgggccgtagagcatcctttcacttggagtgtttgaagaggcagaaggataggggcggagacatctcccagaaaactgtgttacctctacacttagtgcaccatcaggcactcgcagttgcaggactgtcacctctcctccagcgctcccatagcccagcatccttccctagacctttcgccacaccgcctgcaaccccgggcagccgcggctggcccccccaacctgtgcccacactacgccttgaaggcgtggaatcctcagaaaagctcaattcctcatttccaagtatccactgtggatcttgggccgaaacgactcctggtgggggcgggagctcagctgccaggcgggttcggcctgtgagcctcatggtaccatcacaggccggcgctcctggccgacagtttcacggctcagcaagttcattagttgaggcggtcctgatcagtgaggggctgggacagttcgcccaagacccaaagtttattgaagtcactactcaagagttggctgacgcttgtgacatgaccatagaggagatggagtctgctgccgacaacatacttagcggcggcgctccacagagcccaaacggagctctgcttccattcgtgaactgcagggatgcgggtcaggatcgcgccggaggggaagaggatgccggctgtgttcgcgcgcgaggtcgaccttccgaggaggaactgcaggactccagggtttacgtatcgagcctgtag

SEQ ID NO: 46960 - DNA, 6441 bp, Artificial Sequence
  derived and/or modified sequence
atggtgaatgaaaacaccaggatgtacatccctgaggagaaccaccagggcagcaactacggcagccccaggcctgcccacgccaacatgaatgccaatgctgctgctggcctggcccctgagcacatccccacccctggggccgccctgtcctggcaggccgccattgatgctgcccggcaggccaagctgatgggcagcgctggaaatgccaccatcagcacagtgagcagcacccagaggaagaggcagcagtatggcaagcccaagaagcagggcagcaccacagccacccggcccccccgggccctgctgtgcctgaccctgaagaaccccatccggcgggcctgcatcagcatcgtggagtggaagccctttgagatcatcatcctgctgaccatctttgccaactgtgtggccctggccatctacatccccttcccagaagatgacagcaatgccaccaacagcaacctggagcgggtggagtacctgttcctgatcatcttcaccgtggaggccttcctgaaggtgattgcctacggcctgctcttccaccccaatgcctacctgagaaatggctggaacctgctggacttcatcatcgtggtggtgggcctcttcagcgccatcctggagcaggccaccaaggcagatggagccaatgccctgggcggcaaaggagctggctttgatgtgaaggccctgcgggccttccgggtgctgcggcccctgcggctggtgtctggagtgcccagcctgcaggtggtgctgaacagcatcatcaaggccatggtgcccctgctgcacatcgccctgctggtgctgtttgtgatcatcatctatgccatcatcggcctggagctgttcatgggcaagatgcacaagacctgctacaaccaggagggcattgctgatgtgcctgcagaagatgaccccagcccctgtgccctggagaccggccacggccggcagtgccagaatggcaccgtgtgcaagccaggctgggatggccccaagcacggcatcaccaactttgacaactttgcctttgccatgctgactgtgttccagtgcatcaccatggagggctggacagatgtgctgtactgggtgaatgatgctgtgggccgggactggccctggatctactttgtgaccctcatcatcatcggcagcttctttgtgctgaacctggtgctgggcgtgctgtctggagagttcagcaaggagcgggagaaggccaaggcccggggggacttccagaagctgcgggagaagcagcagctggaggaggacctgaagggctacctggactggatcacccaggctgaagatattgatcctgaaaatgaagatgagggcatggatgaggagaagcccaggaacatgtccatgcccaccagcgagacagaatctgtgaacacagaaaatgtggccggcggggacatcgagggggagaactgtggggcccggctggcccaccgcatcagcaagagcaagttcagccgctactggaggcgctggaaccgcttctgcaggaggaagtgcagagctgctgtgaagagcaatgtgttctactggctggtgatcttcctggtgttcctgaacaccctgaccatcgccagcgagcactacaaccagcccaactggctgacagaggtgcaggacacagccaacaaggccctgctggccctcttcaccgctgagatgctgctgaagatgtacagcctgggcctgcaggcctactttgtgtccctcttcaacagatttgactgctttgtggtgtgtggcggcatcctggagaccatcctggtggagaccaagatcatgagccccctgggcatctctgtgctgcgctgtgtgcggctgctgcgcatcttcaagatcacccgctactggaacagcctgagcaacctggtggccagcctgctgaacagcgtgcgcagcatcgccagcctgctgctgctgctcttcctgttcatcatcatcttcagcctgctgggcatgcagctgtttggaggcaagttcaactttgatgagatgcagaccaggaggagcacctttgacaacttcccccagagcctgctgaccgtcttccagatcctgaccggggaggactggaacagcgtgatgtatgatggcatcatggcctatggaggccccagcttccctggcatgctggtgtgcatctacttcatcatcctcttcatctgtggcaactacatcctgctgaatgtgttcctggccatcgctgtggacaacctggctgatgctgagagcctgaccagcgcccagaaggaggaggaggaggagaaggagaggaagaagctggccaggacagccagccctgagaagaagcaggagctggtggagaagccagctgtgggggagagcaaggaggagaagattgagctgaagagcatcacagcagatggagagagccccccagccaccaagatcaacatggatgacctgcagcccaatgaaaatgaagacaagagcccctaccccaaccctgagaccactggagaggaggatgaggaggagcctgagatgcctgtgggcccccggccccggcccctgtctgagctgcacctgaaggagaaggctgtgcccatgcctgaggccagcgccttcttcatcttcagcagcaacaaccgcttccggctgcagtgccaccgcatcgtgaatgacaccatcttcaccaacctgatcctcttcttcatcctgctgagcagcatcagcctggccgctgaggaccctgtgcagcacaccagcttcaggaaccacatcctgggcaatgctgactatgtgttcaccagcatcttcaccctggagatcatcctgaagatgacagcctatggagccttcctgcacaagggcagcttctgcaggaactacttcaacatcctggacctgctggtggtgtctgtgtccctcatcagctttggcatccagagcagcgccatcaacgtggtgaagatcctgcgggtgctgcgggtgctgcggcccctgcgggccatcaacagagccaagggcctgaagcacgtggtgcagtgtgtgtttgtggccatccgcaccatcggcaacatcgtcatcgtgaccaccctgctgcagttcatgtttgcctgcatcggcgtgcagctgttcaagggcaagctgtacacctgcagcgacagcagcaagcagacagaagctgagtgcaagggcaactacatcacctacaaggatggagaggtggaccaccccatcatccagcccaggtcctgggagaacagcaagtttgattttgacaacgtgctggccgccatgatggccctcttcaccgtgtccacctttgagggctggccagagctgctgtaccgcagcattgacagccacacagaggacaagggccccatctacaactacagagtggagatcagcatcttcttcatcatctacatcatcatcatcgccttcttcatgatgaacatctttgtgggcttcgtcatcgtgaccttccaggagcagggcgagcaggagtacaagaactgtgagctggacaagaaccagaggcagtgtgtggagtatgccctgaaggcccggcccctgcggcgctacatccccaagaaccagcaccagtacaaggtgtggtacgtggtgaacagcacctactttgagtacctgatgtttgtgctgatcctgctgaacaccatctgcctggccatgcagcactacggccagagctgcctcttcaagatcgccatgaacatcctgaacatgctgttcaccggcctcttcaccgtggagatgatcctgaagctgattgccttcaagcccaagcactacttctgtgatgcctggaacacctttgatgccctgattgtggtgggcagcatcgtggacatcgccatcacagaggtgaacaatgctgaggagaacagccgcatcagcatcaccttcttccgcctcttccgggtgatgaggctggtgaagctgctgagcagaggagagggcatccgcaccctgctgtggaccttcatcaagagcttccaggccctgccctacgtggccctgctgattgtgatgctgttcttcatctatgctgtgattggcatgcaggtgtttgggaagatcgccctgaatgacaccacagagatcaacagaaacaacaacttccagaccttcccccaggccgtgctgctgctcttccgctgtgccactggagaggcctggcaggacatcatgctggcctgcatgcctgggaagaagtgtgcccctgagagcgagcccagcaacagcacagaaggagagaccccctgtggcagcagctttgctgtgttctacttcatctccttctacatgctgtgtgccttcctgatcatcaacctgtttgtggccgtcatcatggacaactttgactacctgacccgggactggagcatcctgggcccccaccacctggatgagttcaagaggatctgggccgagtatgaccctgaggccaagggccgcatcaagcacctggatgtggtgaccctgctgcggcgcatccagccccccctgggctttgggaagctgtgcccccaccgggtggcctgcaagaggctggtgtccatgaacatgcccctgaacagtgatggcaccgtgatgtttaatgccaccctgtttgccctggtgaggacagccctgcgcatcaagacagaggagggccccagccccagcgaggcccaccagggcgctgaggaccccttccggcctgctggcaacctggagcaggccaatgaggagctgcgggccatcatcaagaagatctggaagaggacctccatgaagctgctggaccaggtggtgcccccagctggagatgatgaggtgacagtgggcaagttctacgccaccttcctgatccaggagtacttcaggaagttcaagaagaggaaggagcagggcctggtgggcaagcccagccagagaaatgccctgagcctgcaggccggcctgcggaccctgcatgacatcggccctgagatccggcgggccatcagcggggacctgacagctgaggaggagctggacaaggccatgaaggaggccgtgtctgctgcctctgaagatgacatcttcagaagagctgggggcctgtttggaaaccacgtgtcctactaccagagtgatggccgcagcgccttcccccagaccttcaccacccagaggcccctgcacatcaacaaggccggcagcagccagggcgacacagagagccccagccatgagaagctggtggacagcaccttcacccccagcagctacagcagcacaggcagcaatgccaacatcaacaatgccaacaacacagccctgggccgcctgcccaggcctgctggctaccccagcacagtgtccacagtggagggccacggcccccccctgagccctgccatccgggtgcaggaggtggcctggaagctgagcagcaaccgctgccacagccgggagagccaggccgccatggccggccaggaggagaccagccaggatgagacctatgaggtgaagatgaaccacgacacagaggcctgcagcgagcccagcctgctgagcacagagatgctgagctaccaggatgatgaaaatcggcagctgaccctgcctgaggaggacaagagggacatccggcagagccccaagaggggcttcctgcggagcgccagcctgggcagaagagccagcttccacctggagtgcctgaagaggcagaaggacagaggaggagacatcagccagaagacagtgctgcccctgcacctggtgcaccaccaggccctggccgtggccggcctgagccccctgctgcagaggagccacagccctgccagcttcccccggccctttgccaccccaccagccaccccaggcagccggggctggccaccccagcctgtgcccaccctgcggctggagggcgtggagagcagcgagaagctgaacagcagcttccccagcatccactgcggctcctgggccgagaccacccctgggggcggcggcagcagcgctgccaggagagtgcggcctgtgtccctgatggtgcccagccaggccggggcccctggccggcagttccacggcagcgccagcagcctggtggaggccgtgctgatcagcgagggcctgggccagtttgcccaggaccccaagttcatcgaggtgaccacccaggagctggctgatgcctgtgacatgaccatcgaggagatggagagcgctgctgacaacatcctgtctggaggagccccccagagccccaatggagccctgctgccctttgtgaactgcagagatgctggccaggaccgggccggcggggaggaggatgctggctgtgtgcgggcccggggccggcccagcgaggaggagctgcaggacagccgggtgtatgtgagcagcctgtag

SEQ ID NO: 46961 - DNA, 6441 bp, Artificial Sequence
  derived and/or modified sequence
atggtgaacgagaacacccggatgtacatccccgaggagaaccaccaggggtcgaattatggttctccccggccggctcacgcaaatatgaatgctaacgctgccgctggcctcgccccagaacacatccctactcctggagccgcgctatcatggcaagccgcaattgatgcagcccgccaagccaaactcatgggctcagccgggaatgctactatctctacagtcagctccacccagcgtaaacggcagcagtatggtaaacctaagaagcagggaagcacgaccgcaactcggccccccagagctctcctttgcctgactctgaagaacccaatccgaagggcatgtatttcgattgtcgaatggaagcccttcgaaattatcattctccttacgatatttgccaattgcgtggccctggcaatatacattcccttcccggaggatgattccaacgctactaactcaaatcttgagcgggtcgagtatttatttttgatcattttcacagtcgaggccttccttaaagtcatcgcgtatggattactgttccaccctaatgcttatcttcgtaacgggtggaatctcctggatttcattattgtagtggtcggcctcttcagcgctattctggaacaggcaaccaaagcggacggagctaacgctctgggaggcaaaggagctggcttcgatgtgaaggctcttcgcgctttcagagttctgagacctcttcgcttagtaagcggggtaccctcactgcaggtcgtgttaaactcaatcatcaaggctatggttcctttactgcacattgccctgctggtactgttcgtcatcatcatttatgccataatcggtcttgagctgtttatgggcaaaatgcacaaaacatgttacaatcaagaaggaatcgcggacgtgcccgcagaggatgatccctcaccctgtgctctggagactgggcatgggagacaatgtcagaacggcacagtctgtaaaccaggttgggacgggccaaagcacggaattactaactttgacaactttgccttcgctatgcttaccgtgttccagtgcatcaccatggagggttggactgatgtgctctattgggtcaatgatgccgtcggacgagactggccttggatttacttcgtcaccctgattataattggttcgtttttcgttctcaacctcgtcctcggcgtgttatcaggcgagttctctaaggagcgcgaaaaagccaaggccaggggggattttcagaagttgcgggagaagcagcagttggaggaggacttgaaggggtacttggattggatcacgcaggcagaagacatcgatccggagaacgaggatgaaggcatggacgaggagaagccacggaacatgtccatgcctaccagcgagacagagtccgtaaacaccgagaatgtcgccgggggagacattgaaggcgagaattgtggcgctcggcttgcgcaccggattagcaagtccaaattttcacgctattggcggcggtggaatcggttctgtcgacgaaaatgccgggccgccgtcaagagcaatgtcttctattggctggtgattttcctagtctttctgaacacactcactattgcctctgagcactataaccagccaaactggctgactgaagtacaggatacagctaacaaggccttacttgccctgtttacggctgaaatgttgcttaaaatgtattcgctgggtttgcaggcttactttgtgtcactcttcaataggttcgattgttttgtcgtgtgtggtggtattctggagaccatcttagtggagaccaagatcatgtctcccttaggaatttctgtgctgaggtgcgttaggcttctgcgcattttcaagatcacacgatattggaactctctctcaaatttagtagccagcttactgaacagtgtccgaagcatcgcaagcctgcttttattattgttcctctttattatcattttttcgcttctcggaatgcagctctttggaggcaagtttaatttcgacgagatgcagacacggagaagcaccttcgacaacttcccccagtcattgctaactgtgtttcagatcctcaccggagaagactggaatagcgttatgtatgacggcatcatggcctacggggggccctcttttcccgggatgttggtgtgtatttattttatcatactctttatttgcggaaactacatcttgttaaacgtgtttcttgccattgctgtcgataatttagcggacgctgaaagcctgacctctgctcaaaaggaggaggaggaagagaaagaacgtaagaagctggccaggaccgcttctcctgagaagaaacaggagctggtcgaaaagccagctgtcggtgagtcaaaggaggaaaaaattgagttgaagtccatcaccgccgacggggaatctccacctgcaacaaagataaacatggatgacctgcaacctaacgaaaacgaggataagagtccctacccaaaccctgaaacaactggcgaggaagacgaggaggaacccgagatgcccgttggtccacgaccccgccctctaagtgaactgcaccttaaggagaaggctgtgcctatgcctgaagccagtgcattttttatcttctcctctaacaataggttcaggttgcagtgtcacaggattgtaaatgacacaatttttactaacctcatcctgtttttcatcctgttgtcatccatctcgctggcagccgaagatcctgtgcagcatacctcatttagaaaccatattttaggtaacgctgactatgtgtttacgtccatcttcacgcttgaaattattttaaaaatgacagcctacggcgcttttcttcataaagggtcattttgcaggaattatttcaatatacttgatttgcttgtggtgagcgttagtctcattagctttggtatacagagctccgccattaatgttgttaagatcctgcgcgtgctgagagttctgaggccccttcgtgccattaaccgggcgaaaggactcaaacatgtagtacaatgtgtgttcgttgctatccgaaccattggcaacatcgtgattgtcaccacacttctccagtttatgtttgcttgcatcggggtgcaactgtttaaaggtaagctatacacctgcagcgactcctccaagcaaaccgaggccgagtgcaaggggaactacatcacctacaaggacggcgaggtggaccaccctatcattcaaccaagatcttgggaaaattcaaagttcgactttgacaatgtcctagcagccatgatggctctatttacagtgtctaccttcgagggatggcccgagctgctgtacaggagcatcgattctcatactgaggataagggacctatctacaactacagggtcgagatttcaatcttttttatcatatacattatcattatcgcattttttatgatgaacatctttgtaggattcgtaattgttacgttccaggaacaaggggaacaagagtacaagaactgcgagctggacaaaaaccaacgccaatgcgttgagtatgcccttaaggcacgcccgttacggagatatatccctaagaatcagcaccagtacaaagtttggtatgtggtgaacagtacatattttgagtaccttatgttcgtgcttatactgctcaacacaatctgtctcgcaatgcagcattacggccagagctgcctcttcaagattgcgatgaatattctgaacatgctgtttactggattgtttaccgtggagatgatcctgaaactgatcgctttcaaaccaaagcactatttttgcgacgcctggaacaccttcgacgccttgattgtcgtgggctctattgtagacatcgcaatcaccgaagttaataacgctgaagaaaatagcagaatttctatcacctttttccggctgtttagagtgatgcgtctagtgaaactactctctcgaggggagggcataaggactctactgtggactttcattaaatcctttcaggcattaccctatgtcgctctactaattgtgatgcttttcttcatctacgcggtcatcggcatgcaggtctttggcaagattgctcttaatgacaccactgagatcaataggaataacaattttcagacattcccccaggcagtcctgttactctttcgatgtgccaccggggaagcatggcaagacatcatgctggcctgtatgcctggcaagaaatgcgcacctgaaagtgaaccctcaaattccaccgagggggagaccccatgtggcagctcgtttgcagtgttttacttcatctccttctatatgctgtgtgccttcctgatcattaatctgttcgtagcagtaatcatggataactttgactacttgacccgtgactggagcatcctcgggcctcaccatctcgacgaattcaaaagaatctgggcagaatatgatccagaggctaaaggcagaattaaacacttagatgtggttactctgctgcggcggatccagccaccactaggctttggaaagctttgccctcatcgcgtggcatgtaagcggcttgtcagcatgaatatgccgctgaactcagacggcaccgtgatgttcaatgcaaccctgtttgcccttgttcgaactgcactgcggattaagactgaagaggggccatccccctcagaagcgcaccagggcgctgaagacccttttaggcctgctgggaatctggagcaggcaaacgaagagcttcgggcaattatcaaaaagatatggaaaaggacaagcatgaagttgctcgatcaagtggtacctcctgccggtgacgacgaagtaacggtgggcaagttctacgcgaccttcctgattcaggaatactttagaaaattcaagaagcggaaagaacaaggcctggtgggaaaaccctcccagcgaaatgctcttagcctgcaggccggactcaggactttgcacgacatcggtcccgagattaggagagcgattagcggcgacctgacagccgaggaagaactcgataaagccatgaaggaagccgtgtccgcggcaagcgaggatgacattttccgccgtgctggtggcctgttcggcaaccatgtgtcttactaccaatcagatggcagatcggccttccctcaaacattcacaactcaaaggcctctgcacatcaacaaagctggaagcagtcagggtgacacagaaagcccatctcatgagaagcttgtggacagtacatttacaccctcttcatactcttccacaggatctaatgctaatatcaataacgctaataacactgcacttggtcgactgcccagacctgccggctatccttctacagtcagcactgtggaaggccatggcccgccattgtcccccgctatccgcgttcaagaggtggcctggaagctatccagtaaccggtgccatagcagagagagccaggcagcaatggccggccaggaagaaacgtcccaggatgagacctatgaggtaaagatgaatcatgataccgaggcttgtagtgaaccaagcttgctctctaccgaaatgctgagctatcaagatgatgagaaccggcaactgacactgcccgaagaggataaaagagacatcagacaaagtccaaagagaggcttcctgcgcagcgcgagcttgggacgtagagcgagctttcacctcgagtgtctgaagcgccagaaagaccgcgggggggacataagtcagaagaccgtgctgccgctgcacctcgtacatcatcaagcccttgcagtggcagggctgtccccgctgttgcagagatctcatagcccagcctcattccctcggccattcgccactccgcctgcaacacctggatcacgcggctggccaccccaacccgtgcctacacttcgccttgagggcgtggagtctagcgaaaagctgaacagctcttttccttcaatccactgcgggagctgggctgagacaacacccgggggcggtggcagcagcgcagcccgtagggtgcgccctgtgtccctcatggtgccgtcacaggctggggcacctgggaggcagttccacgggagcgcgagcagccttgttgaagcagtcctgatcagcgaggggttgggccagttcgcacaagatcccaaattcattgaggtgaccacacaggagctggccgatgcatgcgatatgaccattgaagaaatggaaagtgccgccgataacattcttagcgggggcgcgcctcaaagtcctaatggagctctgttgccatttgtgaactgccgtgacgctggtcaggaccgagctgggggtgaggaggatgctggatgtgtacgggcccggggccggcccagcgaagaagagctgcaggattcacgtgtgtatgtgtccagcctctag

SEQ ID NO: 46962 - DNA, 6440 bp, Artificial Sequence
  derived and/or modified sequence
atggtcaacgagaatactcggatgtacataccggaagaaaaccaccagggctccaactacggtagccccaggccggctcacgctaacatgaatgcgaatgctgctgcgggactcgccccagaacatatccctactccaggggctgcactgtcttggcaggcagccattgacgcagcgcgtcaagcgaaactcatgggtagtgcgggtaatgccactatttccaccgtctcttctacccagaggaagcgtcaacagtatggaaaacctaagaaacagggctcaactacagccacccgtcctccccgagccctgctttgcctgaccttaaagaacccaatccgcagggcctgtatcagcatcgtggaatggaaacctttcgaaatcatcattctgttaaccatattcgcaaactgcgtagccctggctatttacattcccttcccagaggacgacagtaacgccacgaatagcaatctggaaagagtcgagtatctatttcttattatctttaccgtagaagcttttctcaaggtcatcgcgtatgggttactgtttcacccaaatgcttacctgagaaatgggtggaaccttctcgatttcataatcgtcgtcgttggcctcttttcagctattctggaacaggctaccaaagccgatggtgccaatgctttgggcggtaaaggagcagggttcgatgttaaggcactgagggcctttcgtgttctgcgaccattgaggctcgtctccggtgttcccagccttcaagttgtgttgaattccattatcaaagccatggtccccctcctgcacatcgcactgctggtactgtttgtgataataatttatgctataatcggactcgagttgttcatggggaagatgcataagacctgttataatcaggaaggaattgctgacgtgcccgcagaggacgacccttcaccctgcgccctcgagaccggacacggaagacagtgccaaaatggaaccgtttgtaaacccggatgggatggccctaagcatggaatcacaaatttcgataactttgcctttgcaatgctgactgttttccagtgtataaccatggagggatggacagacgtgctgtactgggtgaacgatgcagtggggagagattggccttggatctatttcgtgactctgatcataataggctctttcttcgtcctgaacctagttcttggggtgctcagtggagaattttccaaagaaagggagaaggccaaggctcgcggagattttcaaaagttgcgtgaaaagcagcaactggaagaagacctgaaagggtacctggactggattacccaagcagaggatatcgaccctgagaacgaggacgaaggcatggacgaagagaagccgcgaaatatgtccatgccaacctcagagacggagtctgtgaatactgagaacgtcgcaggcggtgatattgagggggagaattgcggcgctcgtctggcccataggatatcaaagagcaagtttagccgctattggcgccgttggaaccgattctgcagaaggaaatgtagggcagctgtcaaatccaacgtgttctattggctcgtgatttttctggtcttccttaatacgctcaccatcgcgtctgaacattataaccagcccaattggttaaccgaggtgcaggacaccgccaacaaagcactcttggccctgttcactgccgaaatgctgcttaagatgtattcattgggactccaggcctacttcgtgagcctctttaatcgctttgattgttttgtagtgtgcggagggatcttagagactatattagtcgagaccaagataatgtctccacttggcataagcgttctgcggtgcgtacggctgcttagaatattcaagattactcggtattggaatagcttatcgaatcttgtggccagcttattgaactcagtgagatccattgccagccttcttctcctgctgtttctgttcatcatcatctttagtctgctcgggatgcaactgtttggcggaaagttcaactttgatgagatgcagacacgaaggtctaccttcgataacttcccccagtccctgctcacagttttccaaatcttaactggagaggattggaacagcgtgatgtacgatgggatcatggcgtatggcggtccatcctttccaggaatgctggtttgcatttatttcatcatccttttcatatgcgggaattacatattacttaatgtatttttggccatcgctgtggataaccttgccgacgctgagagtctgacctctgcccaaaaggaggaagaggaggaaaaagagagaaaaaagctggctcgtaccgcctctccagagaagaaacaggaactcgttgagaaacccgcagttggagagtctaaggaggaaaaaattgagttaaagagcatcaccgccgatggggagagtccgccagcaacaaaaatcaacatggacgacctgcagccaaacgaaaatgaagacaaaagcccctaccccaatcccgagacaacaggggaggaggatgaggaagagccagaaatgccagttggcccacgcccaagacccctctcagaactgcacctgaaggaaaaggctgtccctatgccagaagcatccgccttttttattttcagtagcaataatcgattcaggctccagtgccacaggattgtcaatgataccatttttaccaacctcattctgtttttcatcctgcttagttccatatctttggccgctgaagatcctgttcaacacacctcatttagaaaccatatcctgggcaacgccgactatgtattcacttccatcttcacgctggagattattcttaagatgacggcctatggcgcttttctccacaaaggcagcttctgtcggaactatttcaacatactggacttgctcgttgtttcagtatcactcatctccttcggaattcaatctagtgctattaacgtggttaagatcctccgcgtgctgagggttttacggcctttacgggcaataaacagggcgaaggggctgaaacatgtcgtgcagtgtgtgtttgtggctatccgcactatcggaaatatcgtgattgtcaccaccttgcttcagtttatgttcgcatgtatcggcgtgcagcttttcaagggtaaactgtacacctgttcagacagcagcaaacagactgaggcggagtgcaagggaaattacatcacctacaaagacggtgaggttgatcatcccatcatccagccacgctcttgggaaaacagcaagtttgatttcgataatgtgctggcagctatgatggcccttttcacggtgagtaccttcgaggggtggcctgagctcctctacagaagcattgacagccatacggaggacaaaggtccaatctataattatagagtggagatttcaattttttttataatttatataattataattgcctttttcatgatgaacatcttcgttgggtttgttatcgtgacgttccaagagcagggcgaacaggagtataagaactgtgaactagacaaaaaccagagacaatgtgtggagtatgctctgaaagctcgtcctctgaggaggtacatccctaagaatcaacaccaatacaaagtgtggtacgtcgtcaatagcacgtatttcgaatatcttatgtttgtcttgatcctgctgaacacgatatgtttagccatgcagcactatgggcagtcgtgtctgtttaaaatcgctatgaatattttaaacatgttgtttacaggtctatttacagtagagatgatcctgaaattaattgcattcaaacctaagcactatttctgtgacgcttggaataccttcgatgccctgatcgtcgtcgggtcaatagtagatatcgcaatcacggaggtgaataatgcggaagaaaacagcaggataagtattaccttcttccggttgtttcgggttatgcggttagtgaaactcctgtctcggggagagggaattagaactctactgtggaccttcattaagagcttccaagcactcccctacgtggcccttctgattgtcatgctgttctttatatacgctgtcatcgggatgcaggttttcgggaagattgctctcaacgatacgacagaaatcaataggaataacaactttcaaacatttccacaggcagtcctgctactgttcagatgtgctacaggtgaggcctggcaggatatcatgctagcatgtatgcccggtaagaagtgcgccccagagtcagagccatctaattccaccgagggcgaaacgccgtgtggttcctcatttgccgtcttctacttcataagtttctacatgctctgtgcgttcttgatcatcaatctgttcgtcgccgtgatcatggacaacttcgattatctgacaagggactggtctatcctaggaccacaccatctggacgagtttaagcgtatctgggcagagtacgatcctgaagctaaaggccgaattaagcatcttgatgtggttaccctgctgcgcaggattcagccacctttggggtttgggaaactctgtccacaccgagtggcctgcaaaaggctggtcagcatgaatatgcctctcaattctgatgggacagtcatgttcaacgccacactgttcgctttagtgcggaccgccctccggatcaagaccgaggagggcccttcccctagcgaggcccatcagggagctgaagacccctttcgtcctgccggtaacctggaacaggccaatgaggagttgcgtgctatcatcaagaagatatggaagaggacatccatgaaactcctggaccaggtggtaccacccgctggcgacgatgaggtaactgtgggtaagttttatgccacttttctcatacaggagtacttccgaaagttcaagaaaagaaaggagcagggtctagtgggtaagccttcacagaggaatgctttgtcacttcaagctggcctgcggacgctgcacgatatcggtcccgagattcggcgtgctatcagcggggacctgactgccgaagaggagctggataaggctatgaaggaggccgtgtccgctgcatcagaagatgacattttcagacgagcgggtggtctcttcggcaaccacgtgtcttactaccagtcggacggcaggagtgcctttccccaaacgttcactactcagcggccacttcatatcaacaaggccggttccagtcagggcgacacagagtctccaagccacgaaaaattagtggacagcaccttcactccctccagttattcatccacaggctcgaatgcaaacatcaacaacgccaataacacagcattgggacggttgccccgaccagcgggatacccttccacggtctcaacagttgaaggtcatggtcctcccctttccccagccattcgtgtgcaggaagtcgcctggaagctgtcctcaaaccggtgccattcgagggagtcgcaggcagcgatggccggtcaggaggagacatcgcaggatgaaacctatgaagtcaaaatgaatcatgatacagaagcttgttctgaacctagtctgctatcgacagagatgctgtcttatcaggacgacgaaaatcgacaacttactttgccagaagaggataagagagacatccgtcagtcccccaaacggggttttctgagaagcgcctccttgggaaggagggcgtcgttccacctggagtgcttgaagaggcaaaaggaccggggaggtgatatctcccagaaaactgtcctgccgctccatctcgtacaccatcaggccctcgccgttgccggactgtctcccctgctccagcgcagccacagtcctgcaagtttccccaggccatttgccaccccacctgctaccccaggaagccgcggatggccaccacagcctgtacctacattgagactggagggcgtggaatcttctgaaaagctgaattcctcattcccatccatccattgtggatcctgggctgagactaccccaggaggagggggttccagtgcggctcgacgagtcagacccgtttcactgatggtacctagtcaggccggagctcccggtaggcaatttcacggatccgcctcttccctagtggaggcggtgcttattagtgaagggctgggccagttcgcacaggatcccaaatttattgaagtgactactcaagaactcgctgatgcgtgcgatatgaccatagaagagatggaatccgccgcagataatatcctgtcaggcggagcaccccagagcccaaatggcgctctgctccctttcgtcaactgtcgcgacgcgggtcaggatcgggctggaggcgaggaagacgccggttgtgtgcgagcgagggggagaccatccgaggaggaactgcaggactcccgggtgtatgtgagttcactgta

SEQ ID NO: 46963 - DNA, 6535 bp, Artificial Sequence
  derived and/or modified sequence
atggtcaatgagaatacgaggatgtacattccagaggaaaaccaccaaggttccaactatgggagcccacgccccgcccatgccaacatgaatgccaatgcggcagcggggctggcccctgagcacatccccaccccgggggctgccctgtcgtggcaggcggccatcgacgcagcccggcaggctaagctgatgggcagcgctggcaatgcgaccatctccacagtcagctccacgcagcggaagcggcagcaatatgggaaacccaagaagcagggcagcaccacggccacacgcccgccccgagccctgctctgcctgaccctgaagaaccccatccggagggcctgcatcagcattgtcgaatggaaaccatttgaaataattattttactgactatttttgccaattgtgtggccttagcgatctatattccctttccagaagatgattccaacgccaccaattccaacctggaacgagtggaatatctctttctcataatttttacggtggaagcgtttttaaaagtaatcgcctatggactcctctttcaccccaatgcctacctccgcaacggctggaacctactagattttataattgtggttgtggggctttttagtgcaattttagaacaagcaaccaaagcagatggggcaaacgctctcggagggaaaggggccggatttgatgtgaaggcgctgagggccttccgcgtgctgcgccccctgcggctggtgtccggagtcccaagtctccaggtggtcctgaattccatcatcaaggccatggtccccctgctgcacatcgccctgcttgtgctgtttgtcatcatcatctacgccatcatcggcttggagctcttcatggggaagatgcacaagacctgctacaaccaggagggcatagcagatgttccagcagaagatgacccttccccttgtgcgctggaaacgggccacgggcggcagtgccagaacggcacggtgtgcaagcccggctgggatggtcccaagcacggcatcaccaactttgacaactttgccttcgccatgctcacggtgttccagtgcatcaccatggagggctggacggacgtgctgtactgggtcaatgatgccgtaggaagggactggccctggatctattttgttacactaatcatcatagggtcattttttgtacttaacttggttctcggtgtgcttagcggagagttttccaaagagagggagaaggccaaggcccggggagatttccagaagctgcgggagaagcagcagctagaagaggatctcaaaggctacctggattggatcactcaggccgaagacatcgatcctgagaatgaggacgaaggcatggatgaggagaagccccgaaacatgagcatgcccaccagtgagaccgagtccgtcaacaccgaaaacgtggctggaggtgacatcgagggagaaaactgcggggccaggctggcccaccggatctccaagtcaaagttcagccgctactggcgccggtggaatcggttctgcagaaggaagtgccgcgccgcagtcaagtctaatgtcttctactggctggtgattttcctggtgttcctcaacacgctcaccattgcctctgagcactacaaccagcccaactggctcacagaagtccaagacacggcaaacaaggccctgctggccctgttcacggcagagatgctcctgaagatgtacagcctgggcctgcaggcctacttcgtgtccctcttcaaccgctttgactgcttcgtcgtgtgtggcggcatcctggagaccatcctggtggagaccaagatcatgtccccactgggcatctccgtgctcagatgcgtccggctgctgaggattttcaagatcacgaggtactggaactccttgagcaacctggtggcatccttgctgaactctgtgcgctccatcgcctccctgctccttctcctcttcctcttcatcatcatcttctccctcctggggatgcagctctttggaggaaagttcaactttgatgagatgcagacccggaggagcacattcgataacttcccccagtccctcctcactgtgtttcagatcctgaccggggaggactggaattcggtgatgtatgatgggatcatggcttatggcggcccctcttttccagggatgttagtctgtatttacttcatcatcctcttcatctgtggaaactatatcctactgaatgtgttcttggccattgctgtggacaacctggctgatgctgagagcctcacatctgcccaaaaggaggaggaagaggagaaggagagaaagaagctggccaggactgccagcccagagaagaaacaagagttggtggagaagccggcagtgggggaatccaaggaggagaagattgagctgaaatccatcacggctgacggagagtctccacccgccaccaagatcaacatggatgacctccagcccaatgaaaatgaggataagagcccctaccccaacccagaaactacaggagaagaggatgaggaggagccagagatgcctgtcggccctcgcccacgaccactctctgagcttcaccttaaggaaaaggcagtgcccatgccagaagccagcgcgtttttcatcttcagctctaacaacaggtttcgcctccagtgccaccgcattgtcaatgacacgatcttcaccaacctgatcctcttcttcattctgctcagcagcatttccctggctgctgaggacccggtccagcacacctccttcaggaaccatatcctaggcaatgcagactatgtcttcactagtatctttacattagaaattatccttaagatgactgcttatggggctttcttgcacaagggttctttctgccggaactacttcaacatcctggacctgctggtggtcagcgtgtccctcatctcctttggcatccagtccagtgcaatcaatgtcgtgaagatcttgcgagtcctgcgagtactcaggcccctgagggccatcaacagggccaaggggctaaagcatgtggttcagtgtgtgtttgtcgccatccggaccatcgggaacatcgtgattgtcaccaccctgctgcagttcatgtttgcctgcatcggggtccagctcttcaagggaaagctgtacacctgttcagacagttccaagcagacagaggcggaatgcaagggcaactacatcacgtacaaagacggggaggttgaccaccccatcatccaaccccgcagctgggagaacagcaagtttgactttgacaatgttctggcagccatgatggccctcttcaccgtctccaccttcgaagggtggccagagctgctgtaccgctccatcgactcccacacggaagacaagggccccatctacaactaccgtgtggagatctccatcttcttcatcatctacatcatcatcatcgccttcttcatgatgaacatcttcgtgggcttcgtcatcgtcacctttcaggagcagggggagcaggagtacaagaactgtgagctggacaagaaccagcgacagtgcgtggaatacgccctcaaggcccggcccctgcggaggtacatccccaagaaccagcaccagtacaaagtgtggtacgtggtcaactccacctacttcgagtacctgatgttcgtcctcatcctgctcaacaccatctgcctggccatgcagcactacggccagagctgcctgttcaaaatcgccatgaacatcctcaacatgctcttcactggcctcttcaccgtggagatgatcctgaagctcattgccttcaaacccaagcactatttctgtgatgcatggaatacatttgacgccttgattgttgtgggtagcattgttgatatagcaatcaccgaggtaaacaacgcagaggaaaactcccgcatctccatcaccttcttccgcctgttccgggtcatgcgtctggtgaagctgctgagccgtggggagggcatccggacgctgctgtggaccttcatcaagtccttccaggccctgccctatgtggccctcctgatcgtgatgctgttcttcatctacgcggtgatcgggatgcaggtgtttgggaaaattgccctgaatgataccacagagatcaaccggaacaacaactttcagaccttcccccaggccgtgctgctcctcttcaggtgtgccaccggggaggcctggcaggacatcatgctggcctgcatgccaggcaagaagtgtgccccagagtccgagcccagcaacagcacggagggtgaaacaccctgtggtagcagctttgctgtcttctacttcatcagcttctacatgctctgtgccttcctgatcatcaacctctttgtagctgtcatcatggacaactttgactacctgacaagggactggtccatccttggtccccaccacctggatgagtttaaaagaatctgggcagagtatgaccctgaagccaagggtcgtatcaaacacctggatgtggtgaccctcctccggcggattcagccgccactaggttttgggaagctgtgccctcaccgcgtggcttgcaaacgcctggtctccatgaacatgcctctgaacagcgacgggacagtcatgttcaatgccaccctgtttgccctggtcaggacggccctgaggatcaaaacagaagagggacccagcccatcagaggcccaccaaggggctgaggatcctttccgccctgcagggaacctagaacaagccaatgaggagctgcgggcgatcatcaagaagatctggaagcggaccagcatgaagctgctggaccaggtggtgccccctgcaggtgatgatgaggtcaccgttggcaagttctacgccacgttcctgatccaggagtacttccggaagttcaagaagcgcaaagagcagggccttgtgggcaagccctcccagaggaacgcgctgtctctgcaggctggcttgcgcacactgcatgacatcgggcctgagatccgacgggccatctctggagatctcaccgctgaggaggagctggacaaggccatgaaggaggctgtgtccgctgcttctgaagatgacatcttcaggagggccggtggcctgttcggcaaccacgtcagctactaccaaagcgacggccggagcgccttcccccagaccttcaccactcagcgcccgctgcacatcaacaaggcgggcagcagccagggcgacactgagtcgccatcccacgagaagctggtggactccaccttcaccccgagcagctactcgtccaccggctccaacgccaacatcaacaacgccaacaacaccgccctgggtcgcctccctcgccccgccggctaccccagcacggtcagcactgtggagggccacgggccccccttgtcccctgccatccgggtgcaggaggtggcgtggaagctcagctccaacaggtgccactcccgggagagccaggcagccatggcgggtcaggaggagacgtctcaggatgagacctatgaagtgaagatgaaccatgacacggaggcctgcagtgagcccagcctgctctccacagagatgctctcctaccaggatgacgaaaatcggcaactgacgctcccagaggaggacaagagggacatccggcaatctccgaagaggggtttcctccgctctgcctcactaggtcgaagggcctccttccacctggaatgtctgaagcgacagaaggaccgagggggagacatctctcagaagacagtcctgcccttgcatctggttcatcatcaggcattggcagtggcaggcctgagccccctcctccagagaagccattcccctgcctcattccctaggccttttgccaccccaccagccacacctggcagccgaggctggcccccacagcccgtccccaccctgcggcttgagggggtcgagtccagtgagaaactcaacagcagcttcccatccatccactgcggctcctgggctgagaccacccccggtggcgggggcagcagcgccgcccggagagtccggcccgtctccctcatggtgcccagccaggctggggccccagggaggcagttccacggcagtgccagcagcctggtggaagcggtcttgatttcagaaggactggggcagtttgctcaagatcccaagttcatcgaggtcaccacccaggagctggccgacgcctgcgacatgaccatagaggagatggagagcgcggccgacaacatcctcagcgggggcgccccacagagccccaatggcgccctcttaccctttgtgaactgcagggacgcggggcaggaccgagccgggggcgaagaggacgcgggctgtgtgcgcgcgcggggtcgaccgagtgaggaggagctccaggacagcagggtctacgtcagcagcctgtagtgggcgctgccagatgcgggcttttttttatttgtttcaatgttcctaatgggttcgtttcagaagtgcctcactgttctcgtgacctggagtt

SEQ ID NO: 46964 - DNA, 6441 bp, Artificial Sequence
  derived and/or modified sequence
atggtgaacgagaacaccagaatgtacatccccgaggagaaccaccagggcagcaactacggcagccccagacccgcccacgccaacatgaacgccaacgccgccgccggcctggcccccgagcacatccccacccccggcgccgccctgagctggcaggccgccatcgacgccgccagacaggccaagctgatgggcagcgccggcaacgccaccatcagcaccgtgagcagcacccagagaaagagacagcagtacggcaagcccaagaagcagggcagcaccaccgccaccagaccccccagagccctgctgtgcctgaccctgaagaaccccatcagaagagcctgcatcagcatcgtggagtggaagcccttcgagatcatcatcctgctgaccatcttcgccaactgcgtggccctggccatctacatccccttccccgaggacgacagcaacgccaccaacagcaacctggagagagtggagtacctgttcctgatcatcttcaccgtggaggccttcctgaaggtgatcgcctacggcctgctgttccaccccaacgcctacctgagaaacggctggaacctgctggacttcatcatcgtggtggtgggcctgttcagcgccatcctggagcaggccaccaaggccgacggcgccaacgccctgggcggcaagggcgccggcttcgacgtgaaggccctgagagccttcagagtgctgagacccctgagactggtgagcggcgtgcccagcctgcaggtggtgctgaacagcatcatcaaggccatggtgcccctgctgcacatcgccctgctggtgctgttcgtgatcatcatctacgccatcatcggcctggagctgttcatgggcaagatgcacaagacctgctacaaccaggagggcatcgccgacgtgcccgccgaggacgaccccagcccctgcgccctggagaccggccacggcagacagtgccagaacggcaccgtgtgcaagcccggctgggacggccccaagcacggcatcaccaacttcgacaacttcgccttcgccatgctgaccgtgttccagtgcatcaccatggagggctggaccgacgtgctgtactgggtgaacgacgccgtgggcagagactggccctggatctacttcgtgaccctgatcatcatcggcagcttcttcgtgctgaacctggtgctgggcgtgctgagcggcgagttcagcaaggagagagagaaggccaaggccagaggcgacttccagaagctgagagagaagcagcagctggaggaggacctgaagggctacctggactggatcacccaggccgaggacatcgaccccgagaacgaggacgagggcatggacgaggagaagcccagaaacatgagcatgcccaccagcgagaccgagagcgtgaacaccgagaacgtggccggcggcgacatcgagggcgagaactgcggcgccagactggcccacagaatcagcaagagcaagttcagcagatactggagaagatggaacagattctgcagaagaaagtgcagagccgccgtgaagagcaacgtgttctactggctggtgatcttcctggtgttcctgaacaccctgaccatcgccagcgagcactacaaccagcccaactggctgaccgaggtgcaggacaccgccaacaaggccctgctggccctgttcaccgccgagatgctgctgaagatgtacagcctgggcctgcaggcctacttcgtgagcctgttcaacagattcgactgcttcgtggtgtgcggcggcatcctggagaccatcctggtggagaccaagatcatgagccccctgggcatcagcgtgctgagatgcgtgagactgctgagaatcttcaagatcaccagatactggaacagcctgagcaacctggtggccagcctgctgaacagcgtgagaagcatcgccagcctgctgctgctgctgttcctgttcatcatcatcttcagcctgctgggcatgcagctgttcggcggcaagttcaacttcgacgagatgcagaccagaagaagcaccttcgacaacttcccccagagcctgctgaccgtgttccagatcctgaccggcgaggactggaacagcgtgatgtacgacggcatcatggcctacggcggccccagcttccccggcatgctggtgtgcatctacttcatcatcctgttcatctgcggcaactacatcctgctgaacgtgttcctggccatcgccgtggacaacctggccgacgccgagagcctgaccagcgcccagaaggaggaggaggaggagaaggagagaaagaagctggccagaaccgccagccccgagaagaagcaggagctggtggagaagcccgccgtgggcgagagcaaggaggagaagatcgagctgaagagcatcaccgccgacggcgagagcccccccgccaccaagatcaacatggacgacctgcagcccaacgagaacgaggacaagagcccctaccccaaccccgagaccaccggcgaggaggacgaggaggagcccgagatgcccgtgggccccagacccagacccctgagcgagctgcacctgaaggagaaggccgtgcccatgcccgaggccagcgccttcttcatcttcagcagcaacaacagattcagactgcagtgccacagaatcgtgaacgacaccatcttcaccaacctgatcctgttcttcatcctgctgagcagcatcagcctggccgccgaggaccccgtgcagcacaccagcttcagaaaccacatcctgggcaacgccgactacgtgttcaccagcatcttcaccctggagatcatcctgaagatgaccgcctacggcgccttcctgcacaagggcagcttctgcagaaactacttcaacatcctggacctgctggtggtgagcgtgagcctgatcagcttcggcatccagagcagcgccatcaacgtggtgaagatcctgagagtgctgagagtgctgagacccctgagagccatcaacagagccaagggcctgaagcacgtggtgcagtgcgtgttcgtggccatcagaaccatcggcaacatcgtgatcgtgaccaccctgctgcagttcatgttcgcctgcatcggcgtgcagctgttcaagggcaagctgtacacctgcagcgacagcagcaagcagaccgaggccgagtgcaagggcaactacatcacctacaaggacggcgaggtggaccaccccatcatccagcccagaagctgggagaacagcaagttcgacttcgacaacgtgctggccgccatgatggccctgttcaccgtgagcaccttcgagggctggcccgagctgctgtacagaagcatcgacagccacaccgaggacaagggccccatctacaactacagagtggagatcagcatcttcttcatcatctacatcatcatcatcgccttcttcatgatgaacatcttcgtgggcttcgtgatcgtgaccttccaggagcagggcgagcaggagtacaagaactgcgagctggacaagaaccagagacagtgcgtggagtacgccctgaaggccagacccctgagaagatacatccccaagaaccagcaccagtacaaggtgtggtacgtggtgaacagcacctacttcgagtacctgatgttcgtgctgatcctgctgaacaccatctgcctggccatgcagcactacggccagagctgcctgttcaagatcgccatgaacatcctgaacatgctgttcaccggcctgttcaccgtggagatgatcctgaagctgatcgccttcaagcccaagcactacttctgcgacgcctggaacaccttcgacgccctgatcgtggtgggcagcatcgtggacatcgccatcaccgaggtgaacaacgccgaggagaacagcagaatcagcatcaccttcttcagactgttcagagtgatgagactggtgaagctgctgagcagaggcgagggcatcagaaccctgctgtggaccttcatcaagagcttccaggccctgccctacgtggccctgctgatcgtgatgctgttcttcatctacgccgtgatcggcatgcaggtgttcggcaagatcgccctgaacgacaccaccgagatcaacagaaacaacaacttccagaccttcccccaggccgtgctgctgctgttcagatgcgccaccggcgaggcctggcaggacatcatgctggcctgcatgcccggcaagaagtgcgcccccgagagcgagcccagcaacagcaccgagggcgagaccccctgcggcagcagcttcgccgtgttctacttcatcagcttctacatgctgtgcgccttcctgatcatcaacctgttcgtggccgtgatcatggacaacttcgactacctgaccagagactggagcatcctgggcccccaccacctggacgagttcaagagaatctgggccgagtacgaccccgaggccaagggcagaatcaagcacctggacgtggtgaccctgctgagaagaatccagccccccctgggcttcggcaagctgtgcccccacagagtggcctgcaagagactggtgagcatgaacatgcccctgaacagcgacggcaccgtgatgttcaacgccaccctgttcgccctggtgagaaccgccctgagaatcaagaccgaggagggccccagccccagcgaggcccaccagggcgccgaggaccccttcagacccgccggcaacctggagcaggccaacgaggagctgagagccatcatcaagaagatctggaagagaaccagcatgaagctgctggaccaggtggtgccccccgccggcgacgacgaggtgaccgtgggcaagttctacgccaccttcctgatccaggagtacttcagaaagttcaagaagagaaaggagcagggcctggtgggcaagcccagccagagaaacgccctgagcctgcaggccggcctgagaaccctgcacgacatcggccccgagatcagaagagccatcagcggcgacctgaccgccgaggaggagctggacaaggccatgaaggaggccgtgagcgccgccagcgaggacgacatcttcagaagagccggcggcctgttcggcaaccacgtgagctactaccagagcgacggcagaagcgccttcccccagaccttcaccacccagagacccctgcacatcaacaaggccggcagcagccagggcgacaccgagagccccagccacgagaagctggtggacagcaccttcacccccagcagctacagcagcaccggcagcaacgccaacatcaacaacgccaacaacaccgccctgggcagactgcccagacccgccggctaccccagcaccgtgagcaccgtggagggccacggcccccccctgagccccgccatcagagtgcaggaggtggcctggaagctgagcagcaacagatgccacagcagagagagccaggccgccatggccggccaggaggagaccagccaggacgagacctacgaggtgaagatgaaccacgacaccgaggcctgcagcgagcccagcctgctgagcaccgagatgctgagctaccaggacgacgagaacagacagctgaccctgcccgaggaggacaagagagacatcagacagagccccaagagaggcttcctgagaagcgccagcctgggcagaagagccagcttccacctggagtgcctgaagagacagaaggacagaggcggcgacatcagccagaagaccgtgctgcccctgcacctggtgcaccaccaggccctggccgtggccggcctgagccccctgctgcagagaagccacagccccgccagcttccccagacccttcgccaccccccccgccacccccggcagcagaggctggcccccccagcccgtgcccaccctgagactggagggcgtggagagcagcgagaagctgaacagcagcttccccagcatccactgcggcagctgggccgagaccacccccggcggcggcggcagcagcgccgccagaagagtgagacccgtgagcctgatggtgcccagccaggccggcgcccccggcagacagttccacggcagcgccagcagcctggtggaggccgtgctgatcagcgagggcctgggccagttcgcccaggaccccaagttcatcgaggtgaccacccaggagctggccgacgcctgcgacatgaccatcgaggagatggagagcgccgccgacaacatcctgagcggcggcgccccccagagccccaacggcgccctgctgcccttcgtgaactgcagagacgccggccaggacagagccggcggcgaggaggacgccggctgcgtgagagccagaggcagacccagcgaggaggagctgcaggacagcagagtgtacgtgagcagcctgtag

SEQ ID NO: 46965 - protein, 2144 aa, Artificial Sequence
  derived and/or modified sequence
MVNENTRMYIPEENHQGSNYGSPRPAHANMNANAAAGLAPEHIPTPGAALSWQAAIDAARQAKLMGSAGNATISTVSSTQRKRQQYGKPKKQGSTTATRPPRALLCLTLKNPIRRACISIVEWKPFEIIILLTIFANCVALAIYIPFPEDDSNATNSNLERVEYLFLIIFTVEAFLKVIAYGLLFHPNAYLRNGWNLLDFIIVVVGLFSAILEQATKADGANALGGKGAGFDVKALRAFRVLRPLRLVSGVPSLQVVLNSIIKAMVPLLHIALLVLFVIIIYAIIGLELFMGKMHKTCYNQEGIADVPAEDDPSPCALETGHGRQCQNGTVCKPGWDGPKHGITNFDNFAFAMLTVFQCITMEGWTDVLYWVNDAVGRDWPWIYFVTLIIIGSFFVLNLVLGVLSGEFSKEREKAKARGDFQKLREKQQLEEDLKGYLDWITQAEDIDPENEDEGMDEEKPRNMSMPTSETESVNTENVAGGDIEGENCGARLAHRISKSKFSRYWRRWNRFCRRKCRAAVKSNVFYWLVIFLVFLNTLTIASEHYNQPNWLTEVQDTANKALLALFTAEMLLKMYSLGLQAYFVSLFNRFDCFVVCGGILETILVETKIMSPLGISVLRCVRLLRIFKITRYWNSLSNLVASLLNSVRSIASLLLLLFLFIIIFSLLGMQLFGGKFNFDEMQTRRSTFDNFPQSLLTVFQILTGEDWNSVMYDGIMAYGGPSFPGMLVCIYFIILFICGNYILLNVFLAIAVDNLADAESLTSAQKEEEEEKERKKLARTASPEKKQELVEKPAVGESKEEKIELKSITADGESPPATKINMDDLQPNENEDKSPYPNPETTGEEDEEEPEMPVGPRPRPLSELHLKEKAVPMPEASAFFIFSSNNRFRLQCHRIVNDTIFTNLILFFILLSSISLAAEDPVQHTSFRNHILFYFDIVFTTIFTIEIALKMTAYGAFLHKGSFCRNYFNILDLLVVSVSLISFGIQSSAINVVKILRVLRVLRPLRAINRAKGLKHVVQCVFVAIRTIGNIVIVTTLLQFMFACIGVQLFKGKLYTCSDSSKQTEAECKGNYITYKDGEVDHPIIQPRSWENSKFDFDNVLAAMMALFTVSTFEGWPELLYRSIDSHTEDKGPIYNYRVEISIFFIIYIIIIAFFMMNIFVGFVIVTFQEQGEQEYKNCELDKNQRQCVEYALKARPLRRYIPKNQHQYKVWYVVNSTYFEYLMFVLILLNTICLAMQHYGQSCLFKIAMNILNMLFTGLFTVEMILKLIAFKPKHYFCDAWNTFDALIVVGSIVDIAITENAEENSRISITFFRLFRVMRLVKLLSRGEGIRTLLWTFIKSFQALPYVALLIVMLFFIYAVIGMQVFGKIALNDTTEINRNNNFQTFPQAVLLLFRCATGEAWQDIMLACMPGKKCAPESEPSNSTEGETPCGSSFAVFYFISFYMLCAFLIINLFVAVIMDNFDYLTRDWSILGPHHLDEFKRIWAEYDPEAKGRIKHLDVVTLLRRIQPPLGFGKLCPHRVACKRLVSMNMPLNSDGTVMFNATLFALVRTALRIKTEEGPSPSEAHQGAEDPFRPAGNLEQANEELRAIIKKIWKRTSMKLLDQVVPPAGDDEVTVGKFYATFLIQEYFRKFKKRKEQGLVGKPSQRNALSLQAGLRTLHDIGPEIRRAISGDLTAEEELDKAMKEAVSAASEDDIFRRAGGLFGNHVSYYQSDGRSAFPQTFTTQRPLHINKAGSSQGDTESPSHEKLVDSTFTPSSYSSTGSNANINNANNTALGRLPRPAGYPSTVSTVEGHGPPLSPAIRVQEVAWKLSSNRCHSRESQAAMAGQEETSQDETYEVKMNHDTEACSEPSLLSTEMLSYQDDENRQLTLPEEDKRDIRQSPKRGFLRSASLGRRASFHLECLKRQKDRGGDISQKTVLPLHLVHHQALAVAGLSPLLQRSHSPASFPRPFATPPATPGSRGWPPQPVPTLRLEGVESSEKLNSSFPSIHCGSWAETTPGGGGSSAARRVRPVSLMVPSQAGAPGRQFHGSASSLVEAVLISEGLGQFAQDPKFIEVTTQELADACDMTIEEMESAADNILSGGAPQSPNGALLPFVNCRDAGQDRAGGEEDAGCVRARGRPSEEELQDSRVYVSSL

SEQ ID NO: 46966 - DNA, 13498 bp, Artificial Sequence
  derived and/or modified sequence
ttattttttcaaatggtgtagccgccggaggtgcggtgctcagttcttggaaggggcccggatgtactgaggatgcgttacagtttcactcgaggaggcagtagtggaaaggagcagtttttggggtttgatgccataatgggaatcaggtaatcgtcggcggggaagaagaaacgctgcagaccacggcttcctcgaatcttgcgcgaaagccgccggcctcggaggagggattaatccagacccgccggggggtgttttcacatttcttcctcttcgtggctgctcctcctattaaaaccatttttggtccatggtcaatgagaatacgaggatgtacattccagaggaaaaccaccaaggttccaactatgggagcccacgccccgcccatgccaacatgaatgccaatgcggcagcggggctggcccctgagcacatccccaccccgggggctgccctgtcgtggcaggcggccatcgacgcagcccggcaggctaagctgatgggcagcgctggcaatgcgaccatctccacagtcagctccacgcagcggaagcggcagcaatatgggaaacccaagaagcagggcagcaccacggccacacgcccgccccgagccctgctctgcctgaccctgaagaaccccatccggagggcctgcatcagcattgtcgaatggaaaccatttgaaataattattttactgactatttttgccaattgtgtggccttagcgatctatattccctttccagaagatgattccaacgccaccaattccaacctggaacgagtggaatatctctttctcataatttttacggtggaagcgtttttaaaagtaatcgcctatggactcctctttcaccccaatgcctacctccgcaacggctggaacctactagattttataattgtggttgtggggctttttagtgcaattttagaacaagcaaccaaagcagatggggcaaacgctctcggagggaaaggggccggatttgatgtgaaggcgctgagggccttccgcgtgctgcgccccctgcggctggtgtccggagtcccaagtctccaggtggtcctgaattccatcatcaaggccatggtccccctgctgcacatcgccctgcttgtgctgtttgtcatcatcatctacgccatcatcggcttggagctcttcatggggaagatgcacaagacctgctacaaccaggagggcatagcagatgttccagcagaagatgacccttccccttgtgcgctggaaacgggccacgggcggcagtgccagaacggcacggtgtgcaagcccggctgggatggtcccaagcacggcatcaccaactttgacaactttgccttcgccatgctcacggtgttccagtgcatcaccatggagggctggacggacgtgctgtactgggtcaatgatgccgtaggaagggactggccctggatctattttgttacactaatcatcatagggtcattttttgtacttaacttggttctcggtgtgcttagcggagagttttccaaagagagggagaaggccaaggcccggggagatttccagaagctgcgggagaagcagcagctagaagaggatctcaaaggctacctggattggatcactcaggccgaagacatcgatcctgagaatgaggacgaaggcatggatgaggagaagccccgaaacatgagcatgcccaccagtgagaccgagtccgtcaacaccgaaaacgtggctggaggtgacatcgagggagaaaactgcggggccaggctggcccaccggatctccaagtcaaagttcagccgctactggcgccggtggaatcggttctgcagaaggaagtgccgcgccgcagtcaagtctaatgtcttctactggctggtgattttcctggtgttcctcaacacgctcaccattgcctctgagcactacaaccagcccaactggctcacagaagtccaagacacggcaaacaaggccctgctggccctgttcacggcagagatgctcctgaagatgtacagcctgggcctgcaggcctacttcgtgtccctcttcaaccgctttgactgcttcgtcgtgtgtggcggcatcctggagaccatcctggtggagaccaagatcatgtccccactgggcatctccgtgctcagatgcgtccggctgctgaggattttcaagatcacgaggtactggaactccttgagcaacctggtggcatccttgctgaactctgtgcgctccatcgcctccctgctccttctcctcttcctcttcatcatcatcttctccctcctggggatgcagctctttggaggaaagttcaactttgatgagatgcagacccggaggagcacattcgataacttcccccagtccctcctcactgtgtttcagatcctgaccggggaggactggaattcggtgatgtatgatgggatcatggcttatggcggcccctcttttccagggatgttagtctgtatttacttcatcatcctcttcatctgtggaaactatatcctactgaatgtgttcttggccattgctgtggacaacctggctgatgctgagagcctcacatctgcccaaaaggaggaggaagaggagaaggagagaaagaagctggccaggactgccagcccagagaagaaacaagagttggtggagaagccggcagtgggggaatccaaggaggagaagattgagctgaaatccatcacggctgacggagagtctccacccgccaccaagatcaacatggatgacctccagcccaatgaaaatgaggataagagcccctaccccaacccagaaactacaggagaagaggatgaggaggagccagagatgcctgtcggccctcgcccacgaccactctctgagcttcaccttaaggaaaaggcagtgcccatgccagaagccagcgcgtttttcatcttcagctctaacaacaggtttcgcctccagtgccaccgcattgtcaatgacacgatcttcaccaacctgatcctcttcttcattctgctcagcagcatttccctggctgctgaggacccggtccagcacacctccttcaggaaccatattctgttttattttgatattgtttttaccaccattttcaccattgaaattgctctgaagatgactgcttatggggctttcttgcacaagggttctttctgccggaactacttcaacatcctggacctgctggtggtcagcgtgtccctcatctcctttggcatccagtccagtgcaatcaatgtcgtgaagatcttgcgagtcctgcgagtactcaggcccctgagggccatcaacagggccaaggggctaaagcatgtggttcagtgtgtgtttgtcgccatccggaccatcgggaacatcgtgattgtcaccaccctgctgcagttcatgtttgcctgcatcggggtccagctcttcaagggaaagctgtacacctgttcagacagttccaagcagacagaggcggaatgcaagggcaactacatcacgtacaaagacggggaggttgaccaccccatcatccaaccccgcagctgggagaacagcaagtttgactttgacaatgttctggcagccatgatggccctcttcaccgtctccaccttcgaagggtggccagagctgctgtaccgctccatcgactcccacacggaagacaagggccccatctacaactaccgtgtggagatctccatcttcttcatcatctacatcatcatcatcgccttcttcatgatgaacatcttcgtgggcttcgtcatcgtcacctttcaggagcagggggagcaggagtacaagaactgtgagctggacaagaaccagcgacagtgcgtggaatacgccctcaaggcccggcccctgcggaggtacatccccaagaaccagcaccagtacaaagtgtggtacgtggtcaactccacctacttcgagtacctgatgttcgtcctcatcctgctcaacaccatctgcctggccatgcagcactacggccagagctgcctgttcaaaatcgccatgaacatcctcaacatgctcttcactggcctcttcaccgtggagatgatcctgaagctcattgccttcaaacccaagcactatttctgtgatgcatggaatacatttgacgccttgattgttgtgggtagcattgttgatatagcaatcaccgagaacgcagaggaaaactcccgcatctccatcaccttcttccgcctgttccgggtcatgcgtctggtgaagctgctgagccgtggggagggcatccggacgctgctgtggaccttcatcaagtccttccaggccctgccctatgtggccctcctgatcgtgatgctgttcttcatctacgcggtgatcgggatgcaggtgtttgggaaaattgccctgaatgataccacagagatcaaccggaacaacaactttcagaccttcccccaggccgtgctgctcctcttcaggtgtgccaccggggaggcctggcaggacatcatgctggcctgcatgccaggcaagaagtgtgccccagagtccgagcccagcaacagcacggagggtgaaacaccctgtggtagcagctttgctgtcttctacttcatcagcttctacatgctctgtgccttcctgatcatcaacctctttgtagctgtcatcatggacaactttgactacctgacaagggactggtccatccttggtccccaccacctggatgagtttaaaagaatctgggcagagtatgaccctgaagccaagggtcgtatcaaacacctggatgtggtgaccctcctccggcggattcagccgccactaggttttgggaagctgtgccctcaccgcgtggcttgcaaacgcctggtctccatgaacatgcctctgaacagcgacgggacagtcatgttcaatgccaccctgtttgccctggtcaggacggccctgaggatcaaaacagaagagggacccagcccatcagaggcccaccaaggggctgaggatcctttccgccctgcagggaacctagaacaagccaatgaggagctgcgggcgatcatcaagaagatctggaagcggaccagcatgaagctgctggaccaggtggtgccccctgcaggtgatgatgaggtcaccgttggcaagttctacgccacgttcctgatccaggagtacttccggaagttcaagaagcgcaaagagcagggccttgtgggcaagccctcccagaggaacgcgctgtctctgcaggctggcttgcgcacactgcatgacatcgggcctgagatccgacgggccatctctggagatctcaccgctgaggaggagctggacaaggccatgaaggaggctgtgtccgctgcttctgaagatgacatcttcaggagggccggtggcctgttcggcaaccacgtcagctactaccaaagcgacggccggagcgccttcccccagaccttcaccactcagcgcccgctgcacatcaacaaggcgggcagcagccagggcgacactgagtcgccatcccacgagaagctggtggactccaccttcaccccgagcagctactcgtccaccggctccaacgccaacatcaacaacgccaacaacaccgccctgggtcgcctccctcgccccgccggctaccccagcacggtcagcactgtggagggccacgggccccccttgtcccctgccatccgggtgcaggaggtggcgtggaagctcagctccaacaggtgccactcccgggagagccaggcagccatggcgggtcaggaggagacgtctcaggatgagacctatgaagtgaagatgaaccatgacacggaggcctgcagtgagcccagcctgctctccacagagatgctctcctaccaggatgacgaaaatcggcaactgacgctcccagaggaggacaagagggacatccggcaatctccgaagaggggtttcctccgctctgcctcactaggtcgaagggcctccttccacctggaatgtctgaagcgacagaaggaccgagggggagacatctctcagaagacagtcctgcccttgcatctggttcatcatcaggcattggcagtggcaggcctgagccccctcctccagagaagccattcccctgcctcattccctaggccttttgccaccccaccagccacacctggcagccgaggctggcccccacagcccgtccccaccctgcggcttgagggggtcgagtccagtgagaaactcaacagcagcttcccatccatccactgcggctcctgggctgagaccacccccggtggcgggggcagcagcgccgcccggagagtccggcccgtctccctcatggtgcccagccaggctggggccccagggaggcagttccacggcagtgccagcagcctggtggaagcggtcttgatttcagaaggactggggcagtttgctcaagatcccaagttcatcgaggtcaccacccaggagctggccgacgcctgcgacatgaccatagaggagatggagagcgcggccgacaacatcctcagcgggggcgccccacagagccccaatggcgccctcttaccctttgtgaactgcagggacgcggggcaggaccgagccgggggcgaagaggacgcgggctgtgtgcgcgcgcggggtcgaccgagtgaggaggagctccaggacagcagggtctacgtcagcagcctgtagtgggcgctgccagatgcgggcttttttttatttgtttcaatgttcctaatgggttcgtttcagaagtgcctcactgttctcgtgacctggagttaaccggaacagcgtcttcattcatttctgttgggaccagacgcggagcctgggtgcgcgagccgccctccgggaggaaggcgcccggctgcgtctgcagaggcggggagaggaggcggcgagggtcccggggcgcgaggaaggcgcctgccctctcccagctcgcaggccccgggcccggccgcgcctccgcggggagagcaccccggcttcccgcgcgccctcaccaaaaggaccctacagcaaacgggtgtctttcgactctgcttgtagaaaccatttgcacatattctgtacgagcctcgctgtctccctagagccagggccctgcggatttggagaagggagcggggcaggacttccaggaggaccccaacccggcccggagagggaggaggaggcctccaggggcgcggagctctggggatgggcgtcgggccggcagtggtgcggctcactccgtccctgcccacctgcgacgggatcccccgaccggcacgggccacgccgagctcccggccagccgccggcccgcaggcagcgcgagggaggagctgcgccgccggctccgcccaaccaggtggtgctgagcttccgctgagcgctcttttgttttgtggtttgacacttttcttgacagcatgttgcagtttcttttcggttttggttttttttaaatgttttattttgctttcccagcgggaggggaggaagaagagtgtttacaaagtcctgtagccccctcacctttctgttttcacttttgccaatgtacatcgggtttggttttcttgtattatttaaacggttgtggtttcctttttccacggaggttcaatagaagccgctgcaggagagttttaccaaccattgtgtatgcccaataatttgttatcatttccttaggtagtaacctatttttgttctggtttggttcggttatctaatggaaaggtaactggcaatgcacttgatgtggtcttgcacatgtgggtgatagagttgggttcctttttatgctgggtgtacaggtgggtttgggagagaggagcatgcgcgagagagtctccgagtgtgtgcgacgcgtgtgtgtgtggtgggttgtctgtgtgcatatgtcctgcccgtgtatatgcacccacaccatgtgcccgtgcacaccagtgactacgcagtcccccctttctggtttagctgtgggaagatctgaatctggggccgtttgaaagcaaaaacaaaccactgtctctgcttctgaaacgggaatcagtaactctttgcattttctgtcccacaagatatgcaaaaacaatgcaataatattcatttaaaaatacaattgtgagttgtgttggcattaaaactgtattttaaaaaaagacagaaatttaagggaaaaacacaagaaggcattttgcttcaatatattccgtgtaatgttttattgcattgataatgtttctgttgaagaaaccgttatacttgaattcaggtcagtttcagtatttttcaaatatttttttaaaactgaattgcaattgtgccaagcgaatataatgaattgaattaagttggttttcggattcacttcttgtatattttgctgcatgtaaagtaaatcattttgtatttggagtgtgacaagctttacctttgaactcaagtgcttttctatatgtggttgggggaaagggaacaagttttctttagtttgcacaatgagcaaaggtatcaccagtgtagtcattattctgctctccacaaacaggtttggacattactgttttgcatatcttgtgtttgcttacatttccctcaatttttccaaaatcgtttgctgggtatgtttgtaccgcctcttgctgtgagagaccaggacctattttattccagtcttcactctgtccactctgctctggtcatctgatttggtacttctccaagaacagcccttcactgtgaggtgcagggaggcgttctgatgagccctcagtcactgggccgtcatccgcatcccccatggaagaggtagctggctttcccttcccttccaccacacggaattttctctttggcttccttaggaaagtgtacactaaccgggaggataaaattaaagtcaggctgcttggagggaggggcatcctcacttccggattcttgttgctctacccaacaaggacagcaggggctcgagaaaggaactggtgaaaccctgatccatctgaaagtcaactctgcgtgctcctttctccatcccttcctcactctggagcagcctttccttcaggcttgccctaatgtttgggctgccggggagggggccaggacaagggaagaggcatccggagctcacagtgggggtgggaacagatttttgtgggggcatctctaatgctcacttatatctccctagaacatcactcttttggtgctgtgtccttcaaatgtatgtcaacagtggtggctgaaaagggactgctttggggaaaacaggacccaaccattcacccagaattgacccattaaatctcttccagtcctagtgttccctgagcccctcttggcacatatataagtaagctagaaattacaataagggacagtccattcctctatgacagcttgctggactgattcatgacaaagtggagaaatgtactcaatactccccggttaacacagtctagaaacagagtttctttatggatatccacacccaagtcatccaaactttcttgattccttttcactgccatcaaggtcctctagaaattgagtttaggtatcatcctttgaaaagttcccaagatttctaccaggaggtacacacaggcgttccctgtctagggcaggaggactatcctagcttgaccttctgatccactagaataagactggcgtatgatgcctgtcatcagaacagactggcacaagtagtgacatcaatgaaccacagcacaatcttccaagtgatgtctactctccacctaaaatggaattttccccatgaccttgtaaaacataattgtcacatcttccatacccctcctgacagcccccaagtgtcaggagaaaacagtcaggggctaagggcccaagggacttgaagaaacaacagtttaaggtctgcagtttggtcaacttaattcttgtcctccgaccagccctgcctctttcatttccagaccttggagaatttttcccagctttgattcagaaggtactagttataacccctttccttcttcttaatccaataggcctcactctcactgggaaatccactcaaaggaacaaggcaatgtctctcattctatttcccagttccaaattccaggtgcttgtctggagtgaagctacccgttactttctcccagcttttctccacccagcatgtctcctgcccatgcagctgaagacagtggggcaacctcaggagaagcagacctttccatgcccaagttcatctcctgagcaacagtgacacctagaaaatgaggactttggaagtcacccaaaagatggtggctactttatggagtcctgaagatacacagccaccactcctaaaggcaaagaaagaaaacacgaatgtaggtcagggatagagtggaaccctggtcatcggggtttttagcctcatcgtgggaaaggtggtaaaggaggatgatggcatctccatccctagaggccaagaattgaaatatcattgtcaaggattagaaacaattcagcaaagaggccacaaaaagggcctgctgactcccagaagacctctttaaaccccaggggaggcaaatacttgctgatggagtctgggccgtttccatattttaaagaagacctgcctctggggcaaatgtcagcacagagaggactgggaggagaatggaggcaagaaaagggcatattttgactccctctgtgcctcttcccagttcatggaaggatgtgttcagcttacccacccacagtgaccagtgtggtggagccgctgacatctcaaggatctatttgggaaggtgagaagagtactcattccatctgggggtgttgttccagccacatcagcctacctggtgggatgtgggggtgtctgccaccctgtcccccctctgctgatgtccctcccctcaggctgtccaggtgccacctgacacaggctgctgtgcaaagacaggcggggaagcccaaacctcactcccagggaggccctcagccgccagagtccaggttctccagaggctacgatttgaggaggttgagggggaagacaggagggaaagaaaagtcctacaactgtcaggaatggggcacctttccctgtccctaagcaaagctccctcttcccactgccctccccagccccagctccctgtcctccccaacacctagtgagaaagacggtgcgtggaagggagtcccatgggcagatgcttacacgacctctttgtgaagcctcttctgggtttaacttcattcatcaatttattcttatgtcaaagcaatgaaacttttctttctggagccagataccaatacaacaggtgaacgggtttctgccacatctctacattgacgggggatgcttgaacaacccccctcactacacagacacacaccgttaaggcacaagggctggggttgagctctagatgagggactttcctgctcctgcaagggtgagcactgtatacacagacaaggagggtgcagtagagtgactcccttggatggaagtagtaccatcagaacctactattattatgacataaattctatttacatacattgagagaatactacaatcaacactttttcctgggatgactttaagaggtttgagccacagcacctgaagtggcaaagatccatggtctttgtagggtattagagaactcttccagtcacctctgaaagcactctagatcttgcagctgagtggatgaagtgtaacaaatctgttgcacgctgagaggagtcagaattagcatttttcatgaaagttccccacgtctctactaagaatgaggaagaaaagactaagactaggtaattacacagaggcttgaaatgttacatcaccagagccaagtcctctcccttcagatcagttactggctgctacacagggacacccccaccttttcagggcatcccatgcactccacttctcaggatctaaggaatttgactttgtagggatcccagaaagggcactgtgccacttcccctggtgtgaatcagacatacattgtacattcatttctaaaattcactcatgcacctcaaaccaaggtcattatccaaaaaaaaaaaaaaaaagctctgggtggaagagtttgtaagttttaagagagggtcatttctatgtgaggaaatgcagaaatggacagaatgattcttattcactgtttgggtctggagaattcccattgtggaaatcttagagatctcaagtttattaccaagggaataaggaaaaaaaggtgagcaggcaccaggccaagcagtggctcccttgccaaggaacctgaggctgcaggtttcagggacccccttgaagaaacctctcctggccattggccaggagaaaagagaagtctctcctgtagagtcacaagagaagcaaaagagggtgggtcactgggtcctggacatagcccccaaccccaagacttcccaatatggagaaactacaccaatgtttaaaaggggaaaaggaaagaacttgtacatcaagggaagatgatttgtaaacacacagtcctgtgcagaaagatccccttcaggaggtgtctccagcatcccaaagctgtgcgcaccttctcttttcctgcctcaggccacctatgcatccagctgcagcccatacccacacctgaaatccatctcttgaatcccagccaggttatataccaccccattgccatgtcctgtcctggccagaatgcatgctgttcccccaagcctcgtgggagtgaggccatgggaaacagagatgagcatgtctggacaagtctgtgatggtagtggatgagaataacccatggcaaaacacgcacattcattaagaaatagggcgacagattccccgttggtgaagcactgaaaggtctattactctcataatattgctgttttattttaatccaccagagctaccatgcaaaactttcctcctgtgaaacgctccagataaagctcctctaatctccccttccctcatgtcctccagctcaaacccaccttcatcccccaaaccaatctgtatcatgcctgttatcagagaggcacagaaagatgggcagtgcctccgttgtcaccattccccacacccctacacacccccacaccctcccctccaggctccacgacttcacagtcttactgttgtaaatatcattgtacagtttgtaatcctcaaataatcccattgtcagaggcctcgcctgatgggccttctcaccctcgagaaaggccagggaatctagaaggggcaacccttcaaggagagcttcagggtcatctctgtgtgagacactattgtatattcctgtaagattgcatttttatctaaggaatgatgttatttaaaaaacaaacaaaaaacacaaaaaataagaattgcaaataaatttcttaacaatgtct

SEQ ID NO: 46967 - DNA, 6435 bp, Artificial Sequence
  derived and/or modified sequence
atggtcaatgaaaacacccgaatgtatatccctgaagagaatcatcaaggcagtaactatggttctcctcgaccagcccacgccaacatgaatgccaatgcagccgctgggcttgctcctgagcacatccccacccccggcgcagcgctctcctggcaggctgccattgacgcagcccgtcaggccaagctcatgggcagcgccgggaacgccaccatctctaccgtgtcatccacacaacggaaacggcagcagtacggcaagcccaaaaagcagggatcaactaccgctacgagaccccctcgcgccctactgtgtctgacgctgaagaaccctattaggagagcttgcattagcattgtcgagtggaagccttttgaaattattattctcctcactattttcgccaattgtgtcgccttagcgatctacattcctttcccagaggacgactccaatgccacaaatagcaacttagagcgggtcgagtacctctttttaatcattttcacagtcgaggcatttctgaaagttatcgcctacggtctgctgtttcacccaaatgcctacctccggaacgggtggaaccttctggactttattattgtcgttgtcgggctgttctcagctattcttgaacaggctacaaaggccgatggggccaatgcactggggggcaaaggagctgggttcgacgtcaaagccttgcgggctttcagggttcttaggcctcttagactcgtgtctggtgtaccgtcccttcaggtggtgctgaacagtatcataaaagctatggtgccccttcttcatatagccctgctggtcctgttcgtgatcattatttatgccattattgggttagaactcttcatgggcaaaatgcataagacatgttacaatcaggaagggattgctgacgtcccggctgaggatgatcctagtccttgtgctctcgagaccggtcacgggaggcagtgccaaaacggcactgtgtgcaagcccgggtgggacggccccaagcatggaattactaattttgataatttcgcttttgccatgcttacggttttccagtgtataaccatggaaggatggactgacgtgctttactgggtgaatgatgctgtgggtagagactggccgtggatttactttgtcactcttattatcattggtagctttttcgtcttaaatctggtgctgggagtgctgtccggggagtttagcaaagagcgcgaaaaggctaaggctcgcggagactttcagaagttgcgggaaaaacagcaactggaggaggatctcaaaggctatctggattggataacccaggccgaagatattgaccctgaaaacgaagatgagggcatggatgaggagaagccacgcaacatgtccatgcctactagtgagaccgagagtgtgaacaccgaaaatgtggccggcggagacattgagggcgagaattgcggtgcaagattagctcaccgaattagcaagtcaaagttctcaagatattggaggcgctggaacaggttttgtagacgtaagtgccgggcagccgtgaagtctaacgtgttctactggctggtaatctttctagtttttctgaacacgctcactattgcatctgagcactacaatcagccgaactggctgacagaagtgcaagacactgctaacaaggccctactggctctgtttacggccgagatgcttctcaaaatgtattccttaggcctgcaggcctattttgtgagcctcttcaatcgctttgactgctttgtcgtctgcgggggtatcctggagactatccttgtcgagaccaaaatcatgtctccgctcggtatttccgtgctgagatgcgtgcgcctgctcaggattttcaagattacacgctattggaacagtttatccaaccttgtggcttccttgctcaactcggtaagaagcattgccagtctcctgctcctcttgttcttgttcattataattttttccctgctgggcatgcagctgttcggaggcaagttcaatttcgacgaaatgcaaacacgacgctccacgtttgataatttcccacagtctctgctgaccgtgtttcaaatcctcactggagaggactggaactcagtgatgtatgacgggattatggcctacggcggcccatcatttccagggatgctggtgtgtatttattttatcattctgtttatttgtggaaattatattctgctcaatgtttttctggccattgctgtcgacaacctggcagacgcggaatcccttacatcggcacaaaaggaggaagaagaagaaaaggaaagaaagaaattagccaggaccgcttcaccggagaagaaacaggaacttgtcgagaagcccgctgttggggagtcgaaagaggaaaagattgaactgaagtccatcactgcagacggggagtctccccccgctacaaaaattaacatggacgatttacagcccaacgagaatgaggataaaagcccgtacccgaacccagagactacaggggaggaggatgaggaagagccagagatgcccgtcgggccccggcccaggcccttgtcggagcttcatcttaaagagaaagccgtgcccatgccggaggcctcggccttctttatattctcaagcaataaccggttcaggttgcagtgtcatagaatagttaatgataccatcttcaccaatttaatactcttcttcatactgctcagctccatcagtttggccgccgaagatcctgtgcagcacactagtttcaggaaccatatactgttctacttcgacatagtcttcacaactatctttactattgagattgcattgaaaatgactgcatacggcgcttttttgcacaaaggatccttctgcaggaattacttcaatattctagacctacttgttgtgtccgtgtccttgatttcgtttggcatccagtcatctgctattaacgtggtgaagatcctgagagtcctcagagttttacgccccctgcgcgccataaacagggccaaggggctgaaacacgtggtgcaatgcgtgtttgtggcaatccggactattggcaatattgtgatcgtaaccaccctcctacagttcatgttcgcttgtataggcgtccagctctttaaaggaaaactgtacacctgtagcgactcttcaaaacagaccgaagccgaatgcaaaggcaactatattacctataaggacggtgaagtggaccaccccatcatccagcccaggtcctgggaaaatagtaagttcgacttcgataacgtattggctgcaatgatggccctattcactgtctccactttcgagggctggcctgagctcctttatcgtagcattgactcccacaccgaggacaagggacccatatacaactatagagtggaaatttccatcttcttcatcatctacatcatcatcatcgccttcttcatgatgaatatcttcgtcggtttcgttattgtaacgttccaggaacagggagagcaggaatataagaactgtgaactcgataaaaaccaacggcagtgcgtggaatacgcccttaaggcccgccccctcagacgctatattccgaaaaatcagcaccaatacaaggtgtggtatgttgttaatagtacttactttgaatacctgatgttcgtattgatcctgctcaatacgatctgcctggcgatgcagcactacggccagagctgtctctttaagattgccatgaacattctgaacatgctattcacaggactctttactgtggagatgatactgaaacttattgcttttaaacccaagcactatttctgtgacgcatggaacacctttgatgctctgatcgtggtgggttccattgttgatattgccatcacggagaacgcagaggagaacagccggatttccattaccttctttcgccttttcagggtgatgcgcctggtgaaactgttaagtcgcggagagggaatccgtacactactatggacctttatcaagtctttccaggccttgccctatgtggccctgcttattgtgatgctcttttttatatacgcagtaatcgggatgcaggtgtttggcaagatcgctcttaatgacacgactgagataaaccgcaataacaacttccaaacctttccacaggcagtcctgttgctcttccgctgtgctactggggaggcctggcaggacatcatgctcgcatgcatgcccggtaagaagtgtgctccagaaagcgaaccgagtaatagtacggagggtgagaccccttgcggcagctcgtttgccgtattctactttattagcttctacatgctgtgtgccttcctgataatcaatctcttcgtcgcagtcataatggacaacttcgattatctaacccgggattggagtattctcgggcctcatcacctagatgagtttaaacgtatttgggccgagtatgatccagaagccaaaggtcgcataaaacacctcgacgtggtcactttgctccgtcggatacagcctcccctgggctttggaaagctgtgtccccaccgggtagcctgtaagcggctagtttccatgaatatgcctttgaattctgacggcacagtgatgttcaatgccactttatttgctcttgttcgaaccgctctccggatcaaaacggaggaggggcctagtccgtcagaggcccaccaaggcgcggaggaccctttccgccctgcaggtaatctggagcaggctaatgaggagctaagagccatcatcaagaagatttggaagcgaaccagtatgaaactgttggaccaggtggtgccgccggccggcgacgatgaagtcacagtaggcaagttctatgccaccttcctgatccaagagtacttccgaaaatttaagaaaaggaaggagcagggcctggtagggaaaccatctcagaggaatgcactttctctacaggctggcctgaggaccctccatgatatcggtcccgaaattcgaagggctatatcaggagatcttaccgctgaagaagagttggataaagccatgaaggaggccgtgtcagccgccagcgaagatgacatcttcagaagagcaggtggcctttttggtaatcatgtctcatactaccagtcagacggacgctccgcgtttccccagacttttacaacgcagcgcccactgcacatcaacaaagccggctcaagccagggtgacacagaatcaccttcacatgaaaagcttgtggatagcactttcaccccatccagctattcaagtaccgggtctaacgccaacatcaataatgccaataacacagccctcggtcgcctccccagaccagccggctacccatcaactgtgtccaccgttgagggccatggtccccctttgtcccctgccattagggtgcaagaggtagcttggaagctgagcagcaacaggtgccacagccgggaatcccaggcagcgatggcaggacaggaagaaacaagtcaggacgagacctacgaagttaagatgaaccatgatactgaggcttgtagtgaaccctctctgctgtctaccgagatgctgagttaccaggatgacgaaaacagacagttgaccttgcctgaggaggacaaacgcgatatccgccagagccctaaacgcgggttcctccgcagcgcctcgcttggtcggagagcgtcatttcatttggaatgccttaagcgtcagaaggatcggggcggcgatatctcgcagaagaccgtacttcctttacacctcgttcatcatcaagcccttgctgttgctggattgtccccactcctgcagaggtctcattcccccgcctcatttccccgcccttttgcaactccgccagccacgcccgggagcaggggatggccgcctcaacctgtgcccacactcagattggaaggtgtggagtcatccgaaaaattgaatagtagttttccgagtatccactgcggctcgtgggcagagacaaccccaggtgggggaggctcaagcgctgctaggagagttagacccgtaagtctcatggtcccaagtcaggcaggtgcacccggtcggcaattccacgggagcgcgtctagtctggtcgaggcagtcttgatttctgaaggcctgggccagtttgcccaggaccccaaattcatcgaagtaactactcaagaactggccgatgcctgtgatatgactatcgaggaaatggaaagtgctgcagataatattttgtctggcggagcaccacagtcgccaaacggcgcgctgttgccctttgtcaattgcagggacgctggacaggacagagccggaggagaagaggatgctggatgcgtgcgggcacggggccgcccatccgaggaggagttacaagactctagggtctacgtgagttccctgtag

SEQ ID NO: 46968 - DNA, 6435 bp, Artificial Sequence
  derived and/or modified sequence
atggtgaatgaaaacaccaggatgtacatccctgaggagaaccaccagggcagcaactacggcagccccaggcctgcccacgccaacatgaatgccaatgctgctgctggcctggcccctgagcacatccccacccctggggccgccctgtcctggcaggccgccattgatgctgcccggcaggccaagctgatgggcagcgctggaaatgccaccatcagcacagtgagcagcacccagaggaagaggcagcagtatggcaagcccaagaagcagggcagcaccacagccacccggcccccccgggccctgctgtgcctgaccctgaagaaccccatccggcgggcctgcatcagcatcgtggagtggaagccctttgagatcatcatcctgctgaccatctttgccaactgtgtggccctggccatctacatccccttcccagaagatgacagcaatgccaccaacagcaacctggagcgggtggagtacctgttcctgatcatcttcaccgtggaggccttcctgaaggtgattgcctacggcctgctcttccaccccaatgcctacctgagaaatggctggaacctgctggacttcatcatcgtggtggtgggcctcttcagcgccatcctggagcaggccaccaaggcagatggagccaatgccctgggcggcaaaggagctggctttgatgtgaaggccctgcgggccttccgggtgctgcggcccctgcggctggtgtctggagtgcccagcctgcaggtggtgctgaacagcatcatcaaggccatggtgcccctgctgcacatcgccctgctggtgctgtttgtgatcatcatctatgccatcatcggcctggagctgttcatgggcaagatgcacaagacctgctacaaccaggagggcattgctgatgtgcctgcagaagatgaccccagcccctgtgccctggagaccggccacggccggcagtgccagaatggcaccgtgtgcaagccaggctgggatggccccaagcacggcatcaccaactttgacaactttgcctttgccatgctgactgtgttccagtgcatcaccatggagggctggacagatgtgctgtactgggtgaatgatgctgtgggccgggactggccctggatctactttgtgaccctcatcatcatcggcagcttctttgtgctgaacctggtgctgggcgtgctgtctggagagttcagcaaggagcgggagaaggccaaggcccggggggacttccagaagctgcgggagaagcagcagctggaggaggacctgaagggctacctggactggatcacccaggctgaagatattgatcctgaaaatgaagatgagggcatggatgaggagaagcccaggaacatgtccatgcccaccagcgagacagaatctgtgaacacagaaaatgtggccggcggggacatcgagggggagaactgtggggcccggctggcccaccgcatcagcaagagcaagttcagccgctactggaggcgctggaaccgcttctgcaggaggaagtgcagagctgctgtgaagagcaatgtgttctactggctggtgatcttcctggtgttcctgaacaccctgaccatcgccagcgagcactacaaccagcccaactggctgacagaggtgcaggacacagccaacaaggccctgctggccctcttcaccgctgagatgctgctgaagatgtacagcctgggcctgcaggcctactttgtgtccctcttcaacagatttgactgctttgtggtgtgtggcggcatcctggagaccatcctggtggagaccaagatcatgagccccctgggcatctctgtgctgcgctgtgtgcggctgctgcgcatcttcaagatcacccgctactggaacagcctgagcaacctggtggccagcctgctgaacagcgtgcgcagcatcgccagcctgctgctgctgctcttcctgttcatcatcatcttcagcctgctgggcatgcagctgtttggaggcaagttcaactttgatgagatgcagaccaggaggagcacctttgacaacttcccccagagcctgctgaccgtcttccagatcctgaccggggaggactggaacagcgtgatgtatgatggcatcatggcctatggaggccccagcttccctggcatgctggtgtgcatctacttcatcatcctcttcatctgtggcaactacatcctgctgaatgtgttcctggccatcgctgtggacaacctggctgatgctgagagcctgaccagcgcccagaaggaggaggaggaggagaaggagaggaagaagctggccaggacagccagccctgagaagaagcaggagctggtggagaagccagctgtgggggagagcaaggaggagaagattgagctgaagagcatcacagcagatggagagagccccccagccaccaagatcaacatggatgacctgcagcccaatgaaaatgaagacaagagcccctaccccaaccctgagaccactggagaggaggatgaggaggagcctgagatgcctgtgggcccccggccccggcccctgtctgagctgcacctgaaggagaaggctgtgcccatgcctgaggccagcgccttcttcatcttcagcagcaacaaccgcttccggctgcagtgccaccgcatcgtgaatgacaccatcttcaccaacctgatcctcttcttcatcctgctgagcagcatcagcctggccgctgaggaccctgtgcagcacaccagcttcaggaaccacatcctcttctactttgacatcgtgttcaccaccatcttcaccatcgagatcgccctgaagatgacagcctatggagccttcctgcacaagggcagcttctgcaggaactacttcaacatcctggacctgctggtggtgtctgtgtccctcatcagctttggcatccagagcagcgccatcaacgtggtgaagatcctgcgggtgctgcgggtgctgcggcccctgcgggccatcaacagagccaagggcctgaagcacgtggtgcagtgtgtgtttgtggccatccgcaccatcggcaacatcgtcatcgtgaccaccctgctgcagttcatgtttgcctgcatcggcgtgcagctgttcaagggcaagctgtacacctgcagcgacagcagcaagcagacagaagctgagtgcaagggcaactacatcacctacaaggatggagaggtggaccaccccatcatccagcccaggtcctgggagaacagcaagtttgattttgacaacgtgctggccgccatgatggccctcttcaccgtgtccacctttgagggctggccagagctgctgtaccgcagcattgacagccacacagaggacaagggccccatctacaactacagagtggagatcagcatcttcttcatcatctacatcatcatcatcgccttcttcatgatgaacatctttgtgggcttcgtcatcgtgaccttccaggagcagggcgagcaggagtacaagaactgtgagctggacaagaaccagaggcagtgtgtggagtatgccctgaaggcccggcccctgcggcgctacatccccaagaaccagcaccagtacaaggtgtggtacgtggtgaacagcacctactttgagtacctgatgtttgtgctgatcctgctgaacaccatctgcctggccatgcagcactacggccagagctgcctcttcaagatcgccatgaacatcctgaacatgctgttcaccggcctcttcaccgtggagatgatcctgaagctgattgccttcaagcccaagcactacttctgtgatgcctggaacacctttgatgccctgattgtggtgggcagcatcgtggacatcgccatcacagaaaatgctgaggagaacagccgcatcagcatcaccttcttccgcctcttccgggtgatgaggctggtgaagctgctgagcagaggagagggcatccgcaccctgctgtggaccttcatcaagagcttccaggccctgccctacgtggccctgctgattgtgatgctgttcttcatctatgctgtgattggcatgcaggtgtttgggaagatcgccctgaatgacaccacagagatcaacagaaacaacaacttccagaccttcccccaggccgtgctgctgctcttccgctgtgccactggagaggcctggcaggacatcatgctggcctgcatgcctgggaagaagtgtgcccctgagagcgagcccagcaacagcacagaaggagagaccccctgtggcagcagctttgctgtgttctacttcatctccttctacatgctgtgtgccttcctgatcatcaacctgtttgtggccgtcatcatggacaactttgactacctgacccgggactggagcatcctgggcccccaccacctggatgagttcaagaggatctgggccgagtatgaccctgaggccaagggccgcatcaagcacctggatgtggtgaccctgctgcggcgcatccagccccccctgggctttgggaagctgtgcccccaccgggtggcctgcaagaggctggtgtccatgaacatgcccctgaacagtgatggcaccgtgatgtttaatgccaccctgtttgccctggtgaggacagccctgcgcatcaagacagaggagggccccagccccagcgaggcccaccagggcgctgaggaccccttccggcctgctggcaacctggagcaggccaatgaggagctgcgggccatcatcaagaagatctggaagaggacctccatgaagctgctggaccaggtggtgcccccagctggagatgatgaggtgacagtgggcaagttctacgccaccttcctgatccaggagtacttcaggaagttcaagaagaggaaggagcagggcctggtgggcaagcccagccagagaaatgccctgagcctgcaggccggcctgcggaccctgcatgacatcggccctgagatccggcgggccatcagcggggacctgacagctgaggaggagctggacaaggccatgaaggaggccgtgtctgctgcctctgaagatgacatcttcagaagagctgggggcctgtttggaaaccacgtgtcctactaccagagtgatggccgcagcgccttcccccagaccttcaccacccagaggcccctgcacatcaacaaggccggcagcagccagggcgacacagagagccccagccatgagaagctggtggacagcaccttcacccccagcagctacagcagcacaggcagcaatgccaacatcaacaatgccaacaacacagccctgggccgcctgcccaggcctgctggctaccccagcacagtgtccacagtggagggccacggcccccccctgagccctgccatccgggtgcaggaggtggcctggaagctgagcagcaaccgctgccacagccgggagagccaggccgccatggccggccaggaggagaccagccaggatgagacctatgaggtgaagatgaaccacgacacagaggcctgcagcgagcccagcctgctgagcacagagatgctgagctaccaggatgatgaaaatcggcagctgaccctgcctgaggaggacaagagggacatccggcagagccccaagaggggcttcctgcggagcgccagcctgggcagaagagccagcttccacctggagtgcctgaagaggcagaaggacagaggaggagacatcagccagaagacagtgctgcccctgcacctggtgcaccaccaggccctggccgtggccggcctgagccccctgctgcagaggagccacagccctgccagcttcccccggccctttgccaccccaccagccaccccaggcagccggggctggccaccccagcctgtgcccaccctgcggctggagggcgtggagagcagcgagaagctgaacagcagcttccccagcatccactgcggctcctgggccgagaccacccctgggggcggcggcagcagcgctgccaggagagtgcggcctgtgtccctgatggtgcccagccaggccggggcccctggccggcagttccacggcagcgccagcagcctggtggaggccgtgctgatcagcgagggcctgggccagtttgcccaggaccccaagttcatcgaggtgaccacccaggagctggctgatgcctgtgacatgaccatcgaggagatggagagcgctgctgacaacatcctgtctggaggagccccccagagccccaatggagccctgctgccctttgtgaactgcagagatgctggccaggaccgggccggcggggaggaggatgctggctgtgtgcgggcccggggccggcccagcgaggaggagctgcaggacagccgggtgtatgtgagcagcctgtag

SEQ ID NO: 46969 - DNA, 6435 bp, Artificial Sequence
  derived and/or modified sequence
atggtgaacgagaacacccggatgtacatccccgaggagaaccaccagggctctaactatgggagcccacgcccagcacacgcaaacatgaacgcgaatgccgccgccggccttgcacccgagcatattcccacaccgggcgctgctctttcctggcaggctgcgatcgacgccgcccggcaggctaaactaatgggctccgcaggcaacgcaacaatttccactgtgtcctcaactcaaagaaagcgccagcagtacggcaaacctaagaagcaggggtcgactaccgcaactcgtccaccaagggcgcttctatgtctgacattgaagaaccccatcaggcgcgcctgcatctctatcgtggagtggaagcctttcgagatcattatcttgcttacgatctttgccaactgcgtcgccctcgccatttatataccatttcctgaggatgactcgaacgcaaccaacagtaatcttgaaagagtcgagtaccttttcctgattatctttacggtggaggcttttctcaaggttattgcttatggtcttctgttccaccctaacgcctacctgaggaacgggtggaacctgctggatttcattattgtggtggtcgggctgttttctgccatcctggagcaggccaccaaagctgacggagcaaatgcactggggggtaaaggcgctggtttcgacgtaaaagcactgagagcatttcgcgttctgcgtcccctcagactggtgtctggggtgccaagtcttcaggtggtcctgaacagcattattaaagctatggtgcctctcctacatattgctctacttgtactgttcgtaatcatcatctatgctatcattggactggaactctttatgggcaaaatgcataaaacctgctacaatcaggagggcatcgctgacgtgcccgctgaggacgatccatcaccatgcgctcttgagacaggtcacggtaggcaatgtcagaacggaactgtatgtaagccaggctgggatggacctaaacacggaatcaccaacttcgacaatttcgccttcgcgatgctgacggtcttccaatgtataacgatggagggttggacagacgtcctctactgggtgaacgacgccgtcggaagggattggccctggatctatttcgtcaccctcatcataataggctccttcttcgtgctgaatcttgttttgggagtcctgagcggagaattcagcaaagagcgtgagaaagctaaagctcgcggagactttcagaagttaagagagaaacaacaactagaggaggacctgaagggttatctagattggattacgcaggccgaagacattgatcccgagaacgaggacgaaggaatggacgaggagaaacctcggaacatgagtatgcccacaagcgagacagagtctgttaacactgaaaacgtggcaggaggggatatcgagggggaaaactgcggtgctaggttggcccatcgcatcagcaagtcaaaattctccaggtactggcggaggtggaacagattttgtcgtcggaaatgccgggctgcagttaaatccaacgtgttctactggctggttatctttttagttttcctgaacacactaaccatcgcctctgagcattacaatcagcccaactggctgacagaagttcaagacactgctaacaaagctctgctggcactgtttactgcggaaatgttactaaaaatgtactcactgggcttgcaggcctatttcgtaagtctatttaaccgctttgattgttttgttgtgtgtgggggtattttggagaccatactagtggagaccaagatcatgtcacccctggggatttcagtgttgaggtgcgtacggctgcttcgtattttcaaaattacaaggtactggaactcccttagcaatttagtggcttcacttttgaattctgtccggagcatcgcttctttgcttctgctgttattcctcttcattatcatcttttctcttttgggcatgcagctcttcggcggtaaatttaatttcgatgaaatgcaaacacgtaggtcaacctttgataactttccacagagtctcctaactgtcttccagatcctgaccggtgaggactggaattccgtgatgtacgacgggattatggcctatgggggccccagcttccccggaatgctagtgtgcatctactttatcattctttttatttgtgggaactatattctgctgaatgtctttctggcaatcgccgtggataatctggcagacgccgaatctctcactagcgcccagaaagaagaggaggaggagaaggagcggaaaaaacttgcaagaactgcgtctccagaaaagaaacaggaactggttgaaaagccggccgtgggagaaagtaaagaggaaaagatcgagctgaagagcattacggcggacggcgaatctccccctgctaccaagattaacatggacgacttgcagcccaatgaaaacgaagacaagtccccatatcctaacccggagaccacaggcgaagaggacgaggaggaacccgaaatgcccgttggccccaggccaaggccgttgtcagagcttcacctgaaagagaaggctgtgcctatgccagaagccagcgctttctttatcttcagctctaacaacaggttccgacttcaatgtcaccgcatagttaacgataccatttttactaatcttatcctatttttcattctcctgtcttctatcagcttggcagctgaggacccagtgcagcacacgtcctttaggaaccatatcttattctacttcgatattgttttcacaactatttttactatagagatcgctctgaaaatgacagcgtacggcgccttcctgcacaaggggagtttttgtcggaattattttaatatcctagacttattagtggttagcgttagcttgatttctttcgggatccaatctagcgccatcaacgttgtgaagatactcagggttctgagggtcttaaggcccctgcgcgccatcaaccgcgcgaagggactcaaacacgttgttcagtgcgtgtttgtcgcgataaggaccatcgggaacattgttatagtgacaaccctgctccagttcatgttcgcttgtattggcgtgcaacttttcaagggaaaactgtatacatgctcagatagctctaagcaaacagaggcggaatgcaagggtaactacatcacgtacaaagacggggaggttgaccacccgattattcagccccggtcttgggagaactccaagttcgactttgacaacgtgttggccgccatgatggctctgttcacagtctcaactttcgagggatggcctgagctgctgtacagaagtatagatagtcacaccgaggacaaggggcccatttataactatcgggtggagatctcaattttcttcatcatctacatcatcatcatcgcattctttatgatgaacatcttcgtgggctttgtaattgttacctttcaggagcagggggaacaggagtacaagaactgcgaacttgacaagaaccaaaggcagtgtgtggagtacgccctgaaggcccgaccgttgcgacgctatatcccaaaaaaccagcaccagtataaagtgtggtatgtggttaactcaacatatttcgagtaccttatgttcgttctgatcctcctcaatactatctgtctggcgatgcagcactacggacaaagctgtctctttaagattgctatgaacatcctgaacatgctctttaccggccttttcacagttgagatgatccttaagctgatcgcctttaaacctaaacactatttctgtgatgcctggaacacctttgatgctcttatcgtcgtgggtagtattgtagacatcgcaataaccgaaaacgccgaagaaaatagccgtatctccattacgttctttcgtttatttagggtgatgcggctagtgaaactcttaagtagaggtgagggaatacggaccttactgtggacatttattaagtcgttccaggctctgccttatgtggccctcctaattgtgatgctctttttcatctatgccgtcattggaatgcaggtgttcggcaaaattgccctgaacgacacgaccgaaatcaatcgtaataataattttcaaacctttcctcaggctgttcttctgctctttaggtgtgcaaccggagaggcttggcaggatatcatgctagcctgcatgcccggcaagaagtgcgcacccgaaagcgaaccgagtaatagtactgaaggcgagaccccatgtgggtcatcttttgcagtcttctattttatttccttttacatgctttgcgccttcctaatcataaatctctttgtggccgtcatcatggataattttgattatctgacgagggactggtccatcctggggccgcaccatctagatgaattcaagagaatttgggcagaatacgatcccgaagctaaaggacgaatcaagcacctggatgtggtaaccctcctgagacgcatccaaccccctctgggctttggaaagttatgtcctcaccgcgtcgcttgcaaacgtctcgtttcaatgaatatgccactcaacagtgatgggacggtcatgttcaacgcaacattgttcgccctggtgaggacagcactcagaatcaaaaccgaggagggtccttccccgtctgaagcccatcaaggtgccgaggatccattccgccccgctggcaacctagaacaggccaacgaagagctcagggctatcattaaaaaaatttggaaaaggacctctatgaaacttctagatcaggtggttccacccgccggagatgacgaggtgacagtgggtaagttttacgcaaccttccttattcaagagtattttcggaaattcaaaaaaagaaaagagcagggattggtgggaaaaccaagccagagaaatgccctgtctttacaagctgggcttagaaccttgcatgacattgggccagaaattcgaagagcgatatccggggacttaaccgccgaagaggagttagacaaggccatgaaggaagccgtgtctgccgcatccgaagacgacatcttccggcgagccggcggcctcttcggcaaccatgtttcctactatcagtctgatggccgaagcgcgttccctcagacattcacaacccaacgccctctacatatcaataaggccggatccagtcaaggcgacaccgaatcaccttcgcatgaaaaattggtggactccacctttacacccagcagttattcaagcactggatctaatgccaatattaacaatgctaacaataccgcactggggcgattgccaaggcccgcagggtacccctctacggtgagcacagtggagggccatgggccaccattgagtcctgccatccgggtccaggaggtggcgtggaagctctcatcgaaccgctgccacagcagggagtcacaggccgctatggccggccaggaggagacctctcaggatgagacatacgaagtcaaaatgaatcatgatactgaggcatgcagcgaaccttctctattgagcaccgaaatgctttcgtaccaggacgacgaaaatagacagttgacactaccggaagaagacaagcgggatattaggcagtcaccgaaaagagggtttctccgctccgccagtttaggccggcgggctagttttcatcttgagtgcctgaaaaggcagaaggacagaggaggcgacatatcccagaaaaccgtgttgcccctgcatctggtccaccaccaggcactggccgtcgctggccttagtcccttgctccagaggtcccattcccccgctagcttccccagaccattcgctacacctccggccacgcctggatcacgcggatggccaccacagcctgtccctaccctgcggcttgagggagtcgagtcatcagaaaagctaaacagctcatttccctcgattcattgtggtagttgggcagaaaccacccctggcggaggtgggtcctcagccgcgcgaagagttcggccagtgagcctcatggtacctagccaggctggtgcgccaggaaggcagttccatggtagcgcatcctcactggtggaggctgtactgatatcggagggattgggccagttcgcacaggaccctaagttcattgaggtgactacgcaggagctggcagatgcctgtgacatgacaattgaggagatggagagcgccgcagacaatatactgtccgggggcgcaccacagagtcccaacggcgcgctgttgcctttcgtgaattgcagagatgccggacaggatcgcgctggaggggaggaggacgcaggctgtgtccgcgcccgggggaggccttccgaggaggaacttcaggatagccgcgtgtatgtttccagcctctag

SEQ ID NO: 46970 - DNA, 6434 bp, Artificial Sequence
  derived and/or modified sequence
atggtgaatgaaaatacacgcatgtatatcccagaggaaaatcatcagggaagtaattatggtagtcctcggccagcccacgctaatatgaatgccaatgccgctgctggtctagcccctgagcacattcctacccccggagctgccctcagctggcaggccgctattgatgccgctcgtcaagccaagctgatggggtccgcaggtaacgccacaatttccacagtcagcagtacacaacgaaaacgtcagcagtacggcaaacctaagaaacagggctcaaccacagccacccgccctcctcgcgctttattatgcctcactctgaagaaccccatccgaagagcctgcatttccatagtcgagtggaagccctttgagatcataattctacttacaattttcgctaattgcgttgccctcgctatctacattccatttccagaggatgattctaatgccactaatagcaatttggagcgggtggagtacctgttcctcatcatatttaccgtagaagccttccttaaggtcattgcctacggcctgctgtttcacccaaacgcctacctgcggaatggctggaacctgctcgactttataatagttgtggtgggattgtttagcgccatcctcgaacaggccaccaaggctgatggagcaaacgccctgggcggaaagggagccggttttgatgttaaggctttgagggcctttagagtgttgcggcctctcagactggtgagcggagtgccatccctgcaggtagtgttgaactccataatcaaggccatggtgcctctccttcacattgcactgttggtcctgtttgtcataataatctacgctatcattggtctggagttgtttatggggaaaatgcataaaacctgctacaaccaggaaggaatcgcagacgtgcccgctgaggacgacccaagcccgtgtgctctcgagacaggacatggtaggcaatgccagaacggcaccgtgtgtaaacctggttgggacggaccaaaacatgggattacaaacttcgataacttcgccttcgcaatgctgacggtattccaatgcatcactatggaggggtggaccgatgtgctttactgggtaaatgacgccgtgggtcgggattggccctggatttattttgtgacactgattattattgggtccttcttcgtactcaacttggtgcttggggtcctaagcggagagttctccaaggagagggaaaaagcgaaagctcgtggtgactttcaaaaactgagagagaagcagcagctcgaggaagatctgaaaggttatcttgattggatcacacaggcagaggatatagatcccgagaatgaagatgagggcatggatgaagaaaaaccgcgtaacatgtctatgccaacctccgaaaccgagtctgtgaacaccgaaaacgtggcgggaggagacatcgaaggagaaaattgcggcgcacgattggctcatcggattagtaagtctaagttttctcgatactggagacgctggaacaggttctgccgacgaaaatgccgggcagcggtgaagtcgaatgtgttctactggctggtaatattcctggtctttctaaacactctcacgattgcatcagaacattacaatcagcccaactggcttactgaggtgcaggatactgctaacaaagccctactcgcactattcactgcagagatgttgctgaaaatgtactctttggggctgcaagcatattttgtgtctctctttaaccggtttgactgctttgtggtgtgtggcggtatcttagaaacaattctcgtagagacaaagatcatgagcccgctgggaatctctgtgttacgatgcgtgcgcctcctccggattttcaaaataacaaggtactggaattcactgtctaacctggtggcctccctactcaactctgtccggtccattgcttccctcttactactgttatttctatttatcattatctttagtttgctggggatgcagctctttggcggtaagttcaattttgacgaaatgcaaacaagaagatccaccttcgacaactttccccagagcctgctgaccgtgttccagattctgactggtgaagactggaacagcgtgatgtacgatggcatcatggcatacggagggccttcgttcccaggaatgctggtttgtatctattttattatactgttcatatgtggcaactatattctcctgaacgtgtttttggcaatcgccgtcgataatctggccgacgcagagagcctgaccagtgcccagaaggaggaagaagaagagaaagaacgcaagaaactggctaggacagcaagcccagagaaaaagcaggagctcgtagaaaaacccgcagtaggtgagtcaaaggaggagaaaatcgagctgaagtctatcacggccgacggagagtctccaccagccactaaaatcaatatggatgaccttcagcccaatgaaaacgaagacaagagcccctatcctaaccctgagacaaccggcgaagaggacgaggaggagccggagatgcccgttggacctcgtcccagaccactgtctgagctacacttaaaggaaaaagctgttcccatgcccgaggcttccgctttttttatcttcagcagtaacaatcgtttccgtctccagtgtcatcgcattgttaatgatacaattttcaccaacctaatcctcttcttcattctgttgtcctctatttcactggcagctgaagatcctgtgcagcatacctcctttaggaaccacatcctgttctattttgacatcgtgttcactactatctttactattgaaatcgcccttaagatgaccgcgtatggagctttccttcataaggggagcttctgcaggaactatttcaatatcttggacctgttggtggtgagcgtgagtctaatcagctttggaatccagagctctgccatcaacgtggtcaagattctcagggttctgagggtactccgcccactcagggccatcaacagggctaaggggctgaaacacgtcgtccagtgtgtatttgtggccattcgcacaatcgggaatattgtgatcgttacaacacttctccagtttatgttcgcctgcataggcgtgcaactgtttaaaggcaagctgtacacttgctccgattcgtccaagcaaaccgaagccgaatgcaaaggtaattacattacatataaggatggggaagtcgaccatccaatcatccagccaagaagttgggagaattctaaatttgattttgacaacgtgttagccgctatgatggctttatttactgtgtcaaccttcgaggggtggcccgagctcctctacagaagcatcgacagtcacacggaggataagggcccaatttataactaccgcgtcgaaatctcaatcttcttcatcatctacattatcatcatcgcctttttcatgatgaatatcttcgttgggtttgtgatcgttacgttccaggagcagggcgaacaggaatacaagaattgcgagttggacaagaatcagagacaatgtgtcgagtacgcgctgaaggccagacctttgcggcgttacatcccgaaaaaccaacaccagtataaggtgtggtacgtggtcaattcaacctactttgagtatctcatgtttgtccttatactgttaaatactatatgcctcgcgatgcaacattacggccagtcttgtctgttcaaaatcgcaatgaacattctgaacatgttatttacaggactttttaccgtcgaaatgatactgaagttaattgccttcaagccgaagcattacttctgcgacgcctggaatacatttgatgctcttatagtggtcgggtcgatcgtggacatcgctattactgagaatgctgaagagaatagtagaatttcaatcaccttctttagattattccgcgtgatgagactcgtgaagttactaagccgcggagaggggatacgtaccttactatggacttttatcaagagttttcaggcgctaccatatgtagctctgctaattgtgatgcttttctttatatacgccgtgatcggcatgcaggttttcggcaaaatcgcccttaatgacaccacagaaattaacagaaacaataacttccagactttcccccaggccgtgcttttgctttttcgctgtgcaacaggcgaggcgtggcaggatattatgctcgcatgtatgccaggaaagaaatgcgccccagaatcggagccctcaaactccacggagggagaaaccccctgtggatctagcttcgccgtcttttattttatctcgttctacatgctgtgtgcatttttgatcatcaacctgttcgtggctgtcattatggacaattttgattatctcactagagattggtcgattctgggaccccaccaccttgacgagttcaagcgcatatgggccgagtacgacccggaggcaaagggtcgcattaagcaccttgatgtcgtgactctcctaagacgcattcaaccgccactcggttttggcaagctgtgtccacacagagttgcatgtaagcgtttggtgagcatgaatatgcctttaaactctgatggcacagttatgtttaacgccactttgtttgcactcgtgagaacggcgctgcggattaaaaccgaagaagggcctagtccctcagaagcacatcaaggagccgaagaccctttccggcctgcaggcaatctggaacaggccaacgaggaactcagggctattatcaagaagatatggaaaaggacatccatgaagctactggaccaggtggtgcctcctgcaggtgacgatgaagttacagtgggcaaattttacgcaaccttcctcatccaggaatatttccggaaattcaaaaagcgaaaggagcagggactggtgggcaagccaagccaaagaaacgctctgtcactgcaggccggattacgcacattgcatgatattggccctgagattcggagagctatctccggagacctgactgcagaggaggaactggacaaggccatgaaggaggccgtttcagccgctagcgaggatgatattttcagaagggcaggtggcctctttggcaatcatgtttcctactaccaaagcgacgggagatccgcgttcccacagacttttaccactcaaaggcccctccatatcaacaaggcagggagttcccagggggacactgaaagtccgagccatgaaaagctggttgacagcacgttcacaccttcctcctacagctccactgggagcaacgccaacattaacaatgcaaacaacacagccctggggagattgcctcgacctgctggctatccctctaccgttagcacagttgaggggcacggccctccgctctccccggcaattagggtccaggaggtcgcctggaagctctcctccaataggtgccactcccgagagagtcaggctgccatggcaggccaggaggagacctcccaggacgagacctacgaggtcaagatgaatcacgacacagaagcctgtagtgaaccctcccttctctctacagaaatgctcagctaccaggatgacgaaaataggcagctcaccctcccagaagaagataagagagacatcagacagtcccctaagcgcggttttctgaggtctgcttcactgggaaggcgagcgagcttccacctcgagtgtctgaagagacaaaaggataggggcggagatatctcccagaaaacagttttgcccttacacctcgtccatcatcaggctctggccgttgcaggcctgagtccgctgttgcaacgctcacactctcctgcaagcttcccaagaccttttgctaccccaccggctacacctggtagtagagggtggccaccacagcctgtaccaacattgaggctggaaggggtcgagtccagcgaaaaactaaattcatccttcccatccatccactgcggctcctgggccgagactacccccggtgggggtggctcctccgcggctaggcgcgtcagacctgtttcactgatggtgccctctcaagctggagctccgggacgccagttccatggctccgcttcttcccttgtcgaggccgttctgatttcagagggactgggtcagttcgcccaggatcctaaatttattgaagtcaccactcaggaactagccgacgcctgcgacatgaccatcgaagagatggagagtgcagcagacaatatactgagcggaggcgctccacagtcacctaatggcgcactgctgccattcgtgaattgtcgggatgccggacaagacagggcgggtggcgaggaggacgccggatgcgtgcgagctagaggtcgcccttcagaagaggagttgcaagactctagagtctatgtatctagcctgta

SEQ ID NO: 46971 - DNA, 6529 bp, Artificial Sequence
  derived and/or modified sequence
atggtcaatgagaatacgaggatgtacattccagaggaaaaccaccaaggttccaactatgggagcccacgccccgcccatgccaacatgaatgccaatgcggcagcggggctggcccctgagcacatccccaccccgggggctgccctgtcgtggcaggcggccatcgacgcagcccggcaggctaagctgatgggcagcgctggcaatgcgaccatctccacagtcagctccacgcagcggaagcggcagcaatatgggaaacccaagaagcagggcagcaccacggccacacgcccgccccgagccctgctctgcctgaccctgaagaaccccatccggagggcctgcatcagcattgtcgaatggaaaccatttgaaataattattttactgactatttttgccaattgtgtggccttagcgatctatattccctttccagaagatgattccaacgccaccaattccaacctggaacgagtggaatatctctttctcataatttttacggtggaagcgtttttaaaagtaatcgcctatggactcctctttcaccccaatgcctacctccgcaacggctggaacctactagattttataattgtggttgtggggctttttagtgcaattttagaacaagcaaccaaagcagatggggcaaacgctctcggagggaaaggggccggatttgatgtgaaggcgctgagggccttccgcgtgctgcgccccctgcggctggtgtccggagtcccaagtctccaggtggtcctgaattccatcatcaaggccatggtccccctgctgcacatcgccctgcttgtgctgtttgtcatcatcatctacgccatcatcggcttggagctcttcatggggaagatgcacaagacctgctacaaccaggagggcatagcagatgttccagcagaagatgacccttccccttgtgcgctggaaacgggccacgggcggcagtgccagaacggcacggtgtgcaagcccggctgggatggtcccaagcacggcatcaccaactttgacaactttgccttcgccatgctcacggtgttccagtgcatcaccatggagggctggacggacgtgctgtactgggtcaatgatgccgtaggaagggactggccctggatctattttgttacactaatcatcatagggtcattttttgtacttaacttggttctcggtgtgcttagcggagagttttccaaagagagggagaaggccaaggcccggggagatttccagaagctgcgggagaagcagcagctagaagaggatctcaaaggctacctggattggatcactcaggccgaagacatcgatcctgagaatgaggacgaaggcatggatgaggagaagccccgaaacatgagcatgcccaccagtgagaccgagtccgtcaacaccgaaaacgtggctggaggtgacatcgagggagaaaactgcggggccaggctggcccaccggatctccaagtcaaagttcagccgctactggcgccggtggaatcggttctgcagaaggaagtgccgcgccgcagtcaagtctaatgtcttctactggctggtgattttcctggtgttcctcaacacgctcaccattgcctctgagcactacaaccagcccaactggctcacagaagtccaagacacggcaaacaaggccctgctggccctgttcacggcagagatgctcctgaagatgtacagcctgggcctgcaggcctacttcgtgtccctcttcaaccgctttgactgcttcgtcgtgtgtggcggcatcctggagaccatcctggtggagaccaagatcatgtccccactgggcatctccgtgctcagatgcgtccggctgctgaggattttcaagatcacgaggtactggaactccttgagcaacctggtggcatccttgctgaactctgtgcgctccatcgcctccctgctccttctcctcttcctcttcatcatcatcttctccctcctggggatgcagctctttggaggaaagttcaactttgatgagatgcagacccggaggagcacattcgataacttcccccagtccctcctcactgtgtttcagatcctgaccggggaggactggaattcggtgatgtatgatgggatcatggcttatggcggcccctcttttccagggatgttagtctgtatttacttcatcatcctcttcatctgtggaaactatatcctactgaatgtgttcttggccattgctgtggacaacctggctgatgctgagagcctcacatctgcccaaaaggaggaggaagaggagaaggagagaaagaagctggccaggactgccagcccagagaagaaacaagagttggtggagaagccggcagtgggggaatccaaggaggagaagattgagctgaaatccatcacggctgacggagagtctccacccgccaccaagatcaacatggatgacctccagcccaatgaaaatgaggataagagcccctaccccaacccagaaactacaggagaagaggatgaggaggagccagagatgcctgtcggccctcgcccacgaccactctctgagcttcaccttaaggaaaaggcagtgcccatgccagaagccagcgcgtttttcatcttcagctctaacaacaggtttcgcctccagtgccaccgcattgtcaatgacacgatcttcaccaacctgatcctcttcttcattctgctcagcagcatttccctggctgctgaggacccggtccagcacacctccttcaggaaccatattctgttttattttgatattgtttttaccaccattttcaccattgaaattgctctgaagatgactgcttatggggctttcttgcacaagggttctttctgccggaactacttcaacatcctggacctgctggtggtcagcgtgtccctcatctcctttggcatccagtccagtgcaatcaatgtcgtgaagatcttgcgagtcctgcgagtactcaggcccctgagggccatcaacagggccaaggggctaaagcatgtggttcagtgtgtgtttgtcgccatccggaccatcgggaacatcgtgattgtcaccaccctgctgcagttcatgtttgcctgcatcggggtccagctcttcaagggaaagctgtacacctgttcagacagttccaagcagacagaggcggaatgcaagggcaactacatcacgtacaaagacggggaggttgaccaccccatcatccaaccccgcagctgggagaacagcaagtttgactttgacaatgttctggcagccatgatggccctcttcaccgtctccaccttcgaagggtggccagagctgctgtaccgctccatcgactcccacacggaagacaagggccccatctacaactaccgtgtggagatctccatcttcttcatcatctacatcatcatcatcgccttcttcatgatgaacatcttcgtgggcttcgtcatcgtcacctttcaggagcagggggagcaggagtacaagaactgtgagctggacaagaaccagcgacagtgcgtggaatacgccctcaaggcccggcccctgcggaggtacatccccaagaaccagcaccagtacaaagtgtggtacgtggtcaactccacctacttcgagtacctgatgttcgtcctcatcctgctcaacaccatctgcctggccatgcagcactacggccagagctgcctgttcaaaatcgccatgaacatcctcaacatgctcttcactggcctcttcaccgtggagatgatcctgaagctcattgccttcaaacccaagcactatttctgtgatgcatggaatacatttgacgccttgattgttgtgggtagcattgttgatatagcaatcaccgagaacgcagaggaaaactcccgcatctccatcaccttcttccgcctgttccgggtcatgcgtctggtgaagctgctgagccgtggggagggcatccggacgctgctgtggaccttcatcaagtccttccaggccctgccctatgtggccctcctgatcgtgatgctgttcttcatctacgcggtgatcgggatgcaggtgtttgggaaaattgccctgaatgataccacagagatcaaccggaacaacaactttcagaccttcccccaggccgtgctgctcctcttcaggtgtgccaccggggaggcctggcaggacatcatgctggcctgcatgccaggcaagaagtgtgccccagagtccgagcccagcaacagcacggagggtgaaacaccctgtggtagcagctttgctgtcttctacttcatcagcttctacatgctctgtgccttcctgatcatcaacctctttgtagctgtcatcatggacaactttgactacctgacaagggactggtccatccttggtccccaccacctggatgagtttaaaagaatctgggcagagtatgaccctgaagccaagggtcgtatcaaacacctggatgtggtgaccctcctccggcggattcagccgccactaggttttgggaagctgtgccctcaccgcgtggcttgcaaacgcctggtctccatgaacatgcctctgaacagcgacgggacagtcatgttcaatgccaccctgtttgccctggtcaggacggccctgaggatcaaaacagaagagggacccagcccatcagaggcccaccaaggggctgaggatcctttccgccctgcagggaacctagaacaagccaatgaggagctgcgggcgatcatcaagaagatctggaagcggaccagcatgaagctgctggaccaggtggtgccccctgcaggtgatgatgaggtcaccgttggcaagttctacgccacgttcctgatccaggagtacttccggaagttcaagaagcgcaaagagcagggccttgtgggcaagccctcccagaggaacgcgctgtctctgcaggctggcttgcgcacactgcatgacatcgggcctgagatccgacgggccatctctggagatctcaccgctgaggaggagctggacaaggccatgaaggaggctgtgtccgctgcttctgaagatgacatcttcaggagggccggtggcctgttcggcaaccacgtcagctactaccaaagcgacggccggagcgccttcccccagaccttcaccactcagcgcccgctgcacatcaacaaggcgggcagcagccagggcgacactgagtcgccatcccacgagaagctggtggactccaccttcaccccgagcagctactcgtccaccggctccaacgccaacatcaacaacgccaacaacaccgccctgggtcgcctccctcgccccgccggctaccccagcacggtcagcactgtggagggccacgggccccccttgtcccctgccatccgggtgcaggaggtggcgtggaagctcagctccaacaggtgccactcccgggagagccaggcagccatggcgggtcaggaggagacgtctcaggatgagacctatgaagtgaagatgaaccatgacacggaggcctgcagtgagcccagcctgctctccacagagatgctctcctaccaggatgacgaaaatcggcaactgacgctcccagaggaggacaagagggacatccggcaatctccgaagaggggtttcctccgctctgcctcactaggtcgaagggcctccttccacctggaatgtctgaagcgacagaaggaccgagggggagacatctctcagaagacagtcctgcccttgcatctggttcatcatcaggcattggcagtggcaggcctgagccccctcctccagagaagccattcccctgcctcattccctaggccttttgccaccccaccagccacacctggcagccgaggctggcccccacagcccgtccccaccctgcggcttgagggggtcgagtccagtgagaaactcaacagcagcttcccatccatccactgcggctcctgggctgagaccacccccggtggcgggggcagcagcgccgcccggagagtccggcccgtctccctcatggtgcccagccaggctggggccccagggaggcagttccacggcagtgccagcagcctggtggaagcggtcttgatttcagaaggactggggcagtttgctcaagatcccaagttcatcgaggtcaccacccaggagctggccgacgcctgcgacatgaccatagaggagatggagagcgcggccgacaacatcctcagcgggggcgccccacagagccccaatggcgccctcttaccctttgtgaactgcagggacgcggggcaggaccgagccgggggcgaagaggacgcgggctgtgtgcgcgcgcggggtcgaccgagtgaggaggagctccaggacagcagggtctacgtcagcagcctgtagtgggcgctgccagatgcgggcttttttttatttgtttcaatgttcctaatgggttcgtttcagaagtgcctcactgttctcgtgacctggagtt

SEQ ID NO: 46972 - DNA, 6435 bp, Artificial Sequence
  derived and/or modified sequence
atggtgaacgagaacaccagaatgtacatccccgaggagaaccaccagggcagcaactacggcagccccagacccgcccacgccaacatgaacgccaacgccgccgccggcctggcccccgagcacatccccacccccggcgccgccctgagctggcaggccgccatcgacgccgccagacaggccaagctgatgggcagcgccggcaacgccaccatcagcaccgtgagcagcacccagagaaagagacagcagtacggcaagcccaagaagcagggcagcaccaccgccaccagaccccccagagccctgctgtgcctgaccctgaagaaccccatcagaagagcctgcatcagcatcgtggagtggaagcccttcgagatcatcatcctgctgaccatcttcgccaactgcgtggccctggccatctacatccccttccccgaggacgacagcaacgccaccaacagcaacctggagagagtggagtacctgttcctgatcatcttcaccgtggaggccttcctgaaggtgatcgcctacggcctgctgttccaccccaacgcctacctgagaaacggctggaacctgctggacttcatcatcgtggtggtgggcctgttcagcgccatcctggagcaggccaccaaggccgacggcgccaacgccctgggcggcaagggcgccggcttcgacgtgaaggccctgagagccttcagagtgctgagacccctgagactggtgagcggcgtgcccagcctgcaggtggtgctgaacagcatcatcaaggccatggtgcccctgctgcacatcgccctgctggtgctgttcgtgatcatcatctacgccatcatcggcctggagctgttcatgggcaagatgcacaagacctgctacaaccaggagggcatcgccgacgtgcccgccgaggacgaccccagcccctgcgccctggagaccggccacggcagacagtgccagaacggcaccgtgtgcaagcccggctgggacggccccaagcacggcatcaccaacttcgacaacttcgccttcgccatgctgaccgtgttccagtgcatcaccatggagggctggaccgacgtgctgtactgggtgaacgacgccgtgggcagagactggccctggatctacttcgtgaccctgatcatcatcggcagcttcttcgtgctgaacctggtgctgggcgtgctgagcggcgagttcagcaaggagagagagaaggccaaggccagaggcgacttccagaagctgagagagaagcagcagctggaggaggacctgaagggctacctggactggatcacccaggccgaggacatcgaccccgagaacgaggacgagggcatggacgaggagaagcccagaaacatgagcatgcccaccagcgagaccgagagcgtgaacaccgagaacgtggccggcggcgacatcgagggcgagaactgcggcgccagactggcccacagaatcagcaagagcaagttcagcagatactggagaagatggaacagattctgcagaagaaagtgcagagccgccgtgaagagcaacgtgttctactggctggtgatcttcctggtgttcctgaacaccctgaccatcgccagcgagcactacaaccagcccaactggctgaccgaggtgcaggacaccgccaacaaggccctgctggccctgttcaccgccgagatgctgctgaagatgtacagcctgggcctgcaggcctacttcgtgagcctgttcaacagattcgactgcttcgtggtgtgcggcggcatcctggagaccatcctggtggagaccaagatcatgagccccctgggcatcagcgtgctgagatgcgtgagactgctgagaatcttcaagatcaccagatactggaacagcctgagcaacctggtggccagcctgctgaacagcgtgagaagcatcgccagcctgctgctgctgctgttcctgttcatcatcatcttcagcctgctgggcatgcagctgttcggcggcaagttcaacttcgacgagatgcagaccagaagaagcaccttcgacaacttcccccagagcctgctgaccgtgttccagatcctgaccggcgaggactggaacagcgtgatgtacgacggcatcatggcctacggcggccccagcttccccggcatgctggtgtgcatctacttcatcatcctgttcatctgcggcaactacatcctgctgaacgtgttcctggccatcgccgtggacaacctggccgacgccgagagcctgaccagcgcccagaaggaggaggaggaggagaaggagagaaagaagctggccagaaccgccagccccgagaagaagcaggagctggtggagaagcccgccgtgggcgagagcaaggaggagaagatcgagctgaagagcatcaccgccgacggcgagagcccccccgccaccaagatcaacatggacgacctgcagcccaacgagaacgaggacaagagcccctaccccaaccccgagaccaccggcgaggaggacgaggaggagcccgagatgcccgtgggccccagacccagacccctgagcgagctgcacctgaaggagaaggccgtgcccatgcccgaggccagcgccttcttcatcttcagcagcaacaacagattcagactgcagtgccacagaatcgtgaacgacaccatcttcaccaacctgatcctgttcttcatcctgctgagcagcatcagcctggccgccgaggaccccgtgcagcacaccagcttcagaaaccacatcctgttctacttcgacatcgtgttcaccaccatcttcaccatcgagatcgccctgaagatgaccgcctacggcgccttcctgcacaagggcagcttctgcagaaactacttcaacatcctggacctgctggtggtgagcgtgagcctgatcagcttcggcatccagagcagcgccatcaacgtggtgaagatcctgagagtgctgagagtgctgagacccctgagagccatcaacagagccaagggcctgaagcacgtggtgcagtgcgtgttcgtggccatcagaaccatcggcaacatcgtgatcgtgaccaccctgctgcagttcatgttcgcctgcatcggcgtgcagctgttcaagggcaagctgtacacctgcagcgacagcagcaagcagaccgaggccgagtgcaagggcaactacatcacctacaaggacggcgaggtggaccaccccatcatccagcccagaagctgggagaacagcaagttcgacttcgacaacgtgctggccgccatgatggccctgttcaccgtgagcaccttcgagggctggcccgagctgctgtacagaagcatcgacagccacaccgaggacaagggccccatctacaactacagagtggagatcagcatcttcttcatcatctacatcatcatcatcgccttcttcatgatgaacatcttcgtgggcttcgtgatcgtgaccttccaggagcagggcgagcaggagtacaagaactgcgagctggacaagaaccagagacagtgcgtggagtacgccctgaaggccagacccctgagaagatacatccccaagaaccagcaccagtacaaggtgtggtacgtggtgaacagcacctacttcgagtacctgatgttcgtgctgatcctgctgaacaccatctgcctggccatgcagcactacggccagagctgcctgttcaagatcgccatgaacatcctgaacatgctgttcaccggcctgttcaccgtggagatgatcctgaagctgatcgccttcaagcccaagcactacttctgcgacgcctggaacaccttcgacgccctgatcgtggtgggcagcatcgtggacatcgccatcaccgagaacgccgaggagaacagcagaatcagcatcaccttcttcagactgttcagagtgatgagactggtgaagctgctgagcagaggcgagggcatcagaaccctgctgtggaccttcatcaagagcttccaggccctgccctacgtggccctgctgatcgtgatgctgttcttcatctacgccgtgatcggcatgcaggtgttcggcaagatcgccctgaacgacaccaccgagatcaacagaaacaacaacttccagaccttcccccaggccgtgctgctgctgttcagatgcgccaccggcgaggcctggcaggacatcatgctggcctgcatgcccggcaagaagtgcgcccccgagagcgagcccagcaacagcaccgagggcgagaccccctgcggcagcagcttcgccgtgttctacttcatcagcttctacatgctgtgcgccttcctgatcatcaacctgttcgtggccgtgatcatggacaacttcgactacctgaccagagactggagcatcctgggcccccaccacctggacgagttcaagagaatctgggccgagtacgaccccgaggccaagggcagaatcaagcacctggacgtggtgaccctgctgagaagaatccagccccccctgggcttcggcaagctgtgcccccacagagtggcctgcaagagactggtgagcatgaacatgcccctgaacagcgacggcaccgtgatgttcaacgccaccctgttcgccctggtgagaaccgccctgagaatcaagaccgaggagggccccagccccagcgaggcccaccagggcgccgaggaccccttcagacccgccggcaacctggagcaggccaacgaggagctgagagccatcatcaagaagatctggaagagaaccagcatgaagctgctggaccaggtggtgccccccgccggcgacgacgaggtgaccgtgggcaagttctacgccaccttcctgatccaggagtacttcagaaagttcaagaagagaaaggagcagggcctggtgggcaagcccagccagagaaacgccctgagcctgcaggccggcctgagaaccctgcacgacatcggccccgagatcagaagagccatcagcggcgacctgaccgccgaggaggagctggacaaggccatgaaggaggccgtgagcgccgccagcgaggacgacatcttcagaagagccggcggcctgttcggcaaccacgtgagctactaccagagcgacggcagaagcgccttcccccagaccttcaccacccagagacccctgcacatcaacaaggccggcagcagccagggcgacaccgagagccccagccacgagaagctggtggacagcaccttcacccccagcagctacagcagcaccggcagcaacgccaacatcaacaacgccaacaacaccgccctgggcagactgcccagacccgccggctaccccagcaccgtgagcaccgtggagggccacggcccccccctgagccccgccatcagagtgcaggaggtggcctggaagctgagcagcaacagatgccacagcagagagagccaggccgccatggccggccaggaggagaccagccaggacgagacctacgaggtgaagatgaaccacgacaccgaggcctgcagcgagcccagcctgctgagcaccgagatgctgagctaccaggacgacgagaacagacagctgaccctgcccgaggaggacaagagagacatcagacagagccccaagagaggcttcctgagaagcgccagcctgggcagaagagccagcttccacctggagtgcctgaagagacagaaggacagaggcggcgacatcagccagaagaccgtgctgcccctgcacctggtgcaccaccaggccctggccgtggccggcctgagccccctgctgcagagaagccacagccccgccagcttccccagacccttcgccaccccccccgccacccccggcagcagaggctggcccccccagcccgtgcccaccctgagactggagggcgtggagagcagcgagaagctgaacagcagcttccccagcatccactgcggcagctgggccgagaccacccccggcggcggcggcagcagcgccgccagaagagtgagacccgtgagcctgatggtgcccagccaggccggcgcccccggcagacagttccacggcagcgccagcagcctggtggaggccgtgctgatcagcgagggcctgggccagttcgcccaggaccccaagttcatcgaggtgaccacccaggagctggccgacgcctgcgacatgaccatcgaggagatggagagcgccgccgacaacatcctgagcggcggcgccccccagagccccaacggcgccctgctgcccttcgtgaactgcagagacgccggccaggacagagccggcggcgaggaggacgccggctgcgtgagagccagaggcagacccagcgaggaggagctgcaggacagcagagtgtacgtgagcagcctgtag

SEQ ID NO: 46973 - protein, 2138 aa, Artificial Sequence
  derived and/or modified sequence
MVNENTRMYIPEENHQGSNYGSPRPAHANMNANAAAGLAPEHIPTPGAALSWQAAIDAARQAKLMGSAGNATISTVSSTQRKRQQYGKPKKQGSTTATRPPRALLCLTLKNPIRRACISIVEWKPFEIIILLTIFANCVALAIYIPFPEDDSNATNSNLERVEYLFLIIFTVEAFLKVIAYGLLFHPNAYLRNGWNLLDFIIVVVGLFSAILEQATKADGANALGGKGAGFDVKALRAFRVLRPLRLVSGVPSLQVVLNSIIKAMVPLLHIALLVLFVIIIYAIIGLELFMGKMHKTCYNQEGIADVPAEDDPSPCALETGHGRQCQNGTVCKPGWDGPKHGITNFDNFAFAMLTVFQCITMEGWTDVLYWMQDAMGYELPWVYFVSLVIFGSFFVLNLVLGVLSGEFSKEREKAKARGDFQKLREKQQLEEDLKGYLDWITQAEDIDPENEDEGMDEEKPRNMSMPTSETESVNTENVAGGDIEGENCGARLAHRISKSKFSRYWRRWNRFCRRKCRAAVKSNVFYWLVIFLVFLNTLTIASEHYNQPNWLTEVQDTANKALLALFTAEMLLKMYSLGLQAYFVSLFNRFDCFVVCGGILETILVETKIMSPLGISVLRCVRLLRIFKITRYWNSLSNLVASLLNSVRSIASLLLLLFLFIIIFSLLGMQLFGGKFNFDEMQTRRSTFDNFPQSLLTVFQILTGEDWNSVMYDGIMAYGGPSFPGMLVCIYFIILFICGNYILLNVFLAIAVDNLADAESLTSAQKEEEEEKERKKLARTASPEKKQELVEKPAVGESKEEKIELKSITADGESPPATKINMDDLQPNENEDKSPYPNPETTGEEDEEEPEMPVGPRPRPLSELHLKEKAVPMPEASAFFIFSSNNRFRLQCHRIVNDTIFTNLILFFILLSSISLAAEDPVQHTSFRNHILGNADYVFTSIFTLEIILKMTAYGAFLHKGSFCRNYFNILDLLVVSVSLISFGIQSSAINVVKILRVLRVLRPLRAINRAKGLKHVVQCVFVAIRTIGNIVIVTTLLQFMFACIGVQLFKGKLYTCSDSSKQTEAECKGNYITYKDGEVDHPIIQPRSWENSKFDFDNVLAAMMALFTVSTFEGWPELLYRSIDSHTEDKGPIYNYRVEISIFFIIYIIIIAFFMMNIFVGFVIVTFQEQGEQEYKNCELDKNQRQCVEYALKARPLRRYIPKNQHQYKVWYVVNSTYFEYLMFVLILLNTICLAMQHYGQSCLFKIAMNILNMLFTGLFTVEMILKLIAFKPKHYFCDAWNTFDALIVVGSIVDIAITEVNPAEHTQCSPSMNAEENSRISITFFRLFRVMRLVKLLSRGEGIRTLLWTFIKSFQALPYVALLIVMLFFIYAVIGMQVFGKIALNDTTEINRNNNFQTFPQAVLLLFRCATGEAWQDIMLACMPGKKCAPESEPSNSTEGETPCGSSFAVFYFISFYMLCAFLIINLFVAVIMDNFDYLTRDWSILGPHHLDEFKRIWAEYDPEAKGRIKHLDVVTLLRRIQPPLGFGKLCPHRVACKRLVSMNMPLNSDGTVMFNATLFALVRTALRIKTEGNLEQANEELRAIIKKIWKRTSMKLLDQVVPPAGDDEVTVGKFYATFLIQEYFRKFKKRKEQGLVGKPSQRNALSLQAGLRTLHDIGPEIRRAISGDLTAEEELDKAMKEAVSAASEDDIFRRAGGLFGNHVSYYQSDGRSAFPQTFTTQRPLHINKAGSSQGDTESPSHEKLVDSTFTPSSYSSTGSNANINNANNTALGRLPRPAGYPSTVSTVEGHGPPLSPAIRVQEVAWKLSSNRCHSRESQAAMAGQEETSQDETYEVKMNHDTEACSEPSLLSTEMLSYQDDENRQLTLPEEDKRDIRQSPKRGFLRSASLGRRASFHLECLKRQKDRGGDISQKTVLPLHLVHHQALAVAGLSPLLQRSHSPASFPRPFATPPATPGSRGWPPQPVPTLRLEGVESSEKLNSSFPSIHCGSWAETTPGGGGSSAARRVRPVSLMVPSQAGAPGRQFHGSASSLVEAVLISEGLGQFAQDPKFIEVTTQELADACDMTIEEMESAADNILSGGAPQSPNGALLPFVNCRDAGQDRAGGEEDAGCVRARGRPSEEELQDSRVYVSSL

SEQ ID NO: 46974 - DNA, 13480 bp, Artificial Sequence
  derived and/or modified sequence
ttattttttcaaatggtgtagccgccggaggtgcggtgctcagttcttggaaggggcccggatgtactgaggatgcgttacagtttcactcgaggaggcagtagtggaaaggagcagtttttggggtttgatgccataatgggaatcaggtaatcgtcggcggggaagaagaaacgctgcagaccacggcttcctcgaatcttgcgcgaaagccgccggcctcggaggagggattaatccagacccgccggggggtgttttcacatttcttcctcttcgtggctgctcctcctattaaaaccatttttggtccatggtcaatgagaatacgaggatgtacattccagaggaaaaccaccaaggttccaactatgggagcccacgccccgcccatgccaacatgaatgccaatgcggcagcggggctggcccctgagcacatccccaccccgggggctgccctgtcgtggcaggcggccatcgacgcagcccggcaggctaagctgatgggcagcgctggcaatgcgaccatctccacagtcagctccacgcagcggaagcggcagcaatatgggaaacccaagaagcagggcagcaccacggccacacgcccgccccgagccctgctctgcctgaccctgaagaaccccatccggagggcctgcatcagcattgtcgaatggaaaccatttgaaataattattttactgactatttttgccaattgtgtggccttagcgatctatattccctttccagaagatgattccaacgccaccaattccaacctggaacgagtggaatatctctttctcataatttttacggtggaagcgtttttaaaagtaatcgcctatggactcctctttcaccccaatgcctacctccgcaacggctggaacctactagattttataattgtggttgtggggctttttagtgcaattttagaacaagcaaccaaagcagatggggcaaacgctctcggagggaaaggggccggatttgatgtgaaggcgctgagggccttccgcgtgctgcgccccctgcggctggtgtccggagtcccaagtctccaggtggtcctgaattccatcatcaaggccatggtccccctgctgcacatcgccctgcttgtgctgtttgtcatcatcatctacgccatcatcggcttggagctcttcatggggaagatgcacaagacctgctacaaccaggagggcatagcagatgttccagcagaagatgacccttccccttgtgcgctggaaacgggccacgggcggcagtgccagaacggcacggtgtgcaagcccggctgggatggtcccaagcacggcatcaccaactttgacaactttgccttcgccatgctcacggtgttccagtgcatcaccatggagggctggacggacgtgctgtactggatgcaggacgctatgggctatgagttaccctgggtgtattttgtcagtctggtcatctttggatcctttttcgttctaaatctggttctcggtgtgttgagcggagagttttccaaagagagggagaaggccaaggcccggggagatttccagaagctgcgggagaagcagcagctagaagaggatctcaaaggctacctggattggatcactcaggccgaagacatcgatcctgagaatgaggacgaaggcatggatgaggagaagccccgaaacatgagcatgcccaccagtgagaccgagtccgtcaacaccgaaaacgtggctggaggtgacatcgagggagaaaactgcggggccaggctggcccaccggatctccaagtcaaagttcagccgctactggcgccggtggaatcggttctgcagaaggaagtgccgcgccgcagtcaagtctaatgtcttctactggctggtgattttcctggtgttcctcaacacgctcaccattgcctctgagcactacaaccagcccaactggctcacagaagtccaagacacggcaaacaaggccctgctggccctgttcacggcagagatgctcctgaagatgtacagcctgggcctgcaggcctacttcgtgtccctcttcaaccgctttgactgcttcgtcgtgtgtggcggcatcctggagaccatcctggtggagaccaagatcatgtccccactgggcatctccgtgctcagatgcgtccggctgctgaggattttcaagatcacgaggtactggaactccttgagcaacctggtggcatccttgctgaactctgtgcgctccatcgcctccctgctccttctcctcttcctcttcatcatcatcttctccctcctggggatgcagctctttggaggaaagttcaactttgatgagatgcagacccggaggagcacattcgataacttcccccagtccctcctcactgtgtttcagatcctgaccggggaggactggaattcggtgatgtatgatgggatcatggcttatggcggcccctcttttccagggatgttagtctgtatttacttcatcatcctcttcatctgtggaaactatatcctactgaatgtgttcttggccattgctgtggacaacctggctgatgctgagagcctcacatctgcccaaaaggaggaggaagaggagaaggagagaaagaagctggccaggactgccagcccagagaagaaacaagagttggtggagaagccggcagtgggggaatccaaggaggagaagattgagctgaaatccatcacggctgacggagagtctccacccgccaccaagatcaacatggatgacctccagcccaatgaaaatgaggataagagcccctaccccaacccagaaactacaggagaagaggatgaggaggagccagagatgcctgtcggccctcgcccacgaccactctctgagcttcaccttaaggaaaaggcagtgcccatgccagaagccagcgcgtttttcatcttcagctctaacaacaggtttcgcctccagtgccaccgcattgtcaatgacacgatcttcaccaacctgatcctcttcttcattctgctcagcagcatttccctggctgctgaggacccggtccagcacacctccttcaggaaccatatcctaggcaatgcagactatgtcttcactagtatctttacattagaaattatccttaagatgactgcttatggggctttcttgcacaagggttctttctgccggaactacttcaacatcctggacctgctggtggtcagcgtgtccctcatctcctttggcatccagtccagtgcaatcaatgtcgtgaagatcttgcgagtcctgcgagtactcaggcccctgagggccatcaacagggccaaggggctaaagcatgtggttcagtgtgtgtttgtcgccatccggaccatcgggaacatcgtgattgtcaccaccctgctgcagttcatgtttgcctgcatcggggtccagctcttcaagggaaagctgtacacctgttcagacagttccaagcagacagaggcggaatgcaagggcaactacatcacgtacaaagacggggaggttgaccaccccatcatccaaccccgcagctgggagaacagcaagtttgactttgacaatgttctggcagccatgatggccctcttcaccgtctccaccttcgaagggtggccagagctgctgtaccgctccatcgactcccacacggaagacaagggccccatctacaactaccgtgtggagatctccatcttcttcatcatctacatcatcatcatcgccttcttcatgatgaacatcttcgtgggcttcgtcatcgtcacctttcaggagcagggggagcaggagtacaagaactgtgagctggacaagaaccagcgacagtgcgtggaatacgccctcaaggcccggcccctgcggaggtacatccccaagaaccagcaccagtacaaagtgtggtacgtggtcaactccacctacttcgagtacctgatgttcgtcctcatcctgctcaacaccatctgcctggccatgcagcactacggccagagctgcctgttcaaaatcgccatgaacatcctcaacatgctcttcactggcctcttcaccgtggagatgatcctgaagctcattgccttcaaacccaagcactatttctgtgatgcatggaatacatttgacgccttgattgttgtgggtagcattgttgatatagcaatcaccgaggtaaacccagctgaacatacccaatgctctccctctatgaacgcagaggaaaactcccgcatctccatcaccttcttccgcctgttccgggtcatgcgtctggtgaagctgctgagccgtggggagggcatccggacgctgctgtggaccttcatcaagtccttccaggccctgccctatgtggccctcctgatcgtgatgctgttcttcatctacgcggtgatcgggatgcaggtgtttgggaaaattgccctgaatgataccacagagatcaaccggaacaacaactttcagaccttcccccaggccgtgctgctcctcttcaggtgtgccaccggggaggcctggcaggacatcatgctggcctgcatgccaggcaagaagtgtgccccagagtccgagcccagcaacagcacggagggtgaaacaccctgtggtagcagctttgctgtcttctacttcatcagcttctacatgctctgtgccttcctgatcatcaacctctttgtagctgtcatcatggacaactttgactacctgacaagggactggtccatccttggtccccaccacctggatgagtttaaaagaatctgggcagagtatgaccctgaagccaagggtcgtatcaaacacctggatgtggtgaccctcctccggcggattcagccgccactaggttttgggaagctgtgccctcaccgcgtggcttgcaaacgcctggtctccatgaacatgcctctgaacagcgacgggacagtcatgttcaatgccaccctgtttgccctggtcaggacggccctgaggatcaaaacagaagggaacctagaacaagccaatgaggagctgcgggcgatcatcaagaagatctggaagcggaccagcatgaagctgctggaccaggtggtgccccctgcaggtgatgatgaggtcaccgttggcaagttctacgccacgttcctgatccaggagtacttccggaagttcaagaagcgcaaagagcagggccttgtgggcaagccctcccagaggaacgcgctgtctctgcaggctggcttgcgcacactgcatgacatcgggcctgagatccgacgggccatctctggagatctcaccgctgaggaggagctggacaaggccatgaaggaggctgtgtccgctgcttctgaagatgacatcttcaggagggccggtggcctgttcggcaaccacgtcagctactaccaaagcgacggccggagcgccttcccccagaccttcaccactcagcgcccgctgcacatcaacaaggcgggcagcagccagggcgacactgagtcgccatcccacgagaagctggtggactccaccttcaccccgagcagctactcgtccaccggctccaacgccaacatcaacaacgccaacaacaccgccctgggtcgcctccctcgccccgccggctaccccagcacggtcagcactgtggagggccacgggccccccttgtcccctgccatccgggtgcaggaggtggcgtggaagctcagctccaacaggtgccactcccgggagagccaggcagccatggcgggtcaggaggagacgtctcaggatgagacctatgaagtgaagatgaaccatgacacggaggcctgcagtgagcccagcctgctctccacagagatgctctcctaccaggatgacgaaaatcggcaactgacgctcccagaggaggacaagagggacatccggcaatctccgaagaggggtttcctccgctctgcctcactaggtcgaagggcctccttccacctggaatgtctgaagcgacagaaggaccgagggggagacatctctcagaagacagtcctgcccttgcatctggttcatcatcaggcattggcagtggcaggcctgagccccctcctccagagaagccattcccctgcctcattccctaggccttttgccaccccaccagccacacctggcagccgaggctggcccccacagcccgtccccaccctgcggcttgagggggtcgagtccagtgagaaactcaacagcagcttcccatccatccactgcggctcctgggctgagaccacccccggtggcgggggcagcagcgccgcccggagagtccggcccgtctccctcatggtgcccagccaggctggggccccagggaggcagttccacggcagtgccagcagcctggtggaagcggtcttgatttcagaaggactggggcagtttgctcaagatcccaagttcatcgaggtcaccacccaggagctggccgacgcctgcgacatgaccatagaggagatggagagcgcggccgacaacatcctcagcgggggcgccccacagagccccaatggcgccctcttaccctttgtgaactgcagggacgcggggcaggaccgagccgggggcgaagaggacgcgggctgtgtgcgcgcgcggggtcgaccgagtgaggaggagctccaggacagcagggtctacgtcagcagcctgtagtgggcgctgccagatgcgggcttttttttatttgtttcaatgttcctaatgggttcgtttcagaagtgcctcactgttctcgtgacctggagttaaccggaacagcgtcttcattcatttctgttgggaccagacgcggagcctgggtgcgcgagccgccctccgggaggaaggcgcccggctgcgtctgcagaggcggggagaggaggcggcgagggtcccggggcgcgaggaaggcgcctgccctctcccagctcgcaggccccgggcccggccgcgcctccgcggggagagcaccccggcttcccgcgcgccctcaccaaaaggaccctacagcaaacgggtgtctttcgactctgcttgtagaaaccatttgcacatattctgtacgagcctcgctgtctccctagagccagggccctgcggatttggagaagggagcggggcaggacttccaggaggaccccaacccggcccggagagggaggaggaggcctccaggggcgcggagctctggggatgggcgtcgggccggcagtggtgcggctcactccgtccctgcccacctgcgacgggatcccccgaccggcacgggccacgccgagctcccggccagccgccggcccgcaggcagcgcgagggaggagctgcgccgccggctccgcccaaccaggtggtgctgagcttccgctgagcgctcttttgttttgtggtttgacacttttcttgacagcatgttgcagtttcttttcggttttggttttttttaaatgttttattttgctttcccagcgggaggggaggaagaagagtgtttacaaagtcctgtagccccctcacctttctgttttcacttttgccaatgtacatcgggtttggttttcttgtattatttaaacggttgtggtttcctttttccacggaggttcaatagaagccgctgcaggagagttttaccaaccattgtgtatgcccaataatttgttatcatttccttaggtagtaacctatttttgttctggtttggttcggttatctaatggaaaggtaactggcaatgcacttgatgtggtcttgcacatgtgggtgatagagttgggttcctttttatgctgggtgtacaggtgggtttgggagagaggagcatgcgcgagagagtctccgagtgtgtgcgacgcgtgtgtgtgtggtgggttgtctgtgtgcatatgtcctgcccgtgtatatgcacccacaccatgtgcccgtgcacaccagtgactacgcagtcccccctttctggtttagctgtgggaagatctgaatctggggccgtttgaaagcaaaaacaaaccactgtctctgcttctgaaacgggaatcagtaactctttgcattttctgtcccacaagatatgcaaaaacaatgcaataatattcatttaaaaatacaattgtgagttgtgttggcattaaaactgtattttaaaaaaagacagaaatttaagggaaaaacacaagaaggcattttgcttcaatatattccgtgtaatgttttattgcattgataatgtttctgttgaagaaaccgttatacttgaattcaggtcagtttcagtatttttcaaatatttttttaaaactgaattgcaattgtgccaagcgaatataatgaattgaattaagttggttttcggattcacttcttgtatattttgctgcatgtaaagtaaatcattttgtatttggagtgtgacaagctttacctttgaactcaagtgcttttctatatgtggttgggggaaagggaacaagttttctttagtttgcacaatgagcaaaggtatcaccagtgtagtcattattctgctctccacaaacaggtttggacattactgttttgcatatcttgtgtttgcttacatttccctcaatttttccaaaatcgtttgctgggtatgtttgtaccgcctcttgctgtgagagaccaggacctattttattccagtcttcactctgtccactctgctctggtcatctgatttggtacttctccaagaacagcccttcactgtgaggtgcagggaggcgttctgatgagccctcagtcactgggccgtcatccgcatcccccatggaagaggtagctggctttcccttcccttccaccacacggaattttctctttggcttccttaggaaagtgtacactaaccgggaggataaaattaaagtcaggctgcttggagggaggggcatcctcacttccggattcttgttgctctacccaacaaggacagcaggggctcgagaaaggaactggtgaaaccctgatccatctgaaagtcaactctgcgtgctcctttctccatcccttcctcactctggagcagcctttccttcaggcttgccctaatgtttgggctgccggggagggggccaggacaagggaagaggcatccggagctcacagtgggggtgggaacagatttttgtgggggcatctctaatgctcacttatatctccctagaacatcactcttttggtgctgtgtccttcaaatgtatgtcaacagtggtggctgaaaagggactgctttggggaaaacaggacccaaccattcacccagaattgacccattaaatctcttccagtcctagtgttccctgagcccctcttggcacatatataagtaagctagaaattacaataagggacagtccattcctctatgacagcttgctggactgattcatgacaaagtggagaaatgtactcaatactccccggttaacacagtctagaaacagagtttctttatggatatccacacccaagtcatccaaactttcttgattccttttcactgccatcaaggtcctctagaaattgagtttaggtatcatcctttgaaaagttcccaagatttctaccaggaggtacacacaggcgttccctgtctagggcaggaggactatcctagcttgaccttctgatccactagaataagactggcgtatgatgcctgtcatcagaacagactggcacaagtagtgacatcaatgaaccacagcacaatcttccaagtgatgtctactctccacctaaaatggaattttccccatgaccttgtaaaacataattgtcacatcttccatacccctcctgacagcccccaagtgtcaggagaaaacagtcaggggctaagggcccaagggacttgaagaaacaacagtttaaggtctgcagtttggtcaacttaattcttgtcctccgaccagccctgcctctttcatttccagaccttggagaatttttcccagctttgattcagaaggtactagttataacccctttccttcttcttaatccaataggcctcactctcactgggaaatccactcaaaggaacaaggcaatgtctctcattctatttcccagttccaaattccaggtgcttgtctggagtgaagctacccgttactttctcccagcttttctccacccagcatgtctcctgcccatgcagctgaagacagtggggcaacctcaggagaagcagacctttccatgcccaagttcatctcctgagcaacagtgacacctagaaaatgaggactttggaagtcacccaaaagatggtggctactttatggagtcctgaagatacacagccaccactcctaaaggcaaagaaagaaaacacgaatgtaggtcagggatagagtggaaccctggtcatcggggtttttagcctcatcgtgggaaaggtggtaaaggaggatgatggcatctccatccctagaggccaagaattgaaatatcattgtcaaggattagaaacaattcagcaaagaggccacaaaaagggcctgctgactcccagaagacctctttaaaccccaggggaggcaaatacttgctgatggagtctgggccgtttccatattttaaagaagacctgcctctggggcaaatgtcagcacagagaggactgggaggagaatggaggcaagaaaagggcatattttgactccctctgtgcctcttcccagttcatggaaggatgtgttcagcttacccacccacagtgaccagtgtggtggagccgctgacatctcaaggatctatttgggaaggtgagaagagtactcattccatctgggggtgttgttccagccacatcagcctacctggtgggatgtgggggtgtctgccaccctgtcccccctctgctgatgtccctcccctcaggctgtccaggtgccacctgacacaggctgctgtgcaaagacaggcggggaagcccaaacctcactcccagggaggccctcagccgccagagtccaggttctccagaggctacgatttgaggaggttgagggggaagacaggagggaaagaaaagtcctacaactgtcaggaatggggcacctttccctgtccctaagcaaagctccctcttcccactgccctccccagccccagctccctgtcctccccaacacctagtgagaaagacggtgcgtggaagggagtcccatgggcagatgcttacacgacctctttgtgaagcctcttctgggtttaacttcattcatcaatttattcttatgtcaaagcaatgaaacttttctttctggagccagataccaatacaacaggtgaacgggtttctgccacatctctacattgacgggggatgcttgaacaacccccctcactacacagacacacaccgttaaggcacaagggctggggttgagctctagatgagggactttcctgctcctgcaagggtgagcactgtatacacagacaaggagggtgcagtagagtgactcccttggatggaagtagtaccatcagaacctactattattatgacataaattctatttacatacattgagagaatactacaatcaacactttttcctgggatgactttaagaggtttgagccacagcacctgaagtggcaaagatccatggtctttgtagggtattagagaactcttccagtcacctctgaaagcactctagatcttgcagctgagtggatgaagtgtaacaaatctgttgcacgctgagaggagtcagaattagcatttttcatgaaagttccccacgtctctactaagaatgaggaagaaaagactaagactaggtaattacacagaggcttgaaatgttacatcaccagagccaagtcctctcccttcagatcagttactggctgctacacagggacacccccaccttttcagggcatcccatgcactccacttctcaggatctaaggaatttgactttgtagggatcccagaaagggcactgtgccacttcccctggtgtgaatcagacatacattgtacattcatttctaaaattcactcatgcacctcaaaccaaggtcattatccaaaaaaaaaaaaaaaaagctctgggtggaagagtttgtaagttttaagagagggtcatttctatgtgaggaaatgcagaaatggacagaatgattcttattcactgtttgggtctggagaattcccattgtggaaatcttagagatctcaagtttattaccaagggaataaggaaaaaaaggtgagcaggcaccaggccaagcagtggctcccttgccaaggaacctgaggctgcaggtttcagggacccccttgaagaaacctctcctggccattggccaggagaaaagagaagtctctcctgtagagtcacaagagaagcaaaagagggtgggtcactgggtcctggacatagcccccaaccccaagacttcccaatatggagaaactacaccaatgtttaaaaggggaaaaggaaagaacttgtacatcaagggaagatgatttgtaaacacacagtcctgtgcagaaagatccccttcaggaggtgtctccagcatcccaaagctgtgcgcaccttctcttttcctgcctcaggccacctatgcatccagctgcagcccatacccacacctgaaatccatctcttgaatcccagccaggttatataccaccccattgccatgtcctgtcctggccagaatgcatgctgttcccccaagcctcgtgggagtgaggccatgggaaacagagatgagcatgtctggacaagtctgtgatggtagtggatgagaataacccatggcaaaacacgcacattcattaagaaatagggcgacagattccccgttggtgaagcactgaaaggtctattactctcataatattgctgttttattttaatccaccagagctaccatgcaaaactttcctcctgtgaaacgctccagataaagctcctctaatctccccttccctcatgtcctccagctcaaacccaccttcatcccccaaaccaatctgtatcatgcctgttatcagagaggcacagaaagatgggcagtgcctccgttgtcaccattccccacacccctacacacccccacaccctcccctccaggctccacgacttcacagtcttactgttgtaaatatcattgtacagtttgtaatcctcaaataatcccattgtcagaggcctcgcctgatgggccttctcaccctcgagaaaggccagggaatctagaaggggcaacccttcaaggagagcttcagggtcatctctgtgtgagacactattgtatattcctgtaagattgcatttttatctaaggaatgatgttatttaaaaaacaaacaaaaaacacaaaaaataagaattgcaaataaatttcttaacaatgtct

SEQ ID NO: 46975 - DNA, 6417 bp, Artificial Sequence
  derived and/or modified sequence
atggtaaacgagaatacccgtatgtatattcccgaggaaaaccatcaaggctctaactacgggtcgccacgcccagctcatgcaaacatgaacgctaacgccgccgcaggcctggcccctgaacacatcccaacccccggtgcggctctcagctggcaggccgccatagatgccgcccgccaggctaagctgatgggttccgcaggcaacgccacaattagcaccgtgtcaagcacacaacggaagcgccagcagtacggcaagccaaaaaaacagggatccaccactgccacccgaccgccacgtgccctactgtgcctcactttgaagaatcctatccgaagagcctgtatcagcattgtggaatggaagccgtttgaaatcatcattcttctcacaatatttgctaactgcgttgctcttgcaatctatattcctttccccgaggatgactctaatgccactaactccaacctagagagggtagaatatctgtttttgatcatctttaccgtcgaggctttcctgaaggtgatcgcctatgggctactgttccatcccaacgcgtatctcagaaacggctggaatcttctggattttattatcgtggtcgtggggctattcagtgctattctcgagcaggctaccaaggcagacggagcaaacgctctggggggcaaaggagctggattcgacgtaaaggccctacgcgccttccgcgtgctacggccgctccggctggtgtccggggtcccctcgctccaagtggttctgaattccattatcaaggcaatggttccgctcctgcacatcgcactgctggtgctgttcgtgatcatcatatatgcaatcattggtctggaactcttcatgggtaagatgcataagacctgttacaaccaagaaggaattgccgacgtgccggcggaagacgatccctcaccatgcgccttggaaacgggccacggacgacagtgtcagaacggtactgtgtgcaagcccggatgggacgggccaaagcacggcattacaaactttgacaacttcgcctttgctatgttaaccgtgttccagtgtattactatggagggttggactgacgtgctttattggatgcaagacgctatgggatacgagttaccgtgggtatattttgtctcactcgtcattttcggctccttttttgttctcaacttagtcttgggggtgttgtccggggagttttcaaaagaacgcgagaaagctaaggcccggggcgattttcagaagttaagagaaaaacagcagctggaggaagacctgaaaggatatttagattggatcactcaggccgaggacatcgatcccgagaacgaggacgagggcatggacgaagaaaaaccccgcaacatgtcgatgcctacctctgagactgaaagcgtgaacaccgagaatgttgccgggggggacatcgaaggcgagaactgcggcgcaaggctggctcacaggatatcaaagtccaagttctccagatactggaggaggtggaatcggttctgtagaaggaagtgcagagcagccgttaaatctaatgttttttattggctggtcatctttctcgtattcctgaacaccttaacaattgctagtgaacactacaatcaacctaactggctgaccgaagtgcaggatactgccaataaagcactgctggccctttttaccgcggagatgctcctgaaaatgtatagcttgggccttcaggcctattttgtgtcactctttaatcgcttcgactgctttgtcgtctgtggcgggatcctggaaactatcctggttgaaaccaagataatgagccctttgggcatcagtgtgttgaggtgtgtgcgattactacgcatctttaagataacacgctattggaactctctaagtaacctggtggctagcctcctgaattctgtgagatcaattgcatccttgctgctactactgttcctctttattattatattctccctcctggggatgcagctcttcggcggaaaatttaactttgacgagatgcaaacacgaagatccacattcgataactttcctcaaagtttactgactgtgtttcagattcttactggcgaggattggaatagcgtgatgtacgatggtattatggcctatgggggcccatctttccctggcatgttggtgtgcatttacttcatcatcctatttatttgcgggaactacatcttgcttaacgtgtttctggccattgctgtggacaatcttgccgatgccgagagtttgacatcagcgcagaaagaggaggaggaggagaaggaacggaaaaagctggcgagaacagcatcccccgagaagaaacaggaattggtggaaaaacccgcagttggggagtctaaggaggaaaagatcgaactcaagagcatcaccgcagacggggaatctccacctgctactaaaataaacatggatgatcttcagccaaacgagaatgaagacaaatcgccttacccgaatcccgagactactggcgaagaggatgaagaagaacccgagatgccagttgggccccgcccccgacctctgtcagaactacatctcaaagagaaagccgttcctatgcccgaggcatcagcattcttcattttttccagcaacaacagattccggcttcaatgtcacaggatcgtgaacgatacaatcttcacaaacctgatcttgttcttcattctcctaagtagtatttccttggcggccgaggatcccgttcagcacacttccttccgaaaccacattttgggcaatgcagactatgtgttcaccagtatttttacgctcgaaatcatcctcaaaatgactgcttacggtgcatttcttcataaaggtagcttttgtagaaattatttcaacattctggatttgcttgttgtgtccgttagccttatttccttcggaatccagtcatcagcaattaatgttgtcaagatcctgagggtcctcagagtcctgagacctctgagagccatcaaccgggctaagggcttgaaacacgtggtgcagtgcgtgttcgtagctatcaggaccattggtaacatagtcatcgtgaccacactgttgcaattcatgtttgcctgcatcggagttcagctatttaagggcaagctttacacttgttccgattctagtaagcagactgaagcggaatgcaagggaaactacatcacttacaaggatggggaagtcgaccacccgataatacagcctaggtcttgggaaaacagcaaattcgatttcgacaacgtactggcggctatgatggccctgtttacagtgtccacgtttgaaggttggccggaattattgtaccgcagcatcgactcccacacagaggataaaggtccaatctataattacagggttgaaatatctatcttcttcatcatttacatcatcatcattgcattctttatgatgaatatctttgtggggtttgttatcgtcactttccaggagcagggagagcaggagtacaaaaactgcgagctcgacaagaaccagagacagtgtgttgagtacgccctcaaggcccgtcctctcaggaggtacattccaaagaaccagcaccaatacaaagtgtggtatgtcgtcaactcaacttattttgagtatctgatgttcgtgcttatcctgctgaatacaatctgcctggcaatgcagcattatgggcagagttgcttgtttaagatcgccatgaacatattgaacatgctgttcacaggtctgtttaccgtggagatgatcctgaagttaattgcattcaagccaaagcactacttttgcgacgcctggaatactttcgatgccctgatagttgtggggtccatcgtcgatattgccattactgaggttaaccctgccgaacacacccagtgttcaccttccatgaatgctgaagagaattcaagaatctcaatcactttctttcgcctgttcagagtgatgagactggtcaagctcctatccaggggcgaggggattcgtaccttgctttggacctttatcaaaagcttccaggccctcccttatgttgccctgcttatcgtcatgctattcttcatctacgctgtcattgggatgcaggtgtttggcaagatagctttgaacgatacaactgaaatcaatcggaacaacaacttccaaactttcccgcaagctgttctcttgttatttcgctgtgctaccggcgaagcttggcaagatattatgctggcctgcatgcctggaaagaagtgcgctcccgagtctgaaccctccaactctactgagggggagacaccctgcggctctagctttgctgtcttttatttcatctctttctacatgttatgtgctttcttaatcattaacctgtttgtggccgtcattatggataacttcgactaccttactagggactggtccatcttggggcctcaccatctggacgagttcaagcgcatttgggcagagtacgatccagaggccaaaggtcgcatcaaacatctcgatgtggtgacgctgctgcgccgcattcaaccaccgctcggattcggcaaactttgccctcatcgagtggcttgcaagaggctcgtgagtatgaacatgcccctaaattctgacggcaccgtgatgttcaacgctacacttttcgccctggtcaggacagcactccgcattaaaacggaaggtaatcttgaacaggcaaatgaagaactacgggctatcattaaaaagatctggaagagaacctccatgaaactgttagatcaggtagtcccccccgctggcgacgacgaagtcacagtgggcaaattctatgctacgttcctgattcaagaatactttaggaagtttaagaagcggaaggagcaaggactggtgggaaaaccctctcaacgcaatgccctctcactgcaagccggcctccggaccttgcacgacataggtcctgagatccggagggccatctctggagatttaaccgccgaggaagaattggacaaggcaatgaaagaggcggtctccgcagcatccgaggatgatatcttcagaagagctgggggcctctttggcaatcacgtcagctactaccaatccgatggaagaagtgcttttcctcagaccttcactacacaacggcccttgcatataaacaaggcagggtctagccagggcgatactgagtccccgtctcatgagaagctggtcgacagtaccttcactcctagctcttattcctcaactggaagcaatgcgaatataaataacgccaacaataccgccctgggcagactcccaagacctgcgggatatccaagcactgtgtcaacagtggagggacatgggccccccttgtccccagcaattcgagtccaggaggtggcctggaaactctcttctaatcgctgtcactctcgcgagtcacaggcagccatggcagggcaagaggagacgtctcaggacgagacctatgaggtcaagatgaaccatgacacagaggcgtgctctgaacccagcctgttgtccacggagatgctctcttaccaggacgacgaaaaccgccagttaaccctgcctgaggaggacaaacgtgacataaggcagtctccaaaacgcggatttctgcggagcgcatccctgggcaggcgcgcttcgtttcatttggagtgcctgaagagacagaaggataggggtggtgatatatcgcagaaaaccgttctgccactccacttagtgcaccatcaggcgctggctgtggccgggctgtcacctctgctgcagcggtcccactcccccgcctccttcccccgccccttcgccacaccacccgctacacccggttcacgcgggtggcctccgcaacctgttcccaccctgcggctcgagggtgtggagagttccgaaaaactgaactctagcttcccgtccatacactgcggatcttgggccgaaaccacacctgggggcggcggttccagtgctgccaggagagtgcgtcccgtctctctgatggtgccgtctcaggccggggcccctggtcggcaattccatggttccgcatctagtctggtcgaggcggttctaatctcagagggcctcggccaattcgcacaagaccccaagttcattgaggtaaccacccaagaactggcagacgcatgtgatatgaccattgaggagatggagtcggccgccgataacatcctgagcgggggagccccccaatccccaaatggagcactgctgcccttcgtcaattgtcgagacgcaggccaggatcgagcagggggtgaggaagacgcaggatgcgtgcgggcccgtggcaggcccagcgaggaggagctacaagattccagagtttacgtttcttccttgtag

SEQ ID NO: 46976 - DNA, 6417 bp, Artificial Sequence
  derived and/or modified sequence
atggtgaatgaaaacaccaggatgtacatccctgaggagaaccaccagggcagcaactacggcagccccaggcctgcccacgccaacatgaatgccaatgctgctgctggcctggcccctgagcacatccccacccctggggccgccctgtcctggcaggccgccattgatgctgcccggcaggccaagctgatgggcagcgctggaaatgccaccatcagcacagtgagcagcacccagaggaagaggcagcagtatggcaagcccaagaagcagggcagcaccacagccacccggcccccccgggccctgctgtgcctgaccctgaagaaccccatccggcgggcctgcatcagcatcgtggagtggaagccctttgagatcatcatcctgctgaccatctttgccaactgtgtggccctggccatctacatccccttcccagaagatgacagcaatgccaccaacagcaacctggagcgggtggagtacctgttcctgatcatcttcaccgtggaggccttcctgaaggtgattgcctacggcctgctcttccaccccaatgcctacctgagaaatggctggaacctgctggacttcatcatcgtggtggtgggcctcttcagcgccatcctggagcaggccaccaaggcagatggagccaatgccctgggcggcaaaggagctggctttgatgtgaaggccctgcgggccttccgggtgctgcggcccctgcggctggtgtctggagtgcccagcctgcaggtggtgctgaacagcatcatcaaggccatggtgcccctgctgcacatcgccctgctggtgctgtttgtgatcatcatctatgccatcatcggcctggagctgttcatgggcaagatgcacaagacctgctacaaccaggagggcattgctgatgtgcctgcagaagatgaccccagcccctgtgccctggagaccggccacggccggcagtgccagaatggcaccgtgtgcaagccaggctgggatggccccaagcacggcatcaccaactttgacaactttgcctttgccatgctgactgtgttccagtgcatcaccatggagggctggacagatgtgctgtactggatgcaggatgccatgggctatgagctgccctgggtgtactttgtgtccctggtgatcttcggcagcttctttgtgctgaacctggtgctgggcgtgctgtctggagagttcagcaaggagcgggagaaggccaaggcccggggggacttccagaagctgcgggagaagcagcagctggaggaggacctgaagggctacctggactggatcacccaggctgaagatattgatcctgaaaatgaagatgagggcatggatgaggagaagcccaggaacatgtccatgcccaccagcgagacagaatctgtgaacacagaaaatgtggccggcggggacatcgagggggagaactgtggggcccggctggcccaccgcatcagcaagagcaagttcagccgctactggaggcgctggaaccgcttctgcaggaggaagtgcagagctgctgtgaagagcaatgtgttctactggctggtgatcttcctggtgttcctgaacaccctgaccatcgccagcgagcactacaaccagcccaactggctgacagaggtgcaggacacagccaacaaggccctgctggccctcttcaccgctgagatgctgctgaagatgtacagcctgggcctgcaggcctactttgtgtccctcttcaacagatttgactgctttgtggtgtgtggcggcatcctggagaccatcctggtggagaccaagatcatgagccccctgggcatctctgtgctgcgctgtgtgcggctgctgcgcatcttcaagatcacccgctactggaacagcctgagcaacctggtggccagcctgctgaacagcgtgcgcagcatcgccagcctgctgctgctgctcttcctgttcatcatcatcttcagcctgctgggcatgcagctgtttggaggcaagttcaactttgatgagatgcagaccaggaggagcacctttgacaacttcccccagagcctgctgaccgtcttccagatcctgaccggggaggactggaacagcgtgatgtatgatggcatcatggcctatggaggccccagcttccctggcatgctggtgtgcatctacttcatcatcctcttcatctgtggcaactacatcctgctgaatgtgttcctggccatcgctgtggacaacctggctgatgctgagagcctgaccagcgcccagaaggaggaggaggaggagaaggagaggaagaagctggccaggacagccagccctgagaagaagcaggagctggtggagaagccagctgtgggggagagcaaggaggagaagattgagctgaagagcatcacagcagatggagagagccccccagccaccaagatcaacatggatgacctgcagcccaatgaaaatgaagacaagagcccctaccccaaccctgagaccactggagaggaggatgaggaggagcctgagatgcctgtgggcccccggccccggcccctgtctgagctgcacctgaaggagaaggctgtgcccatgcctgaggccagcgccttcttcatcttcagcagcaacaaccgcttccggctgcagtgccaccgcatcgtgaatgacaccatcttcaccaacctgatcctcttcttcatcctgctgagcagcatcagcctggccgctgaggaccctgtgcagcacaccagcttcaggaaccacatcctgggcaatgctgactatgtgttcaccagcatcttcaccctggagatcatcctgaagatgacagcctatggagccttcctgcacaagggcagcttctgcaggaactacttcaacatcctggacctgctggtggtgtctgtgtccctcatcagctttggcatccagagcagcgccatcaacgtggtgaagatcctgcgggtgctgcgggtgctgcggcccctgcgggccatcaacagagccaagggcctgaagcacgtggtgcagtgtgtgtttgtggccatccgcaccatcggcaacatcgtcatcgtgaccaccctgctgcagttcatgtttgcctgcatcggcgtgcagctgttcaagggcaagctgtacacctgcagcgacagcagcaagcagacagaagctgagtgcaagggcaactacatcacctacaaggatggagaggtggaccaccccatcatccagcccaggtcctgggagaacagcaagtttgattttgacaacgtgctggccgccatgatggccctcttcaccgtgtccacctttgagggctggccagagctgctgtaccgcagcattgacagccacacagaggacaagggccccatctacaactacagagtggagatcagcatcttcttcatcatctacatcatcatcatcgccttcttcatgatgaacatctttgtgggcttcgtcatcgtgaccttccaggagcagggcgagcaggagtacaagaactgtgagctggacaagaaccagaggcagtgtgtggagtatgccctgaaggcccggcccctgcggcgctacatccccaagaaccagcaccagtacaaggtgtggtacgtggtgaacagcacctactttgagtacctgatgtttgtgctgatcctgctgaacaccatctgcctggccatgcagcactacggccagagctgcctcttcaagatcgccatgaacatcctgaacatgctgttcaccggcctcttcaccgtggagatgatcctgaagctgattgccttcaagcccaagcactacttctgtgatgcctggaacacctttgatgccctgattgtggtgggcagcatcgtggacatcgccatcacagaggtgaacccagctgagcacacccagtgcagccccagcatgaatgctgaggagaacagccgcatcagcatcaccttcttccgcctcttccgggtgatgaggctggtgaagctgctgagcagaggagagggcatccgcaccctgctgtggaccttcatcaagagcttccaggccctgccctacgtggccctgctgattgtgatgctgttcttcatctatgctgtgattggcatgcaggtgtttgggaagatcgccctgaatgacaccacagagatcaacagaaacaacaacttccagaccttcccccaggccgtgctgctgctcttccgctgtgccaccggggaggcctggcaggacatcatgctggcctgcatgcctgggaagaagtgtgcccctgagagcgagcccagcaacagcacagaaggagagaccccctgtggcagcagctttgctgtgttctacttcatctccttctacatgctgtgtgccttcctgatcatcaacctgtttgtggccgtcatcatggacaactttgactacctgacccgggactggagcatcctgggcccccaccacctggatgagttcaagaggatctgggccgagtatgaccctgaggccaagggccgcatcaagcacctggatgtggtgaccctgctgcggcgcatccagccccccctgggctttgggaagctgtgcccccaccgggtggcctgcaagaggctggtgtccatgaacatgcccctgaacagtgatggcaccgtgatgtttaatgccaccctgtttgccctggtgaggacagccctgcgcatcaagacagagggcaacctggagcaggccaatgaggagctgcgggccatcatcaagaagatctggaagaggacctccatgaagctgctggaccaggtggtgcccccagctggagatgatgaggtgacagtgggcaagttctacgccaccttcctgatccaggagtacttcaggaagttcaagaagaggaaggagcagggcctggtgggcaagcccagccagagaaatgccctgagcctgcaggccggcctgcggaccctgcatgacatcggccctgagatccggcgggccatcagcggggacctgacagctgaggaggagctggacaaggccatgaaggaggccgtgtctgctgcctctgaagatgacatcttcagaagagctgggggcctgtttggaaaccacgtgtcctactaccagagtgatggccgcagcgccttcccccagaccttcaccacccagaggcccctgcacatcaacaaggccggcagcagccagggcgacacagagagccccagccatgagaagctggtggacagcaccttcacccccagcagctacagcagcacaggcagcaatgccaacatcaacaatgccaacaacacagccctgggccgcctgcccaggcctgctggctaccccagcacagtgtccacagtggagggccacggcccccccctgagccctgccatccgggtgcaggaggtggcctggaagctgagcagcaaccgctgccacagccgggagagccaggccgccatggccggccaggaggagaccagccaggatgagacctatgaggtgaagatgaaccacgacacagaggcctgcagcgagcccagcctgctgagcacagagatgctgagctaccaggatgatgaaaatcggcagctgaccctgcctgaggaggacaagagggacatccggcagagccccaagaggggcttcctgcggagcgccagcctgggcagaagagccagcttccacctggagtgcctgaagaggcagaaggacagaggaggagacatcagccagaagacagtgctgcccctgcacctggtgcaccaccaggccctggccgtggccggcctgagccccctgctgcagaggagccacagccctgccagcttcccccggccctttgccaccccaccagccaccccaggcagccggggctggccaccccagcctgtgcccaccctgcggctggagggcgtggagagcagcgagaagctgaacagcagcttccccagcatccactgcggctcctgggccgagaccacccctgggggcggcggcagcagcgctgccaggagagtgcggcctgtgtccctgatggtgcccagccaggccggggcccctggccggcagttccacggcagcgccagcagcctggtggaggccgtgctgatcagcgagggcctgggccagtttgcccaggaccccaagttcatcgaggtgaccacccaggagctggctgatgcctgtgacatgaccatcgaggagatggagagcgctgctgacaacatcctgtctggaggagccccccagagccccaatggagccctgctgccctttgtgaactgcagagatgctggccaggaccgggccggcggggaggaggatgctggctgtgtgcgggcccggggccggcccagcgaggaggagctgcaggacagccgggtgtatgtgagcagcctgtag

SEQ ID NO: 46977 - DNA, 6417 bp, Artificial Sequence
  derived and/or modified sequence
atggtgaacgagaacacccggatgtacatccccgaggagaaccaccaaggttccaactacggctcgccccgtcctgctcacgcgaatatgaacgcaaacgcggccgctggactggcacctgagcacatcccgactcccggggccgcactcagttggcaagccgctatcgacgcagctagacaagccaaactgatgggctcagctggcaacgctacaatatctaccgtcagcagcacacagcggaagaggcagcagtacggaaaacctaagaagcagggatcaactactgccactcggcccccacgagctctgctctgtctaacacttaagaaccccatccggcgggcctgcattagcattgtcgaatggaagccttttgagatcatcatcttgttgacgattttcgctaactgcgtggccttggctatctatatacctttcccagaagatgacagtaacgccactaactctaacctggagagggtggagtacctgtttctgataatcttcaccgtggaagccttcttaaaggtgatcgcttacggactcctatttcatccaaatgcgtacctcaggaatgggtggaatcttctggatttcatcatcgtggtagtgggactgttttctgccattctggaacaggccaccaaagccgatggcgctaacgccctgggcggcaagggagctggcttcgatgtaaaggccctccgcgctttcagggtcctgaggcccctacggctcgtctccggagttccgtctctgcaagtggtactgaattccattatcaaagcaatggtgccactgttgcacatcgccttactcgttcttttcgtgataatcatctatgctatcataggtctcgagttatttatgggtaaaatgcataagacctgttataaccaagaaggcatcgccgatgtcccagctgaagacgacccttctccctgcgcgctcgaaacaggacatgggaggcagtgtcagaacggcacggtctgcaaacccggatgggatggccccaagcacggtataaccaacttcgacaactttgcatttgccatgttaaccgttttccagtgtattaccatggaaggctggacggatgtcctctattggatgcaggatgctatgggctacgagttaccgtgggtctacttcgtgagcctcgtgattttcggctcgttcttcgtcttgaatttggtgctgggagtgctgtcaggcgagttttctaaggagagggagaaagcaaaggccaggggggatttccagaagctgcgggagaaacaacaacttgaggaggacctgaaggggtatctggactggataacccaggctgaggacattgatccggaaaatgaggacgagggcatggacgaagagaagccaagaaatatgtcgatgcctacaagtgaaacagagtcagtgaatacagagaatgtggcgggaggcgacatcgaaggcgagaactgcggagcacgcctggcacatcggatttctaagagcaaattctccaggtactggagacggtggaataggttttgccgccgaaagtgccgcgcggctgtcaaatctaatgtcttctattggctggtgatctttctggtgtttctgaacacgttgacaatcgcttctgagcactacaatcaacccaattggctgactgaggtgcaggatactgccaataaggctctgttggccctgtttactgccgagatgctccttaaaatgtattccctgggtctccaggcttattttgtgtccctgtttaatcggttcgattgctttgtggtgtgcggcggcattttggagaccatattggtagagactaaaattatgtctcctctcggaatcagcgtgttgagatgcgtgaggctccttcgcatttttaaaattacacgctactggaattcactgtccaacttggtggcctcgcttctgaactctgttcggtcaatcgctagtttgctgctgctcctgttcctgtttattattatctttagcttgttgggcatgcagctgttcggcggtaaattcaattttgatgagatgcagactcgccgaagcacctttgataatttcccccagtcccttcttacagtgttccagatcctgactggcgaggattggaactccgttatgtatgacggcattatggcctatgggggccctagctttcccggaatgctggtgtgcatctacttcatcatcctcttcatttgtggcaactatatcctgctgaatgtgtttctggcaattgccgtagacaatctagccgatgcagaatctctgactagtgcacagaaggaggaagaggaagagaaagaacgaaaaaagctcgctcggacagcctccccggaaaaaaaacaagaattggtagaaaagcctgccgtcggtgagagtaaggaggaaaagatagaactgaagagtattaccgccgacggggagagtcctcccgccaccaaaattaacatggacgacctacagccgaatgaaaatgaggacaagtctccttacccaaatccggagacgacaggagaagaagacgaggaggaacctgagatgcctgtgggtcccagacccaggcctttatctgagctccatctcaaggagaaggccgtgcccatgccggaagcttcggctttttttatcttttcgtcaaacaatcgctttcgcctgcaatgccatcgcatcgtcaacgacactatattcactaacctgatcctgttttttattctgctttcttccattagcctagcagcagaggaccctgtccagcacactagtttcaggaatcatatcctgggaaatgccgattacgttttcacctctattttcacactagagatcattctgaagatgacggcatatggagccttcctgcataaaggctccttttgccgaaattattttaatattctggacctactcgtggtgtctgtgtccctgatctcatttggaattcaaagctcagctatcaacgtggtgaagattctgagagtgttgagggtcctcaggcctctgcgcgccatcaaccgcgcgaaaggcctgaagcatgtcgtgcagtgtgtatttgtcgctattcgaaccattggaaacattgtcattgtcacaactctactgcagttcatgttcgcgtgcataggagtgcagttatttaagggtaagctctacacatgctctgacagcagtaaacagacagaggcggagtgcaaaggaaattatataacttataaggacggcgaggtcgatcacccaattatccaacctaggtcctgggaaaacagtaagttcgatttcgacaacgttctggccgccatgatggctcttttcactgtttcgaccttcgaaggttggcccgagctgctgtaccggtccatcgacagccacaccgaggacaagggacctatctataattaccgggtagagatttccattttcttcattatctacatcataatcattgcatttttcatgatgaatatctttgtcggctttgtaatcgtcacatttcaggaacagggggagcaggagtacaagaattgcgagctggataagaatcagagacagtgtgtcgaatatgcattgaaggccaggccactgcgccgttacatacctaagaaccagcaccaatacaaggtttggtatgttgtcaacagtacatatttcgagtacctcatgtttgtcctgatcctcctgaatactatctgtctcgccatgcagcactatggccaaagctgtctgttcaaaatagcgatgaacatcctgaacatgctgtttaccgggctctttaccgtggagatgatcctgaaactgatcgccttcaagccgaaacactatttttgcgatgcatggaacacctttgatgcactgatagtggtcggatccattgtcgacattgctataactgaagtgaatcctgctgaacacacccagtgtagcccatcaatgaatgcagaggagaacagtcgtatttctattacttttttccgcttgtttcgcgtcatgagactcgtgaagcttctgtctcgaggcgaagggatccgaactttgctgtggacattcataaaatctttccaggctctgccatatgtcgccttgttgatcgtgatgctgtttttcatttacgccgtgattggcatgcaggtgttcggaaaaattgccctgaacgatacgacagaaatcaaccgcaataacaactttcaaaccttcccgcaggctgtactgctgcttttccggtgtgccaccggcgaagcctggcaagacatcatgctggcgtgcatgccaggcaaaaagtgtgcgccagagtcagaaccatctaacagcacagagggagagactccttgcggttccagttttgccgtgttctattttatctcgttttatatgctgtgcgcattcttgattataaacttattcgtcgccgtcattatggataattttgattatctcactagggactggtccattctgggccctcaccatctcgatgagtttaaacggatctgggcagaatatgaccccgaggcgaaggggcggataaagcaccttgacgtggtgaccttgctgagaagaatccaaccaccattgggcttcggcaagctctgtcctcatcgggtcgcttgcaaaagattagtgagtatgaacatgcccctgaacagcgatggcacagtgatgtttaacgctactttgtttgctttagttagaacagccctccgcatcaaaaccgagggaaacttggagcaggccaatgaggagttgcgagccatcataaagaagatctggaagcgtacctccatgaagctccttgaccaagttgtgccccccgctggggacgacgaagttaccgtgggcaaattctacgcaactttcttgattcaggagtactttcgtaagttcaaaaagcgcaaggagcagggcctcgtgggtaagccctctcagcgaaacgccctgtctttacaagccggcctacgaacccttcatgatattggtccagagatccgaagagccatctctggcgacctgacagcggaagaagagctggataaagctatgaaggaagcagtctcagctgcaagcgaggacgatatcttccgaagggctgggggcttattcggtaaccatgtttcctattatcaatcagacggcagatcagccttcccgcagacgtttaccacgcagaggcctctccacattaacaaagctggatcttcacaaggcgacaccgaaagcccctcacacgagaagcttgtagacagtacctttacaccatcgtcctactctagtacaggaagtaatgctaatataaacaatgccaacaataccgctctcggtaggcttccgaggcccgcggggtacccttctaccgtatcaaccgtggaggggcatggacctcctctgtcaccagctattagagtgcaggaggtcgcctggaaactgtcctcgaaccgatgccacagtcgggaaagtcaggctgcaatggccgggcaggaagagacctctcaggacgagacttacgaggttaaaatgaaccacgacaccgaagcctgttccgagccatccctgctcagtactgaaatgctgtcatatcaggatgacgaaaacagacagctgaccctgccagaggaagataaacgcgacatccgccagagccccaagagggggtttctaaggtccgcatccctgggccggcgagcatcctttcatctggagtgccttaaacggcagaaagaccggggaggcgacattagccaaaagacagtcctgccactgcatctggtgcaccatcaagccctcgccgtggcaggactcagccccttattgcagcgctcgcattctccagcttctttccctcgaccgtttgctactcctccggctaccccaggaagccgggggtggccccctcaaccagtgcccacgcttcgcctggagggagtggaaagtagcgagaagttaaacagttcgtttcccagtatccactgtggttcgtgggccgagaccactccaggtggcggggggtcctccgccgctaggagagtgcgtcctgtgtcactgatggtgccttcccaggcaggagcccctggacggcagttccatggatccgcttcctctttggtagaagccgtgctgatatctgaaggactggggcagttcgcacaggaccccaagttcatcgaagttaccacccaggagttggctgacgcctgtgatatgacaatcgaggagatggagtccgcagccgataatatcctctccggcggcgcaccccagtcccccaatggagccctgcttcccttcgttaactgtcgggatgccggccaggatagagccgggggtgaggaagatgctggttgtgtcagagctagaggtcggccctcagaagaggagttacaggattccagagtttatgtgagttcgctctag

SEQ ID NO: 46978 - DNA, 6417 bp, Artificial Sequence
  derived and/or modified sequence
atggtgaacgagaataccaggatgtacattcccgaggagaaccaccaaggtagcaattatgggtccccgaggcccgctcatgccaacatgaatgccaatgctgccgcagggttagcccctgaacacatcccaacacctggagcagccttgtcatggcaagcggctatcgatgccgcacggcaggcaaagttaatggggtctgccggaaatgccaccattagcactgtgtcctccacccaacggaaaaggcaacagtacggcaagcccaaaaaacaggggagtactacagccacccgaccaccaagggcactgctatgtctgaccctgaagaaccctatccgaagagcttgcatcagtattgttgagtggaaacctttcgaaatcatcattctgctgacaatttttgctaactgcgtcgctttagcgatctacatcccgtttccagaggatgactctaatgctacaaattctaatctcgaacgcgtggaatatttgtttctgataatctttacagttgaggctttcctgaaggtgatagcctatggactgctgtttcacccaaatgcctaccttaggaatggttggaatttactggatttcattatcgtggtggtgggccttttcagcgctatcttggaacaggcgactaaagccgacggggcaaacgcgttgggcggtaagggtgccggtttcgacgtgaaggctcttagagccttcagggtgctgcgccctctcagactcgtgtccggagtgccctctttgcaggttgtcctgaatagcattattaaggccatggttccactgcttcacatagctctgctggtgttattcgtgatcataatctacgccatcatcggccttgagctctttatgggaaaaatgcataagacctgttataaccaggaggggatcgccgatgtgccagctgaggacgaccccagcccctgtgccctggagacaggccatggtcgccagtgccagaatggaactgtgtgtaaacccggatgggatggccctaagcacgggatcactaattttgacaatttcgcctttgctatgctgacagtcttccagtgtataaccatggagggctggacagatgtactgtactggatgcaagacgcgatgggctatgagctgccctgggtttacttcgtgagcctagtgatttttggctctttcttcgtgcttaatcttgttcttggagtacttagcggcgaattctctaaggaacgcgaaaaggccaaggccaggggtgattttcagaaactccgcgagaagcagcaactggaggaggatctgaagggctacctggattggattacacaggctgaggatatcgaccccgagaacgaagacgagggcatggatgaggagaagccgagaaacatgtccatgccaacctctgagaccgagagcgttaataccgaaaacgtggcagggggagacatcgagggcgagaactgcggagctcgactggctcaccgtattagcaaaagcaaattctcgagatattggcgacgctggaatagattctgcagaagaaaatgccgagccgctgtgaagtctaacgtgttttattggctcgtgattttcctcgtgtttctcaataccctgacaattgcctcagaacactataaccagccaaattggctcactgaagtgcaggacactgccaacaaggcactactcgccctcttcaccgctgaaatgctgctgaagatgtattcactgggcctgcaggcctattttgtttccctgtttaaccgctttgactgtttcgtggtttgtgggggtatcctcgagactattctggtagaaaccaaaatcatgtcacctctgggaatctccgtgctcaggtgcgtgaggcttctgcgaatcttcaagatcacacgctattggaatagcttatccaatctggttgcctcccttctgaattccgttcggagcattgcaagtctgttattgctcctgtttctgttcatcataatcttcagtctgctggggatgcagttattcggagggaagtttaatttcgacgagatgcaaactcgcaggtcaacattcgacaacttcccccagtcgctacttaccgtttttcagatactcactggtgaggattggaattctgtgatgtatgacggaattatggcctacggcggaccttcctttcccggaatgctggtttgcatctatttcatcattctgttcatttgcgggaattatattctgttgaacgtgtttctcgctatcgccgtcgacaacttggctgacgctgaatctctgacctccgcccaaaaggaggaagaggaagaaaaagagaggaagaaactggcacgcacagcatctcccgaaaagaagcaggaacttgtggagaaaccagctgtgggcgagtcaaaggaggaaaagattgagctaaagtctataaccgctgatggcgagtcgccaccggcaacgaaaatcaatatggacgacctgcagccaaacgagaacgaggacaaatctccataccctaacccagagaccactggcgaagaagacgaagaagagcccgagatgcctgtgggacctaggcctagaccgctgtcagagctccatctaaaagagaaggccgtgccaatgcccgaagcctccgctttttttatatttagttcaaacaaccgattccggcttcaatgtcacagaattgtgaatgacacaatctttactaatctgatcctcttttttatcctcctgtcttccatttccttggccgctgaggatcccgtgcagcacacatctttcagaaatcacattctggggaatgccgattatgtgttcaccagtattttcacattggaaataatcttgaagatgactgcctacggagcatttctgcacaaaggaagcttctgtcgaaactacttcaacattctcgacctgctggtggtgagtgtgagtttgatcagtttcggcattcagagtagtgccatcaacgtcgttaagatcttacgcgtccttagggtcctgagacctctgagggccattaaccgggctaaaggcttgaaacacgtggtccaatgcgtgtttgtagcaattagaacaatcgggaatatcgtcattgttactaccttactacagtttatgttcgcttgtatcggtgtgcagttgttcaagggcaagttgtatacttgctcagacagcagtaagcagaccgaggcagagtgtaagggcaactatatcacttacaaggacggtgaggtggatcatcccatcatacaacctagaagttgggagaattccaaattcgatttcgataatgttcttgccgctatgatggctctctttactgtgagcaccttcgaggggtggccagagctgctctaccgatccatagactcccatacagaggataagggcccaatttataactatagggtcgagatttctattttcttcatcatttatattattatcattgcctttttcatgatgaacatctttgtgggtttcgtgattgtgacgtttcaggaacagggggaacaggagtacaagaattgtgaacttgacaagaaccagcgtcaatgcgttgagtacgccctcaaggctcgccctctcagacgctatatccctaagaatcagcaccagtataaggtatggtacgtggtcaatagcacctatttcgagtatttgatgtttgtgctgattctgttaaacaccatctgcttggccatgcaacactatggacagagctgcctgtttaagattgcgatgaacatcctgaatatgctgttcaccgggctctttactgtggagatgatactgaagctcatcgcgttcaagccaaaacattacttctgcgatgcttggaatacctttgacgcattgatcgtggtgggctccattgtggatatcgctattacagaggtgaacccagctgagcacacacaatgttctccgtctatgaacgccgaagagaactccagaattagtattacatttttcagactgtttagagttatgaggctcgtgaagttactttcacggggagaggggattaggactctgctgtggacttttattaagtcatttcaagcccttccctacgtagcccttctgatagtgatgcttttctttatctacgcagtgattggtatgcaggtgtttgggaagattgccctgaacgacacgacggaaattaacaggaataacaatttccagactttcccccaagcggttctgttgctcttcagatgcgctacgggggaagcctggcaggacatcatgctcgcatgcatgcccggaaagaaatgtgctcctgagagcgagccatctaattctactgaaggtgagaccccttgcggatctagctttgccgtcttctattttataagcttttacatgttgtgcgctttcttgattatcaacctctttgtggctgtgatcatggacaactttgattacctgactcgagattggtcaatcctgggcccacaccatctggatgaattcaagagaatttgggcagaatatgatccggaagccaagggaagaataaaacatctcgacgtggttactctgctgcggagaatccaaccacctctgggtttcggcaagctgtgcccacatcgggtggcctgtaaaaggttagtttctatgaatatgccactcaatagcgacggaactgtcatgttcaacgccaccctttttgcactggtgagaaccgctttacgtataaagactgaaggaaacttggaacaggccaacgaggaattacgggcaatcatcaagaagatctggaagcgtacaagtatgaaattgctcgaccaggttgtcccccctgcaggggatgacgaggtgacagtcggcaagttctatgccacctttctgatccaggagtattttcggaagtttaagaaacggaaggagcagggattggttggtaaaccctctcagagaaacgctctctcacttcaggccggactccgtacactgcacgatattgggccagaaatccgaagagccatttccggcgatctgaccgcagaggaagagttagataaagctatgaaagaggctgtttcagctgccagtgaggatgacatctttaggcgggctggcggtctattcggtaaccatgtgtcgtactatcagtccgatggcaggtctgcttttccccagacattcaccacacagagaccactacacataaacaaagcgggtagttcccagggggacactgaatcaccgtcccatgaaaagcttgtggacagcaccttcactccatctagttactcgtccacaggcagtaatgcaaatatcaataatgcaaacaacactgcccttggtcgtctaccgaggcccgctgggtacccctccacagtctctactgtagagggacacgggcctcctctgtccccggcaattcgtgttcaggaagtcgcctggaaactttcttccaaccgatgccactcacgcgagagccaggcagctatggccggtcaagaggaaacatctcaggacgagacatacgaggtcaagatgaaccatgataccgaagcatgctccgaaccctctcttctgagcacggagatgctgtcctaccaggatgatgagaacaggcaactaaccctccctgaggaagacaagcgggacatcagacagagccccaagcgtggatttctgagatctgcctctcttggcaggcgggcatcctttcatctggaatgtcttaagaggcagaaggataggggcggagacatcagccaaaaaactgttctaccccttcacctcgtccatcatcaggccctcgcagtggctggcctgtcccctctattgcagaggtcacatagccccgcttctttcccacgaccatttgccacccccccagccacgcctgggtcacggggttggccaccacagccagtcccgactctacgactagaaggtgtcgaatcaagtgagaagttgaacagtagtttccccagcatccattgcggttcatgggctgaaactacccctggcggaggcggatcgtcggctgccagacgagtgcgaccagtgtcactgatggtgccatcacaggctggcgctcctggtaggcagttccacgggtccgctagttccttggtcgaagcagtgctgatttctgaagggctggggcagttcgcccaggatccaaaattcattgaagtgaccactcaagagctcgccgacgcgtgcgacatgaccatcgaggaaatggagtctgcggctgataacatcctgagcggtggagctccacaaagccctaatggggcactgctccccttcgttaactgcagggatgccggacaggacagggcaggaggcgaggaggacgcgggttgtgtgagagccagaggcaggccttccgaagaagaactccaggacagccgcgtgtatgtgtcttcattgtag

SEQ ID NO: 46979 - DNA, 6511 bp, Artificial Sequence
  derived and/or modified sequence
atggtcaatgagaatacgaggatgtacattccagaggaaaaccaccaaggttccaactatgggagcccacgccccgcccatgccaacatgaatgccaatgcggcagcggggctggcccctgagcacatccccaccccgggggctgccctgtcgtggcaggcggccatcgacgcagcccggcaggctaagctgatgggcagcgctggcaatgcgaccatctccacagtcagctccacgcagcggaagcggcagcaatatgggaaacccaagaagcagggcagcaccacggccacacgcccgccccgagccctgctctgcctgaccctgaagaaccccatccggagggcctgcatcagcattgtcgaatggaaaccatttgaaataattattttactgactatttttgccaattgtgtggccttagcgatctatattccctttccagaagatgattccaacgccaccaattccaacctggaacgagtggaatatctctttctcataatttttacggtggaagcgtttttaaaagtaatcgcctatggactcctctttcaccccaatgcctacctccgcaacggctggaacctactagattttataattgtggttgtggggctttttagtgcaattttagaacaagcaaccaaagcagatggggcaaacgctctcggagggaaaggggccggatttgatgtgaaggcgctgagggccttccgcgtgctgcgccccctgcggctggtgtccggagtcccaagtctccaggtggtcctgaattccatcatcaaggccatggtccccctgctgcacatcgccctgcttgtgctgtttgtcatcatcatctacgccatcatcggcttggagctcttcatggggaagatgcacaagacctgctacaaccaggagggcatagcagatgttccagcagaagatgacccttccccttgtgcgctggaaacgggccacgggcggcagtgccagaacggcacggtgtgcaagcccggctgggatggtcccaagcacggcatcaccaactttgacaactttgccttcgccatgctcacggtgttccagtgcatcaccatggagggctggacggacgtgctgtactggatgcaggacgctatgggctatgagttaccctgggtgtattttgtcagtctggtcatctttggatcctttttcgttctaaatctggttctcggtgtgttgagcggagagttttccaaagagagggagaaggccaaggcccggggagatttccagaagctgcgggagaagcagcagctagaagaggatctcaaaggctacctggattggatcactcaggccgaagacatcgatcctgagaatgaggacgaaggcatggatgaggagaagccccgaaacatgagcatgcccaccagtgagaccgagtccgtcaacaccgaaaacgtggctggaggtgacatcgagggagaaaactgcggggccaggctggcccaccggatctccaagtcaaagttcagccgctactggcgccggtggaatcggttctgcagaaggaagtgccgcgccgcagtcaagtctaatgtcttctactggctggtgattttcctggtgttcctcaacacgctcaccattgcctctgagcactacaaccagcccaactggctcacagaagtccaagacacggcaaacaaggccctgctggccctgttcacggcagagatgctcctgaagatgtacagcctgggcctgcaggcctacttcgtgtccctcttcaaccgctttgactgcttcgtcgtgtgtggcggcatcctggagaccatcctggtggagaccaagatcatgtccccactgggcatctccgtgctcagatgcgtccggctgctgaggattttcaagatcacgaggtactggaactccttgagcaacctggtggcatccttgctgaactctgtgcgctccatcgcctccctgctccttctcctcttcctcttcatcatcatcttctccctcctggggatgcagctctttggaggaaagttcaactttgatgagatgcagacccggaggagcacattcgataacttcccccagtccctcctcactgtgtttcagatcctgaccggggaggactggaattcggtgatgtatgatgggatcatggcttatggcggcccctcttttccagggatgttagtctgtatttacttcatcatcctcttcatctgtggaaactatatcctactgaatgtgttcttggccattgctgtggacaacctggctgatgctgagagcctcacatctgcccaaaaggaggaggaagaggagaaggagagaaagaagctggccaggactgccagcccagagaagaaacaagagttggtggagaagccggcagtgggggaatccaaggaggagaagattgagctgaaatccatcacggctgacggagagtctccacccgccaccaagatcaacatggatgacctccagcccaatgaaaatgaggataagagcccctaccccaacccagaaactacaggagaagaggatgaggaggagccagagatgcctgtcggccctcgcccacgaccactctctgagcttcaccttaaggaaaaggcagtgcccatgccagaagccagcgcgtttttcatcttcagctctaacaacaggtttcgcctccagtgccaccgcattgtcaatgacacgatcttcaccaacctgatcctcttcttcattctgctcagcagcatttccctggctgctgaggacccggtccagcacacctccttcaggaaccatatcctaggcaatgcagactatgtcttcactagtatctttacattagaaattatccttaagatgactgcttatggggctttcttgcacaagggttctttctgccggaactacttcaacatcctggacctgctggtggtcagcgtgtccctcatctcctttggcatccagtccagtgcaatcaatgtcgtgaagatcttgcgagtcctgcgagtactcaggcccctgagggccatcaacagggccaaggggctaaagcatgtggttcagtgtgtgtttgtcgccatccggaccatcgggaacatcgtgattgtcaccaccctgctgcagttcatgtttgcctgcatcggggtccagctcttcaagggaaagctgtacacctgttcagacagttccaagcagacagaggcggaatgcaagggcaactacatcacgtacaaagacggggaggttgaccaccccatcatccaaccccgcagctgggagaacagcaagtttgactttgacaatgttctggcagccatgatggccctcttcaccgtctccaccttcgaagggtggccagagctgctgtaccgctccatcgactcccacacggaagacaagggccccatctacaactaccgtgtggagatctccatcttcttcatcatctacatcatcatcatcgccttcttcatgatgaacatcttcgtgggcttcgtcatcgtcacctttcaggagcagggggagcaggagtacaagaactgtgagctggacaagaaccagcgacagtgcgtggaatacgccctcaaggcccggcccctgcggaggtacatccccaagaaccagcaccagtacaaagtgtggtacgtggtcaactccacctacttcgagtacctgatgttcgtcctcatcctgctcaacaccatctgcctggccatgcagcactacggccagagctgcctgttcaaaatcgccatgaacatcctcaacatgctcttcactggcctcttcaccgtggagatgatcctgaagctcattgccttcaaacccaagcactatttctgtgatgcatggaatacatttgacgccttgattgttgtgggtagcattgttgatatagcaatcaccgaggtaaacccagctgaacatacccaatgctctccctctatgaacgcagaggaaaactcccgcatctccatcaccttcttccgcctgttccgggtcatgcgtctggtgaagctgctgagccgtggggagggcatccggacgctgctgtggaccttcatcaagtccttccaggccctgccctatgtggccctcctgatcgtgatgctgttcttcatctacgcggtgatcgggatgcaggtgtttgggaaaattgccctgaatgataccacagagatcaaccggaacaacaactttcagaccttcccccaggccgtgctgctcctcttcaggtgtgccaccggggaggcctggcaggacatcatgctggcctgcatgccaggcaagaagtgtgccccagagtccgagcccagcaacagcacggagggtgaaacaccctgtggtagcagctttgctgtcttctacttcatcagcttctacatgctctgtgccttcctgatcatcaacctctttgtagctgtcatcatggacaactttgactacctgacaagggactggtccatccttggtccccaccacctggatgagtttaaaagaatctgggcagagtatgaccctgaagccaagggtcgtatcaaacacctggatgtggtgaccctcctccggcggattcagccgccactaggttttgggaagctgtgccctcaccgcgtggcttgcaaacgcctggtctccatgaacatgcctctgaacagcgacgggacagtcatgttcaatgccaccctgtttgccctggtcaggacggccctgaggatcaaaacagaagggaacctagaacaagccaatgaggagctgcgggcgatcatcaagaagatctggaagcggaccagcatgaagctgctggaccaggtggtgccccctgcaggtgatgatgaggtcaccgttggcaagttctacgccacgttcctgatccaggagtacttccggaagttcaagaagcgcaaagagcagggccttgtgggcaagccctcccagaggaacgcgctgtctctgcaggctggcttgcgcacactgcatgacatcgggcctgagatccgacgggccatctctggagatctcaccgctgaggaggagctggacaaggccatgaaggaggctgtgtccgctgcttctgaagatgacatcttcaggagggccggtggcctgttcggcaaccacgtcagctactaccaaagcgacggccggagcgccttcccccagaccttcaccactcagcgcccgctgcacatcaacaaggcgggcagcagccagggcgacactgagtcgccatcccacgagaagctggtggactccaccttcaccccgagcagctactcgtccaccggctccaacgccaacatcaacaacgccaacaacaccgccctgggtcgcctccctcgccccgccggctaccccagcacggtcagcactgtggagggccacgggccccccttgtcccctgccatccgggtgcaggaggtggcgtggaagctcagctccaacaggtgccactcccgggagagccaggcagccatggcgggtcaggaggagacgtctcaggatgagacctatgaagtgaagatgaaccatgacacggaggcctgcagtgagcccagcctgctctccacagagatgctctcctaccaggatgacgaaaatcggcaactgacgctcccagaggaggacaagagggacatccggcaatctccgaagaggggtttcctccgctctgcctcactaggtcgaagggcctccttccacctggaatgtctgaagcgacagaaggaccgagggggagacatctctcagaagacagtcctgcccttgcatctggttcatcatcaggcattggcagtggcaggcctgagccccctcctccagagaagccattcccctgcctcattccctaggccttttgccaccccaccagccacacctggcagccgaggctggcccccacagcccgtccccaccctgcggcttgagggggtcgagtccagtgagaaactcaacagcagcttcccatccatccactgcggctcctgggctgagaccacccccggtggcgggggcagcagcgccgcccggagagtccggcccgtctccctcatggtgcccagccaggctggggccccagggaggcagttccacggcagtgccagcagcctggtggaagcggtcttgatttcagaaggactggggcagtttgctcaagatcccaagttcatcgaggtcaccacccaggagctggccgacgcctgcgacatgaccatagaggagatggagagcgcggccgacaacatcctcagcgggggcgccccacagagccccaatggcgccctcttaccctttgtgaactgcagggacgcggggcaggaccgagccgggggcgaagaggacgcgggctgtgtgcgcgcgcggggtcgaccgagtgaggaggagctccaggacagcagggtctacgtcagcagcctgtagtgggcgctgccagatgcgggcttttttttatttgtttcaatgttcctaatgggttcgtttcagaagtgcctcactgttctcgtgacctggagtt

SEQ ID NO: 46980 - DNA, 6417 bp, Artificial Sequence
  derived and/or modified sequence
atggtgaacgagaacaccagaatgtacatccccgaggagaaccaccagggcagcaactacggcagccccagacccgcccacgccaacatgaacgccaacgccgccgccggcctggcccccgagcacatccccacccccggcgccgccctgagctggcaggccgccatcgacgccgccagacaggccaagctgatgggcagcgccggcaacgccaccatcagcaccgtgagcagcacccagagaaagagacagcagtacggcaagcccaagaagcagggcagcaccaccgccaccagaccccccagagccctgctgtgcctgaccctgaagaaccccatcagaagagcctgcatcagcatcgtggagtggaagcccttcgagatcatcatcctgctgaccatcttcgccaactgcgtggccctggccatctacatccccttccccgaggacgacagcaacgccaccaacagcaacctggagagagtggagtacctgttcctgatcatcttcaccgtggaggccttcctgaaggtgatcgcctacggcctgctgttccaccccaacgcctacctgagaaacggctggaacctgctggacttcatcatcgtggtggtgggcctgttcagcgccatcctggagcaggccaccaaggccgacggcgccaacgccctgggcggcaagggcgccggcttcgacgtgaaggccctgagagccttcagagtgctgagacccctgagactggtgagcggcgtgcccagcctgcaggtggtgctgaacagcatcatcaaggccatggtgcccctgctgcacatcgccctgctggtgctgttcgtgatcatcatctacgccatcatcggcctggagctgttcatgggcaagatgcacaagacctgctacaaccaggagggcatcgccgacgtgcccgccgaggacgaccccagcccctgcgccctggagaccggccacggcagacagtgccagaacggcaccgtgtgcaagcccggctgggacggccccaagcacggcatcaccaacttcgacaacttcgccttcgccatgctgaccgtgttccagtgcatcaccatggagggctggaccgacgtgctgtactggatgcaggacgccatgggctacgagctgccctgggtgtacttcgtgagcctggtgatcttcggcagcttcttcgtgctgaacctggtgctgggcgtgctgagcggcgagttcagcaaggagagagagaaggccaaggccagaggcgacttccagaagctgagagagaagcagcagctggaggaggacctgaagggctacctggactggatcacccaggccgaggacatcgaccccgagaacgaggacgagggcatggacgaggagaagcccagaaacatgagcatgcccaccagcgagaccgagagcgtgaacaccgagaacgtggccggcggcgacatcgagggcgagaactgcggcgccagactggcccacagaatcagcaagagcaagttcagcagatactggagaagatggaacagattctgcagaagaaagtgcagagccgccgtgaagagcaacgtgttctactggctggtgatcttcctggtgttcctgaacaccctgaccatcgccagcgagcactacaaccagcccaactggctgaccgaggtgcaggacaccgccaacaaggccctgctggccctgttcaccgccgagatgctgctgaagatgtacagcctgggcctgcaggcctacttcgtgagcctgttcaacagattcgactgcttcgtggtgtgcggcggcatcctggagaccatcctggtggagaccaagatcatgagccccctgggcatcagcgtgctgagatgcgtgagactgctgagaatcttcaagatcaccagatactggaacagcctgagcaacctggtggccagcctgctgaacagcgtgagaagcatcgccagcctgctgctgctgctgttcctgttcatcatcatcttcagcctgctgggcatgcagctgttcggcggcaagttcaacttcgacgagatgcagaccagaagaagcaccttcgacaacttcccccagagcctgctgaccgtgttccagatcctgaccggcgaggactggaacagcgtgatgtacgacggcatcatggcctacggcggccccagcttccccggcatgctggtgtgcatctacttcatcatcctgttcatctgcggcaactacatcctgctgaacgtgttcctggccatcgccgtggacaacctggccgacgccgagagcctgaccagcgcccagaaggaggaggaggaggagaaggagagaaagaagctggccagaaccgccagccccgagaagaagcaggagctggtggagaagcccgccgtgggcgagagcaaggaggagaagatcgagctgaagagcatcaccgccgacggcgagagcccccccgccaccaagatcaacatggacgacctgcagcccaacgagaacgaggacaagagcccctaccccaaccccgagaccaccggcgaggaggacgaggaggagcccgagatgcccgtgggccccagacccagacccctgagcgagctgcacctgaaggagaaggccgtgcccatgcccgaggccagcgccttcttcatcttcagcagcaacaacagattcagactgcagtgccacagaatcgtgaacgacaccatcttcaccaacctgatcctgttcttcatcctgctgagcagcatcagcctggccgccgaggaccccgtgcagcacaccagcttcagaaaccacatcctgggcaacgccgactacgtgttcaccagcatcttcaccctggagatcatcctgaagatgaccgcctacggcgccttcctgcacaagggcagcttctgcagaaactacttcaacatcctggacctgctggtggtgagcgtgagcctgatcagcttcggcatccagagcagcgccatcaacgtggtgaagatcctgagagtgctgagagtgctgagacccctgagagccatcaacagagccaagggcctgaagcacgtggtgcagtgcgtgttcgtggccatcagaaccatcggcaacatcgtgatcgtgaccaccctgctgcagttcatgttcgcctgcatcggcgtgcagctgttcaagggcaagctgtacacctgcagcgacagcagcaagcagaccgaggccgagtgcaagggcaactacatcacctacaaggacggcgaggtggaccaccccatcatccagcccagaagctgggagaacagcaagttcgacttcgacaacgtgctggccgccatgatggccctgttcaccgtgagcaccttcgagggctggcccgagctgctgtacagaagcatcgacagccacaccgaggacaagggccccatctacaactacagagtggagatcagcatcttcttcatcatctacatcatcatcatcgccttcttcatgatgaacatcttcgtgggcttcgtgatcgtgaccttccaggagcagggcgagcaggagtacaagaactgcgagctggacaagaaccagagacagtgcgtggagtacgccctgaaggccagacccctgagaagatacatccccaagaaccagcaccagtacaaggtgtggtacgtggtgaacagcacctacttcgagtacctgatgttcgtgctgatcctgctgaacaccatctgcctggccatgcagcactacggccagagctgcctgttcaagatcgccatgaacatcctgaacatgctgttcaccggcctgttcaccgtggagatgatcctgaagctgatcgccttcaagcccaagcactacttctgcgacgcctggaacaccttcgacgccctgatcgtggtgggcagcatcgtggacatcgccatcaccgaggtgaaccccgccgagcacacccagtgcagccccagcatgaacgccgaggagaacagcagaatcagcatcaccttcttcagactgttcagagtgatgagactggtgaagctgctgagcagaggcgagggcatcagaaccctgctgtggaccttcatcaagagcttccaggccctgccctacgtggccctgctgatcgtgatgctgttcttcatctacgccgtgatcggcatgcaggtgttcggcaagatcgccctgaacgacaccaccgagatcaacagaaacaacaacttccagaccttcccccaggccgtgctgctgctgttcagatgcgccaccggcgaggcctggcaggacatcatgctggcctgcatgcccggcaagaagtgcgcccccgagagcgagcccagcaacagcaccgagggcgagaccccctgcggcagcagcttcgccgtgttctacttcatcagcttctacatgctgtgcgccttcctgatcatcaacctgttcgtggccgtgatcatggacaacttcgactacctgaccagagactggagcatcctgggcccccaccacctggacgagttcaagagaatctgggccgagtacgaccccgaggccaagggcagaatcaagcacctggacgtggtgaccctgctgagaagaatccagccccccctgggcttcggcaagctgtgcccccacagagtggcctgcaagagactggtgagcatgaacatgcccctgaacagcgacggcaccgtgatgttcaacgccaccctgttcgccctggtgagaaccgccctgagaatcaagaccgagggcaacctggagcaggccaacgaggagctgagagccatcatcaagaagatctggaagagaaccagcatgaagctgctggaccaggtggtgccccccgccggcgacgacgaggtgaccgtgggcaagttctacgccaccttcctgatccaggagtacttcagaaagttcaagaagagaaaggagcagggcctggtgggcaagcccagccagagaaacgccctgagcctgcaggccggcctgagaaccctgcacgacatcggccccgagatcagaagagccatcagcggcgacctgaccgccgaggaggagctggacaaggccatgaaggaggccgtgagcgccgccagcgaggacgacatcttcagaagagccggcggcctgttcggcaaccacgtgagctactaccagagcgacggcagaagcgccttcccccagaccttcaccacccagagacccctgcacatcaacaaggccggcagcagccagggcgacaccgagagccccagccacgagaagctggtggacagcaccttcacccccagcagctacagcagcaccggcagcaacgccaacatcaacaacgccaacaacaccgccctgggcagactgcccagacccgccggctaccccagcaccgtgagcaccgtggagggccacggcccccccctgagccccgccatcagagtgcaggaggtggcctggaagctgagcagcaacagatgccacagcagagagagccaggccgccatggccggccaggaggagaccagccaggacgagacctacgaggtgaagatgaaccacgacaccgaggcctgcagcgagcccagcctgctgagcaccgagatgctgagctaccaggacgacgagaacagacagctgaccctgcccgaggaggacaagagagacatcagacagagccccaagagaggcttcctgagaagcgccagcctgggcagaagagccagcttccacctggagtgcctgaagagacagaaggacagaggcggcgacatcagccagaagaccgtgctgcccctgcacctggtgcaccaccaggccctggccgtggccggcctgagccccctgctgcagagaagccacagccccgccagcttccccagacccttcgccaccccccccgccacccccggcagcagaggctggcccccccagcccgtgcccaccctgagactggagggcgtggagagcagcgagaagctgaacagcagcttccccagcatccactgcggcagctgggccgagaccacccccggcggcggcggcagcagcgccgccagaagagtgagacccgtgagcctgatggtgcccagccaggccggcgcccccggcagacagttccacggcagcgccagcagcctggtggaggccgtgctgatcagcgagggcctgggccagttcgcccaggaccccaagttcatcgaggtgaccacccaggagctggccgacgcctgcgacatgaccatcgaggagatggagagcgccgccgacaacatcctgagcggcggcgccccccagagccccaacggcgccctgctgcccttcgtgaactgcagagacgccggccaggacagagccggcggcgaggaggacgccggctgcgtgagagccagaggcagacccagcgaggaggagctgcaggacagcagagtgtacgtgagcagcctgtag

SEQ ID NO: 46981 - protein, 2138 aa, Artificial Sequence
  derived and/or modified sequence
MVNENTRMYIPEENHQGSNYGSPRPAHANMNANAAAGLAPEHIPTPGAALSWQAAIDAARQAKLMGSAGNATISTVSSTQRKRQQYGKPKKQGSTTATRPPRALLCLTLKNPIRRACISIVEWKPFEIIILLTIFANCVALAIYIPFPEDDSNATNSNLERVEYLFLIIFTVEAFLKVIAYGLLFHPNAYLRNGWNLLDFIIVVVGLFSAILEQATKADGANALGGKGAGFDVKALRAFRVLRPLRLVSGVPSLQVVLNSIIKAMVPLLHIALLVLFVIIIYAIIGLELFMGKMHKTCYNQEGIADVPAEDDPSPCALETGHGRQCQNGTVCKPGWDGPKHGITNFDNFAFAMLTVFQCITMEGWTDVLYWVNDAVGRDWPWIYFVTLIIIGSFFVLNLVLGVLSGEFSKEREKAKARGDFQKLREKQQLEEDLKGYLDWITQAEDIDPENEDEGMDEEKPRNMSMPTSETESVNTENVAGGDIEGENCGARLAHRISKSKFSRYWRRWNRFCRRKCRAAVKSNVFYWLVIFLVFLNTLTIASEHYNQPNWLTEVQDTANKALLALFTAEMLLKMYSLGLQAYFVSLFNRFDCFVVCGGILETILVETKIMSPLGISVLRCVRLLRIFKITRYWNSLSNLVASLLNSVRSIASLLLLLFLFIIIFSLLGMQLFGGKFNFDEMQTRRSTFDNFPQSLLTVFQILTGEDWNSVMYDGIMAYGGPSFPGMLVCIYFIILFICGNYILLNVFLAIAVDNLADAESLTSAQKEEEEEKERKKLARTASPEKKQELVEKPAVGESKEEKIELKSITADGESPPATKINMDDLQPNENEDKSPYPNPETTGEEDEEEPEMPVGPRPRPLSELHLKEKAVPMPEASAFFIFSSNNRFRLQCHRIVNDTIFTNLILFFILLSSISLAAEDPVQHTSFRNHILGNADYVFTSIFTLEIILKMTAYGAFLHKGSFCRNYFNILDLLVVSVSLISFGIQSSAINVVKILRVLRVLRPLRAINRAKGLKHVVQCVFVAIRTIGNIVIVTTLLQFMFACIGVQLFKGKLYTCSDSSKQTEAECKGNYITYKDGEVDHPIIQPRSWENSKFDFDNVLAAMMALFTVSTFEGWPELLYRSIDSHTEDKGPIYNYRVEISIFFIIYIIIIAFFMMNIFVGFVIVTFQEQGEQEYKNCELDKNQRQCVEYALKARPLRRYIPKNQHQYKVWYVVNSTYFEYLMFVLILLNTICLAMQHYGQSCLFKIAMNILNMLFTGLFTVEMILKLIAFKPKGYFSDPWNVFDFLIVIGSIIDVILSETNPAEHTQCSPSMNAEENSRISITFFRLFRVMRLVKLLSRGEGIRTLLWTFIKSFQALPYVALLIVMLFFIYAVIGMQVFGKIALNDTTEINRNNNFQTFPQAVLLLFRCATGEAWQDIMLACMPGKKCAPESEPSNSTEGETPCGSSFAVFYFISFYMLCAFLIINLFVAVIMDNFDYLTRDWSILGPHHLDEFKRIWAEYDPEAKGRIKHLDVVTLLRRIQPPLGFGKLCPHRVACKRLVSMNMPLNSDGTVMFNATLFALVRTALRIKTEGNLEQANEELRAIIKKIWKRTSMKLLDQVVPPAGDDEVTVGKFYATFLIQEYFRKFKKRKEQGLVGKPSQRNALSLQAGLRTLHDIGPEIRRAISGDLTAEEELDKAMKEAVSAASEDDIFRRAGGLFGNHVSYYQSDGRSAFPQTFTTQRPLHINKAGSSQGDTESPSHEKLVDSTFTPSSYSSTGSNANINNANNTALGRLPRPAGYPSTVSTVEGHGPPLSPAIRVQEVAWKLSSNRCHSRESQAAMAGQEETSQDETYEVKMNHDTEACSEPSLLSTEMLSYQDDENRQLTLPEEDKRDIRQSPKRGFLRSASLGRRASFHLECLKRQKDRGGDISQKTVLPLHLVHHQALAVAGLSPLLQRSHSPASFPRPFATPPATPGSRGWPPQPVPTLRLEGVESSEKLNSSFPSIHCGSWAETTPGGGGSSAARRVRPVSLMVPSQAGAPGRQFHGSASSLVEAVLISEGLGQFAQDPKFIEVTTQELADACDMTIEEMESAADNILSGGAPQSPNGALLPFVNCRDAGQDRAGGEEDAGCVRARGRPSEEELQDSRVYVSSL

SEQ ID NO: 46982 - DNA, 13480 bp, Artificial Sequence
  derived and/or modified sequence
ttattttttcaaatggtgtagccgccggaggtgcggtgctcagttcttggaaggggcccggatgtactgaggatgcgttacagtttcactcgaggaggcagtagtggaaaggagcagtttttggggtttgatgccataatgggaatcaggtaatcgtcggcggggaagaagaaacgctgcagaccacggcttcctcgaatcttgcgcgaaagccgccggcctcggaggagggattaatccagacccgccggggggtgttttcacatttcttcctcttcgtggctgctcctcctattaaaaccatttttggtccatggtcaatgagaatacgaggatgtacattccagaggaaaaccaccaaggttccaactatgggagcccacgccccgcccatgccaacatgaatgccaatgcggcagcggggctggcccctgagcacatccccaccccgggggctgccctgtcgtggcaggcggccatcgacgcagcccggcaggctaagctgatgggcagcgctggcaatgcgaccatctccacagtcagctccacgcagcggaagcggcagcaatatgggaaacccaagaagcagggcagcaccacggccacacgcccgccccgagccctgctctgcctgaccctgaagaaccccatccggagggcctgcatcagcattgtcgaatggaaaccatttgaaataattattttactgactatttttgccaattgtgtggccttagcgatctatattccctttccagaagatgattccaacgccaccaattccaacctggaacgagtggaatatctctttctcataatttttacggtggaagcgtttttaaaagtaatcgcctatggactcctctttcaccccaatgcctacctccgcaacggctggaacctactagattttataattgtggttgtggggctttttagtgcaattttagaacaagcaaccaaagcagatggggcaaacgctctcggagggaaaggggccggatttgatgtgaaggcgctgagggccttccgcgtgctgcgccccctgcggctggtgtccggagtcccaagtctccaggtggtcctgaattccatcatcaaggccatggtccccctgctgcacatcgccctgcttgtgctgtttgtcatcatcatctacgccatcatcggcttggagctcttcatggggaagatgcacaagacctgctacaaccaggagggcatagcagatgttccagcagaagatgacccttccccttgtgcgctggaaacgggccacgggcggcagtgccagaacggcacggtgtgcaagcccggctgggatggtcccaagcacggcatcaccaactttgacaactttgccttcgccatgctcacggtgttccagtgcatcaccatggagggctggacggacgtgctgtactgggtcaatgatgccgtaggaagggactggccctggatctattttgttacactaatcatcatagggtcattttttgtacttaacttggttctcggtgtgcttagcggagagttttccaaagagagggagaaggccaaggcccggggagatttccagaagctgcgggagaagcagcagctagaagaggatctcaaaggctacctggattggatcactcaggccgaagacatcgatcctgagaatgaggacgaaggcatggatgaggagaagccccgaaacatgagcatgcccaccagtgagaccgagtccgtcaacaccgaaaacgtggctggaggtgacatcgagggagaaaactgcggggccaggctggcccaccggatctccaagtcaaagttcagccgctactggcgccggtggaatcggttctgcagaaggaagtgccgcgccgcagtcaagtctaatgtcttctactggctggtgattttcctggtgttcctcaacacgctcaccattgcctctgagcactacaaccagcccaactggctcacagaagtccaagacacggcaaacaaggccctgctggccctgttcacggcagagatgctcctgaagatgtacagcctgggcctgcaggcctacttcgtgtccctcttcaaccgctttgactgcttcgtcgtgtgtggcggcatcctggagaccatcctggtggagaccaagatcatgtccccactgggcatctccgtgctcagatgcgtccggctgctgaggattttcaagatcacgaggtactggaactccttgagcaacctggtggcatccttgctgaactctgtgcgctccatcgcctccctgctccttctcctcttcctcttcatcatcatcttctccctcctggggatgcagctctttggaggaaagttcaactttgatgagatgcagacccggaggagcacattcgataacttcccccagtccctcctcactgtgtttcagatcctgaccggggaggactggaattcggtgatgtatgatgggatcatggcttatggcggcccctcttttccagggatgttagtctgtatttacttcatcatcctcttcatctgtggaaactatatcctactgaatgtgttcttggccattgctgtggacaacctggctgatgctgagagcctcacatctgcccaaaaggaggaggaagaggagaaggagagaaagaagctggccaggactgccagcccagagaagaaacaagagttggtggagaagccggcagtgggggaatccaaggaggagaagattgagctgaaatccatcacggctgacggagagtctccacccgccaccaagatcaacatggatgacctccagcccaatgaaaatgaggataagagcccctaccccaacccagaaactacaggagaagaggatgaggaggagccagagatgcctgtcggccctcgcccacgaccactctctgagcttcaccttaaggaaaaggcagtgcccatgccagaagccagcgcgtttttcatcttcagctctaacaacaggtttcgcctccagtgccaccgcattgtcaatgacacgatcttcaccaacctgatcctcttcttcattctgctcagcagcatttccctggctgctgaggacccggtccagcacacctccttcaggaaccatatcctaggcaatgcagactatgtcttcactagtatctttacattagaaattatccttaagatgactgcttatggggctttcttgcacaagggttctttctgccggaactacttcaacatcctggacctgctggtggtcagcgtgtccctcatctcctttggcatccagtccagtgcaatcaatgtcgtgaagatcttgcgagtcctgcgagtactcaggcccctgagggccatcaacagggccaaggggctaaagcatgtggttcagtgtgtgtttgtcgccatccggaccatcgggaacatcgtgattgtcaccaccctgctgcagttcatgtttgcctgcatcggggtccagctcttcaagggaaagctgtacacctgttcagacagttccaagcagacagaggcggaatgcaagggcaactacatcacgtacaaagacggggaggttgaccaccccatcatccaaccccgcagctgggagaacagcaagtttgactttgacaatgttctggcagccatgatggccctcttcaccgtctccaccttcgaagggtggccagagctgctgtaccgctccatcgactcccacacggaagacaagggccccatctacaactaccgtgtggagatctccatcttcttcatcatctacatcatcatcatcgccttcttcatgatgaacatcttcgtgggcttcgtcatcgtcacctttcaggagcagggggagcaggagtacaagaactgtgagctggacaagaaccagcgacagtgcgtggaatacgccctcaaggcccggcccctgcggaggtacatccccaagaaccagcaccagtacaaagtgtggtacgtggtcaactccacctacttcgagtacctgatgttcgtcctcatcctgctcaacaccatctgcctggccatgcagcactacggccagagctgcctgttcaaaatcgccatgaacatcctcaacatgctcttcactggcctcttcaccgtggagatgatcctgaagctcattgccttcaaacccaagggttactttagtgatccctggaatgtttttgacttcctcatcgtaattggcagcataattgacgtcattctcagtgagactaatccagctgaacatacccaatgctctccctctatgaacgcagaggaaaactcccgcatctccatcaccttcttccgcctgttccgggtcatgcgtctggtgaagctgctgagccgtggggagggcatccggacgctgctgtggaccttcatcaagtccttccaggccctgccctatgtggccctcctgatcgtgatgctgttcttcatctacgcggtgatcgggatgcaggtgtttgggaaaattgccctgaatgataccacagagatcaaccggaacaacaactttcagaccttcccccaggccgtgctgctcctcttcaggtgtgccaccggggaggcctggcaggacatcatgctggcctgcatgccaggcaagaagtgtgccccagagtccgagcccagcaacagcacggagggtgaaacaccctgtggtagcagctttgctgtcttctacttcatcagcttctacatgctctgtgccttcctgatcatcaacctctttgtagctgtcatcatggacaactttgactacctgacaagggactggtccatccttggtccccaccacctggatgagtttaaaagaatctgggcagagtatgaccctgaagccaagggtcgtatcaaacacctggatgtggtgaccctcctccggcggattcagccgccactaggttttgggaagctgtgccctcaccgcgtggcttgcaaacgcctggtctccatgaacatgcctctgaacagcgacgggacagtcatgttcaatgccaccctgtttgccctggtcaggacggccctgaggatcaaaacagaagggaacctagaacaagccaatgaggagctgcgggcgatcatcaagaagatctggaagcggaccagcatgaagctgctggaccaggtggtgccccctgcaggtgatgatgaggtcaccgttggcaagttctacgccacgttcctgatccaggagtacttccggaagttcaagaagcgcaaagagcagggccttgtgggcaagccctcccagaggaacgcgctgtctctgcaggctggcttgcgcacactgcatgacatcgggcctgagatccgacgggccatctctggagatctcaccgctgaggaggagctggacaaggccatgaaggaggctgtgtccgctgcttctgaagatgacatcttcaggagggccggtggcctgttcggcaaccacgtcagctactaccaaagcgacggccggagcgccttcccccagaccttcaccactcagcgcccgctgcacatcaacaaggcgggcagcagccagggcgacactgagtcgccatcccacgagaagctggtggactccaccttcaccccgagcagctactcgtccaccggctccaacgccaacatcaacaacgccaacaacaccgccctgggtcgcctccctcgccccgccggctaccccagcacggtcagcactgtggagggccacgggccccccttgtcccctgccatccgggtgcaggaggtggcgtggaagctcagctccaacaggtgccactcccgggagagccaggcagccatggcgggtcaggaggagacgtctcaggatgagacctatgaagtgaagatgaaccatgacacggaggcctgcagtgagcccagcctgctctccacagagatgctctcctaccaggatgacgaaaatcggcaactgacgctcccagaggaggacaagagggacatccggcaatctccgaagaggggtttcctccgctctgcctcactaggtcgaagggcctccttccacctggaatgtctgaagcgacagaaggaccgagggggagacatctctcagaagacagtcctgcccttgcatctggttcatcatcaggcattggcagtggcaggcctgagccccctcctccagagaagccattcccctgcctcattccctaggccttttgccaccccaccagccacacctggcagccgaggctggcccccacagcccgtccccaccctgcggcttgagggggtcgagtccagtgagaaactcaacagcagcttcccatccatccactgcggctcctgggctgagaccacccccggtggcgggggcagcagcgccgcccggagagtccggcccgtctccctcatggtgcccagccaggctggggccccagggaggcagttccacggcagtgccagcagcctggtggaagcggtcttgatttcagaaggactggggcagtttgctcaagatcccaagttcatcgaggtcaccacccaggagctggccgacgcctgcgacatgaccatagaggagatggagagcgcggccgacaacatcctcagcgggggcgccccacagagccccaatggcgccctcttaccctttgtgaactgcagggacgcggggcaggaccgagccgggggcgaagaggacgcgggctgtgtgcgcgcgcggggtcgaccgagtgaggaggagctccaggacagcagggtctacgtcagcagcctgtagtgggcgctgccagatgcgggcttttttttatttgtttcaatgttcctaatgggttcgtttcagaagtgcctcactgttctcgtgacctggagttaaccggaacagcgtcttcattcatttctgttgggaccagacgcggagcctgggtgcgcgagccgccctccgggaggaaggcgcccggctgcgtctgcagaggcggggagaggaggcggcgagggtcccggggcgcgaggaaggcgcctgccctctcccagctcgcaggccccgggcccggccgcgcctccgcggggagagcaccccggcttcccgcgcgccctcaccaaaaggaccctacagcaaacgggtgtctttcgactctgcttgtagaaaccatttgcacatattctgtacgagcctcgctgtctccctagagccagggccctgcggatttggagaagggagcggggcaggacttccaggaggaccccaacccggcccggagagggaggaggaggcctccaggggcgcggagctctggggatgggcgtcgggccggcagtggtgcggctcactccgtccctgcccacctgcgacgggatcccccgaccggcacgggccacgccgagctcccggccagccgccggcccgcaggcagcgcgagggaggagctgcgccgccggctccgcccaaccaggtggtgctgagcttccgctgagcgctcttttgttttgtggtttgacacttttcttgacagcatgttgcagtttcttttcggttttggttttttttaaatgttttattttgctttcccagcgggaggggaggaagaagagtgtttacaaagtcctgtagccccctcacctttctgttttcacttttgccaatgtacatcgggtttggttttcttgtattatttaaacggttgtggtttcctttttccacggaggttcaatagaagccgctgcaggagagttttaccaaccattgtgtatgcccaataatttgttatcatttccttaggtagtaacctatttttgttctggtttggttcggttatctaatggaaaggtaactggcaatgcacttgatgtggtcttgcacatgtgggtgatagagttgggttcctttttatgctgggtgtacaggtgggtttgggagagaggagcatgcgcgagagagtctccgagtgtgtgcgacgcgtgtgtgtgtggtgggttgtctgtgtgcatatgtcctgcccgtgtatatgcacccacaccatgtgcccgtgcacaccagtgactacgcagtcccccctttctggtttagctgtgggaagatctgaatctggggccgtttgaaagcaaaaacaaaccactgtctctgcttctgaaacgggaatcagtaactctttgcattttctgtcccacaagatatgcaaaaacaatgcaataatattcatttaaaaatacaattgtgagttgtgttggcattaaaactgtattttaaaaaaagacagaaatttaagggaaaaacacaagaaggcattttgcttcaatatattccgtgtaatgttttattgcattgataatgtttctgttgaagaaaccgttatacttgaattcaggtcagtttcagtatttttcaaatatttttttaaaactgaattgcaattgtgccaagcgaatataatgaattgaattaagttggttttcggattcacttcttgtatattttgctgcatgtaaagtaaatcattttgtatttggagtgtgacaagctttacctttgaactcaagtgcttttctatatgtggttgggggaaagggaacaagttttctttagtttgcacaatgagcaaaggtatcaccagtgtagtcattattctgctctccacaaacaggtttggacattactgttttgcatatcttgtgtttgcttacatttccctcaatttttccaaaatcgtttgctgggtatgtttgtaccgcctcttgctgtgagagaccaggacctattttattccagtcttcactctgtccactctgctctggtcatctgatttggtacttctccaagaacagcccttcactgtgaggtgcagggaggcgttctgatgagccctcagtcactgggccgtcatccgcatcccccatggaagaggtagctggctttcccttcccttccaccacacggaattttctctttggcttccttaggaaagtgtacactaaccgggaggataaaattaaagtcaggctgcttggagggaggggcatcctcacttccggattcttgttgctctacccaacaaggacagcaggggctcgagaaaggaactggtgaaaccctgatccatctgaaagtcaactctgcgtgctcctttctccatcccttcctcactctggagcagcctttccttcaggcttgccctaatgtttgggctgccggggagggggccaggacaagggaagaggcatccggagctcacagtgggggtgggaacagatttttgtgggggcatctctaatgctcacttatatctccctagaacatcactcttttggtgctgtgtccttcaaatgtatgtcaacagtggtggctgaaaagggactgctttggggaaaacaggacccaaccattcacccagaattgacccattaaatctcttccagtcctagtgttccctgagcccctcttggcacatatataagtaagctagaaattacaataagggacagtccattcctctatgacagcttgctggactgattcatgacaaagtggagaaatgtactcaatactccccggttaacacagtctagaaacagagtttctttatggatatccacacccaagtcatccaaactttcttgattccttttcactgccatcaaggtcctctagaaattgagtttaggtatcatcctttgaaaagttcccaagatttctaccaggaggtacacacaggcgttccctgtctagggcaggaggactatcctagcttgaccttctgatccactagaataagactggcgtatgatgcctgtcatcagaacagactggcacaagtagtgacatcaatgaaccacagcacaatcttccaagtgatgtctactctccacctaaaatggaattttccccatgaccttgtaaaacataattgtcacatcttccatacccctcctgacagcccccaagtgtcaggagaaaacagtcaggggctaagggcccaagggacttgaagaaacaacagtttaaggtctgcagtttggtcaacttaattcttgtcctccgaccagccctgcctctttcatttccagaccttggagaatttttcccagctttgattcagaaggtactagttataacccctttccttcttcttaatccaataggcctcactctcactgggaaatccactcaaaggaacaaggcaatgtctctcattctatttcccagttccaaattccaggtgcttgtctggagtgaagctacccgttactttctcccagcttttctccacccagcatgtctcctgcccatgcagctgaagacagtggggcaacctcaggagaagcagacctttccatgcccaagttcatctcctgagcaacagtgacacctagaaaatgaggactttggaagtcacccaaaagatggtggctactttatggagtcctgaagatacacagccaccactcctaaaggcaaagaaagaaaacacgaatgtaggtcagggatagagtggaaccctggtcatcggggtttttagcctcatcgtgggaaaggtggtaaaggaggatgatggcatctccatccctagaggccaagaattgaaatatcattgtcaaggattagaaacaattcagcaaagaggccacaaaaagggcctgctgactcccagaagacctctttaaaccccaggggaggcaaatacttgctgatggagtctgggccgtttccatattttaaagaagacctgcctctggggcaaatgtcagcacagagaggactgggaggagaatggaggcaagaaaagggcatattttgactccctctgtgcctcttcccagttcatggaaggatgtgttcagcttacccacccacagtgaccagtgtggtggagccgctgacatctcaaggatctatttgggaaggtgagaagagtactcattccatctgggggtgttgttccagccacatcagcctacctggtgggatgtgggggtgtctgccaccctgtcccccctctgctgatgtccctcccctcaggctgtccaggtgccacctgacacaggctgctgtgcaaagacaggcggggaagcccaaacctcactcccagggaggccctcagccgccagagtccaggttctccagaggctacgatttgaggaggttgagggggaagacaggagggaaagaaaagtcctacaactgtcaggaatggggcacctttccctgtccctaagcaaagctccctcttcccactgccctccccagccccagctccctgtcctccccaacacctagtgagaaagacggtgcgtggaagggagtcccatgggcagatgcttacacgacctctttgtgaagcctcttctgggtttaacttcattcatcaatttattcttatgtcaaagcaatgaaacttttctttctggagccagataccaatacaacaggtgaacgggtttctgccacatctctacattgacgggggatgcttgaacaacccccctcactacacagacacacaccgttaaggcacaagggctggggttgagctctagatgagggactttcctgctcctgcaagggtgagcactgtatacacagacaaggagggtgcagtagagtgactcccttggatggaagtagtaccatcagaacctactattattatgacataaattctatttacatacattgagagaatactacaatcaacactttttcctgggatgactttaagaggtttgagccacagcacctgaagtggcaaagatccatggtctttgtagggtattagagaactcttccagtcacctctgaaagcactctagatcttgcagctgagtggatgaagtgtaacaaatctgttgcacgctgagaggagtcagaattagcatttttcatgaaagttccccacgtctctactaagaatgaggaagaaaagactaagactaggtaattacacagaggcttgaaatgttacatcaccagagccaagtcctctcccttcagatcagttactggctgctacacagggacacccccaccttttcagggcatcccatgcactccacttctcaggatctaaggaatttgactttgtagggatcccagaaagggcactgtgccacttcccctggtgtgaatcagacatacattgtacattcatttctaaaattcactcatgcacctcaaaccaaggtcattatccaaaaaaaaaaaaaaaaagctctgggtggaagagtttgtaagttttaagagagggtcatttctatgtgaggaaatgcagaaatggacagaatgattcttattcactgtttgggtctggagaattcccattgtggaaatcttagagatctcaagtttattaccaagggaataaggaaaaaaaggtgagcaggcaccaggccaagcagtggctcccttgccaaggaacctgaggctgcaggtttcagggacccccttgaagaaacctctcctggccattggccaggagaaaagagaagtctctcctgtagagtcacaagagaagcaaaagagggtgggtcactgggtcctggacatagcccccaaccccaagacttcccaatatggagaaactacaccaatgtttaaaaggggaaaaggaaagaacttgtacatcaagggaagatgatttgtaaacacacagtcctgtgcagaaagatccccttcaggaggtgtctccagcatcccaaagctgtgcgcaccttctcttttcctgcctcaggccacctatgcatccagctgcagcccatacccacacctgaaatccatctcttgaatcccagccaggttatataccaccccattgccatgtcctgtcctggccagaatgcatgctgttcccccaagcctcgtgggagtgaggccatgggaaacagagatgagcatgtctggacaagtctgtgatggtagtggatgagaataacccatggcaaaacacgcacattcattaagaaatagggcgacagattccccgttggtgaagcactgaaaggtctattactctcataatattgctgttttattttaatccaccagagctaccatgcaaaactttcctcctgtgaaacgctccagataaagctcctctaatctccccttccctcatgtcctccagctcaaacccaccttcatcccccaaaccaatctgtatcatgcctgttatcagagaggcacagaaagatgggcagtgcctccgttgtcaccattccccacacccctacacacccccacaccctcccctccaggctccacgacttcacagtcttactgttgtaaatatcattgtacagtttgtaatcctcaaataatcccattgtcagaggcctcgcctgatgggccttctcaccctcgagaaaggccagggaatctagaaggggcaacccttcaaggagagcttcagggtcatctctgtgtgagacactattgtatattcctgtaagattgcatttttatctaaggaatgatgttatttaaaaaacaaacaaaaaacacaaaaaataagaattgcaaataaatttcttaacaatgtct

SEQ ID NO: 46983 - DNA, 6417 bp, Artificial Sequence
  derived and/or modified sequence
atggtcaatgagaatacaagaatgtatatcccagaggagaatcaccagggatccaattatggttccccccgccctgcgcacgccaatatgaatgcgaacgcagccgccggactggctccggaacatatacccactccaggcgctgcgctgtcttggcaggcggccatagacgcggcgcggcaggccaagctcatggggagcgcggggaacgctacaatctccacagtcagctctactcagcgcaagaggcagcagtatggaaagcctaaaaagcagggctcaactaccgccaccaggccccctcgcgcactcctttgcctgacactgaaaaatcccatcaggagagcctgtatctctatagtggagtggaaacccttcgagatcattatactcctgaccatcttcgccaattgtgtggccctggccatctacatccctttccctgaggacgactctaatgctaccaactcaaatctggagcgggtggaatacctgtttcttattatcttcaccgttgaggcgttcctgaaagttatagcatatgggctattgtttcaccccaacgcctatctcagaaatggttggaatctactagacttcattatcgttgtggtggggctcttttccgcaatcctcgagcaggccacaaaggccgacggagccaacgcactgggcggaaagggtgcaggattcgatgtaaaggcactccgcgccttcagggtgctccgccccttacgcttagtatcaggcgttccttcactgcaggtggtgttgaattccatcatcaaggctatggtccctttgcttcacatcgcattgctggtgttatttgttatcatcatctacgccattatagggcttgaactattcatgggtaagatgcataagacttgctataaccaagaggggatcgccgatgtccctgctgaggacgatccatctccgtgcgctctggaaactggacatgggaggcagtgtcagaatggtaccgtttgcaaaccagggtgggacgggcccaagcacggcatcacaaacttcgacaattttgcattcgctatgcttacagtctttcagtgtatcactatggagggctggactgatgtcctttattgggtgaatgatgctgtgggaagagactggccatggatttactttgtcactttaatcatcattggatctttctttgtgctgaatctcgtgctcggagtgctttccggggagttcagcaaagagcgagagaaggccaaggccagaggagacttccagaagctgagagaaaagcagcagctggaagaggacttgaagggatatctggattggattacccaagccgaagatatcgaccccgagaatgaggacgaaggtatggacgaggagaagccacgaaatatgagtatgcctacttctgagactgagagtgtgaacaccgaaaacgtcgccggcggagatatcgagggggagaattgtggagcccgcctggcgcatagaatcagcaagtccaagttcagccggtactggcgcagatggaataggttttgtcgccgcaaatgtagagctgctgttaagtctaacgtgttctactggctagtgatcttcttagttttcctaaacacccttacgatagcctccgagcactacaatcagccaaactggctcactgaagtccaagacactgccaataaagccctcctggcactgtttactgccgagatgctgcttaagatgtactcgcttgggctacaggcttactttgtcagcctttttaaccggtttgattgttttgtggtgtgcggcggcattttggagacaattctggtcgaaacaaaaatcatgtcgcctctcggtatttccgtgcttcggtgtgtgaggctcttacggattttcaagatcacccgatactggaacagtctgtccaacttagtagccagcctactcaactccgtcagatctatagcatcgttgctgctgcttctatttctcttcataatcattttctccctcctcggaatgcaactgtttggaggaaagtttaatttcgatgagatgcagacgcgcaggtctacctttgacaatttcccacaatctctgctcaccgtcttccagatcctgaccggggaagattggaacagtgttatgtatgatgggataatggcatatggaggtccaagctttccagggatgctggtgtgcatctattttattattctgtttatctgtggaaactacatcttacttaatgtgttcctagctattgcggtcgataacctggccgacgcagaatccctcacctcagctcaaaaggaggaggaggaagaaaaagagaggaaaaaattagcgcgaacggcgtctcccgagaaaaaacaggaactcgtggagaaaccagcagtcggcgagtccaaggaagagaaaattgagctgaagagcatcacggcggacggtgagtctcctccagcgaccaagattaacatggatgacttgcagcctaacgaaaacgaagacaagagtccatatcccaatccggagacaacaggcgaggaggatgaggaagagccagagatgcccgtgggtcccagaccccggcctctcagcgagctgcaccttaaggaaaaagccgtgcctatgcccgaggcctcagccttctttattttctcaagtaataatcgctttagactacaatgccatcgtatagtcaacgatacaatcttcactaacctgattctttttttcatattactatctagtatctccctggctgccgaggacccagtccaacatacctcattcaggaaccacatactggggaacgctgattatgtttttacctccatcttcaccctcgaaattattctcaagatgactgcttacggcgcttttctgcacaaaggctccttttgccgaaactatttcaatatactcgacctcctggtggtgagtgtctccctgatttcgtttggcatacagtccagcgcgattaatgtagtaaagatcctgcgcgtcttgcgggtccttagacccctcagggccataaacagagctaagggcctgaagcacgtggtgcagtgcgttttcgtggcaataagaactatcggtaatatcgttatcgtcaccacactacttcagtttatgttcgcgtgcattggagtgcagcttttcaagggaaaattatacacctgctcggactcctccaaacagacggaggcagagtgtaaggggaactatatcacgtacaaggacggtgaggtcgaccatcccattatacagcccaggtcgtgggagaatagtaaattcgattttgataatgtgcttgcagctatgatggctctattcacggtgtctacctttgagggatggcccgaactgctttacaggtccattgacagtcacacagaggacaaaggccccatttacaattatagggtcgagatctcaatcttcttcatcatctatattatcataattgcttttttcatgatgaatatcttcgtcggattcgtgatcgttacctttcaagagcagggcgagcaggagtataaaaattgtgaactggataaaaaccagaggcagtgcgtggagtatgctctaaaagccaggccattaaggagatatatccccaagaaccagcaccagtacaaggtgtggtacgttgtcaatagcacttatttcgaatacttaatgttcgtgctgatccttcttaatacaatctgcttggccatgcagcactacggacagtcgtgtcttttcaaaatcgccatgaacattctcaacatgctctttacaggcctgtttacggtcgaaatgattttgaagctgatcgcattcaagcccaagggctacttctctgacccttggaacgtatttgattttttgattgtcataggaagcattatcgatgtgatccttagcgagacgaaccccgccgagcacacccagtgtagtccctccatgaatgctgaggagaatagtcgaatttcaataacattttttcgcttgtttagggttatgaggcttgtcaaactgctttcccggggggagggtatcaggactctcctctggactttcatcaaatcctttcaggccctgccgtacgtggctctgttgatcgttatgcttttctttatttatgcagtaatcggtatgcaggtgtttggtaaaatcgcccttaatgatacaactgagatcaatcgaaacaataattttcagaccttcccacaggcagtcctcttgctgtttcggtgcgctaccggcgaggcatggcaggatatcatgctggcatgtatgcccggaaagaaatgtgcccccgagagcgagcctagtaattccaccgagggcgaaacaccctgcggatcttctttcgccgttttctactttatcagtttctatatgctctgtgccttcttgattattaacctgttcgtggcagtgatcatggacaactttgattaccttacaagagactggtcaatcctgggccctcaccatttggacgagtttaaacgcatctgggcagagtacgaccccgaggccaaaggcagaataaagcacttggatgtggtgaccctcttgcgccgaattcagccacctctcggattcggaaagctgtgtccccacagggtcgcctgcaagcgcttggtaagtatgaacatgccactcaatagcgacgggaccgtaatgtttaatgcaacccttttcgctctagttcgaactgccttaagaatcaagaccgaaggcaatctggagcaggccaacgaagagttaagggctataatcaaaaaaatctggaagagaaccagcatgaagctgctcgatcaggtcgtgcccccagccggtgatgatgaggtgaccgtcgggaagttctacgctacgttcttgatccaggaatattttagaaagttcaagaaacggaaggagcaggggctcgtagggaaaccaagccaacgcaatgcactttccctccaggctggcctgaggaccctgcacgatatcgggcccgaaatcaggagagcaatttccggagatttgacagctgaggaggaactcgataaggccatgaaagaggccgtttctgccgctagcgaagacgacatattccgccgggctggcgggcttttcggaaatcacgtatcttactaccaatctgacggccgatctgcctttccccagacatttactacccagcgcccactccatataaataaagctggaagctcccagggcgacacagaatcaccatcccatgaaaagctagtggactccacatttaccccatcttcatattcatcgacaggctctaatgccaatataaacaatgctaacaacaccgctctcggacggctacctcgccccgccggctaccccagcactgtctctaccgttgaaggtcatgggcccccgctaagcccagccatcagggttcaggaagtggcgtggaaattatcatcaaaccgctgccacagccgagaaagccaggctgctatggcaggccaggaagaaacaagccaggatgagacctatgaggtgaaaatgaatcacgacactgaagcatgctccgagccctccttgctttcaaccgagatgttaagttatcaggatgacgaaaatagacaactcacactccctgaagaggacaaacgagacattcggcagtctccaaagcgagggtttttgagatccgcttctctgggtcgtcgagcatccttccacctggagtgtctgaaaaggcaaaaagatcgaggtggcgatatatctcagaagactgtcctgcctttgcacttagtgcaccaccaagcgctcgctgtggcaggcctgtcgcccctcctgcaacggtcccatagtcctgcatccttccctagaccattcgccacccctcccgccactcctgggtctcggggatggcccccacaaccagtgcctacactgcgcctggaaggggtggagagctcagagaagctgaattcatcttttcccagtattcattgtgggagctgggccgaaacaacgcccgggggaggcggctcttctgccgcccgccgtgtgcgccccgtcagtcttatggtgccatcgcaagccggagcacccggacgacagtttcacggtagcgccagctctctggttgaagccgtacttatcagtgaagggctgggacagtttgcgcaggacccaaagttcatcgaggtaactactcaagaactcgctgacgcatgtgacatgacaattgaagaaatggaaagcgccgccgacaacatcctgagcggaggcgccccccagtcacctaatggtgccctcctaccttttgttaattgccgggacgccggccaagaccgcgccggaggcgaagaagacgctggatgcgtccgcgcgagagggcgcccatccgaggaggagcttcaggacagcagggtttatgtgagctctctttag

SEQ ID NO: 46984 - DNA, 3840 bp, Artificial Sequence
  derived and/or modified sequence
atggtcaatgagaatactaggatgtacattccggaggagaaccaccagggcagcaattacggttcaccccgcccagctcatgccaatatgaacgcgaatgccgcggccggactggcccctgagcatatccctacgcctggagcagctctctcttggcaggcagctattgatgctgctaggcaggccaaactgatggggtctgcaggaaatgcgaccatctctaccgtgtcttccacacagcggaagcggcagcagtatggcaagcccaaaaagcagggaagtactacagccaccagaccacccagagcacttctctgccttaccttgaagaaccctataaggagggcttgcatcagcatagtggagtggaaaccgttcgaaatcatcattcttctgacaattttcgccaactgtgtggcgctggccatttacatccccttcccagaagacgacagcaatgccaccaatagtaacttggagcgtgtcgaatatttgttcttaatcatctttaccgtggaggcctttcttaaggtcatcgcgtacgggctcctgtttcacccaaacgcatacctgcggaacggatggaatctactggacttcattatcgtcgtcgtgggactgttcagtgccatattagaacaggccactaaggctgatggtgctaacgctctcggcgggaagggtgccggattcgacgtaaaagccctcagagccttccgcgtgctaaggccactgaggctagtttctggtgtgccctcccttcaggtggttttaaacagtatcattaaggctatggtaccattgctccacatagcactcctggtcctgtttgtcattatcatttatgccataattggcttagagctgttcatgggaaaaatgcacaagacatgctacaatcaggagggaatcgcagacgtgcctgctgaggatgacccatctccctgtgccttggaaacaggacacggtagacaatgccaaaacggaacagtctgtaagccagggtgggacggccccaaacatggtattacgaactttgacaacttcgccttcgccatgctgaccgttttccagtgcattacaatggaagggtggaccgacgtcctttactgggtgaacgacgcagtgggcagagattggccatggatctacttcgttactctgattattataggatccttcttcgtgctcaacttagtgttaggggtcctctctggtgaatttagtaaggaacgggagaaggctaaggctcgcggcgattttcaaaaactgcgggaaaagcagcagcttgaagaggacctgaagggatatctagattggattactcaagcggaagatattgacccggaaaacgaggacgagggcatggacgaggagaaacctcgcaatatgtccatgccgacgtctgaaaccgaatctgtgaatacagagaatgtagccggcggcgacatcgagggcgagaactgcggggcaagactggctcacagaattagtaagtccaagttttccagatactggcgacgttggaaccgattttgcagaaggaagtgtcgggcagccgtaaaatctaatgtgttctattggctggtgatctttctggtgttcctaaatactcttaccatcgcctctgaacattacaatcagcccaattggctgactgaggtccaggacacggctaacaaagccctgctcgccctttttacggccgaaatgctgcttaaaatgtattcactagggcttcaggcctacttcgtgagtctgttcaatcgatttgactgcttcgtggtgtgcgggggcatcctcgaaaccatactggtggagacgaagatcatgagcccactaggtatctctgtgctccgctgtgttcgccttctacgcattttcaaaattacccggtattggaactccctcagcaatcttgtagccagtcttctgaattcagtgcggagcatcgccagcctactcttacttttgttcctgtttattatcatttttagtctgctgggaatgcaactgttcggtggtaagttcaactttgacgagatgcaaacccgacggagcaccttcgacaactttccccagtcactcctgaccgtgtttcagatacttaccggcgaagattggaatagcgtaatgtatgacggtataatggcctacggagggcctagcttcccgggaatgctggtttgtatttactttattatcctgttcatatgtggaaactatatccttttgaacgtctttttagccattgcagtggacaacctcgcagacgccgagagtctcacaagcgcccaaaaggaagaggaagaggaaaaagaaaggaagaaactcgcccgtacagcctctccagaaaagaaacaggagctggttgaaaagcccgctgtcggagagtcaaaggaggaaaagatcgaactgaagtctatcaccgccgacggggaatcacccccagctaccaagattaatatggatgaccttcaaccaaacgaaaatgaggataagtctccatatcctaatccagagaccacgggcgaagaagacgaggaagagccggaaatgcctgtcggacctcgtccgcggccgctgagcgagttgcacctgaaagaaaaggctgtgccaatgccagaagctagcgcgttctttatttttagtagcaacaatcgattccgactccaatgtcatcggatcgtgaatgacaccatttttaccaatctcattttgtttttcatcctcctgtcgtcaatctccttggctgcggaggatcccgtgcagcatacctcatttcgaaaccacattctggggaacgctgactatgtttttaccagcatcttcaccctggaaattatcctcaaaatgacggcgtacggagctttcttgcataagggctccttctgccggaactattttaatattctagacctgcttgtggtgtcagttagcttgattagttttggaatccaatcctccgctataaacgtcgtaaagattctgcgggtcctgcgggtcctgcgtcccctgcgggctattaatagggcaaagggattgaagcacgtggttcagtgtgtcttcgtggcaattaggacaataggcaacatcgttatcgttacaacgctgctgcaattcatgttcgcttgtataggtgttcagttgtttaagggtaagctgtacacctgttctgacagctccaaacaaactgaagctgaatgtaaaggcaattacattacatataaggacggcgaagtggaccatccgatcatacaacccaggagctgggagaattcaaaattcgactttgacaatgtgctcgccgccatgatggccctgttcactgtcagcacattcgaaggatggcctgaactgttatacagaagcatagacagccataccgaggataaggggcccatctacaattaccgggtggaaatctcgatctttttcataatatacattatcatcatcgccttttttatgatgaacatctttgtaggtttcgttattgttaccttccaggagcagggggagcaggaatacaagaattgtgaactcgacaagaatcagcgacagtgcgtggagtatgccctcaaggctagacccctgcgcagatatattccaaaaaatcagcaccagtacaaagtatggtatgtggtgaatagcacctactttgagtatcttatgtttgtgcttattttgctcaacacaatatgcctcgcgatgcaacattacggccagagctgtctatttaaaatcgccatgaacattctgaacatgctgttcaccggcctattcactgttgagatgattctgaagctgatcgcctttaagcccaaagtaggactatag

SEQ ID NO: 46985 - DNA, 6417 bp, Artificial Sequence
  derived and/or modified sequence
atggtgaatgaaaacaccaggatgtacatccctgaggagaaccaccagggcagcaactacggcagccccaggcctgcccacgccaacatgaatgccaatgctgctgctggcctggcccctgagcacatccccacccctggggccgccctgtcctggcaggccgccattgatgctgcccggcaggccaagctgatgggcagcgctggaaatgccaccatcagcacagtgagcagcacccagaggaagaggcagcagtatggcaagcccaagaagcagggcagcaccacagccacccggcccccccgggccctgctgtgcctgaccctgaagaaccccatccggcgggcctgcatcagcatcgtggagtggaagccctttgagatcatcatcctgctgaccatctttgccaactgtgtggccctggccatctacatccccttcccagaagatgacagcaatgccaccaacagcaacctggagcgggtggagtacctgttcctgatcatcttcaccgtggaggccttcctgaaggtgattgcctacggcctgctcttccaccccaatgcctacctgagaaatggctggaacctgctggacttcatcatcgtggtggtgggcctcttcagcgccatcctggagcaggccaccaaggcagatggagccaatgccctgggcggcaaaggagctggctttgatgtgaaggccctgcgggccttccgggtgctgcggcccctgcggctggtgtctggagtgcccagcctgcaggtggtgctgaacagcatcatcaaggccatggtgcccctgctgcacatcgccctgctggtgctgtttgtgatcatcatctatgccatcatcggcctggagctgttcatgggcaagatgcacaagacctgctacaaccaggagggcattgctgatgtgcctgcagaagatgaccccagcccctgtgccctggagaccggccacggccggcagtgccagaatggcaccgtgtgcaagccaggctgggatggccccaagcacggcatcaccaactttgacaactttgcctttgccatgctgactgtgttccagtgcatcaccatggagggctggacagatgtgctgtactgggtgaatgatgctgtgggccgggactggccctggatctactttgtgaccctcatcatcatcggcagcttctttgtgctgaacctggtgctgggcgtgctgtctggagagttcagcaaggagcgggagaaggccaaggcccggggggacttccagaagctgcgggagaagcagcagctggaggaggacctgaagggctacctggactggatcacccaggctgaagatattgatcctgaaaatgaagatgagggcatggatgaggagaagcccaggaacatgtccatgcccaccagcgagacagaatctgtgaacacagaaaatgtggccggcggggacatcgagggggagaactgtggggcccggctggcccaccgcatcagcaagagcaagttcagccgctactggaggcgctggaaccgcttctgcaggaggaagtgcagagctgctgtgaagagcaatgtgttctactggctggtgatcttcctggtgttcctgaacaccctgaccatcgccagcgagcactacaaccagcccaactggctgacagaggtgcaggacacagccaacaaggccctgctggccctcttcaccgctgagatgctgctgaagatgtacagcctgggcctgcaggcctactttgtgtccctcttcaacagatttgactgctttgtggtgtgtggcggcatcctggagaccatcctggtggagaccaagatcatgagccccctgggcatctctgtgctgcgctgtgtgcggctgctgcgcatcttcaagatcacccgctactggaacagcctgagcaacctggtggccagcctgctgaacagcgtgcgcagcatcgccagcctgctgctgctgctcttcctgttcatcatcatcttcagcctgctgggcatgcagctgtttggaggcaagttcaactttgatgagatgcagaccaggaggagcacctttgacaacttcccccagagcctgctgaccgtcttccagatcctgaccggggaggactggaacagcgtgatgtatgatggcatcatggcctatggaggccccagcttccctggcatgctggtgtgcatctacttcatcatcctcttcatctgtggcaactacatcctgctgaatgtgttcctggccatcgctgtggacaacctggctgatgctgagagcctgaccagcgcccagaaggaggaggaggaggagaaggagaggaagaagctggccaggacagccagccctgagaagaagcaggagctggtggagaagccagctgtgggggagagcaaggaggagaagattgagctgaagagcatcacagcagatggagagagccccccagccaccaagatcaacatggatgacctgcagcccaatgaaaatgaagacaagagcccctaccccaaccctgagaccactggagaggaggatgaggaggagcctgagatgcctgtgggcccccggccccggcccctgtctgagctgcacctgaaggagaaggctgtgcccatgcctgaggccagcgccttcttcatcttcagcagcaacaaccgcttccggctgcagtgccaccgcatcgtgaatgacaccatcttcaccaacctgatcctcttcttcatcctgctgagcagcatcagcctggccgctgaggaccctgtgcagcacaccagcttcaggaaccacatcctgggcaatgctgactatgtgttcaccagcatcttcaccctggagatcatcctgaagatgacagcctatggagccttcctgcacaagggcagcttctgcaggaactacttcaacatcctggacctgctggtggtgtctgtgtccctcatcagctttggcatccagagcagcgccatcaacgtggtgaagatcctgcgggtgctgcgggtgctgcggcccctgcgggccatcaacagagccaagggcctgaagcacgtggtgcagtgtgtgtttgtggccatccgcaccatcggcaacatcgtcatcgtgaccaccctgctgcagttcatgtttgcctgcatcggcgtgcagctgttcaagggcaagctgtacacctgcagcgacagcagcaagcagacagaagctgagtgcaagggcaactacatcacctacaaggatggagaggtggaccaccccatcatccagcccaggtcctgggagaacagcaagtttgattttgacaacgtgctggccgccatgatggccctcttcaccgtgtccacctttgagggctggccagagctgctgtaccgcagcattgacagccacacagaggacaagggccccatctacaactacagagtggagatcagcatcttcttcatcatctacatcatcatcatcgccttcttcatgatgaacatctttgtgggcttcgtcatcgtgaccttccaggagcagggcgagcaggagtacaagaactgtgagctggacaagaaccagaggcagtgtgtggagtatgccctgaaggcccggcccctgcggcgctacatccccaagaaccagcaccagtacaaggtgtggtacgtggtgaacagcacctactttgagtacctgatgtttgtgctgatcctgctgaacaccatctgcctggccatgcagcactacggccagagctgcctcttcaagatcgccatgaacatcctgaacatgctgttcaccggcctcttcaccgtggagatgatcctgaagctgattgccttcaagcccaagggctacttcagtgacccctggaatgtgtttgacttcctgattgtcatcggcagcatcattgatgtgatcctgtctgagaccaacccagctgagcacacccagtgcagccccagcatgaatgctgaggagaacagccgcatcagcatcaccttcttccgcctcttccgggtgatgaggctggtgaagctgctgagcagaggagagggcatccgcaccctgctgtggaccttcatcaagagcttccaggccctgccctacgtggccctgctgattgtgatgctgttcttcatctatgctgtgattggcatgcaggtgtttgggaagatcgccctgaatgacaccacagagatcaacagaaacaacaacttccagaccttcccccaggccgtgctgctgctcttccgctgtgccaccggggaggcctggcaggacatcatgctggcctgcatgcctgggaagaagtgtgcccctgagagcgagcccagcaacagcacagaaggagagaccccctgtggcagcagctttgctgtgttctacttcatctccttctacatgctgtgtgccttcctgatcatcaacctgtttgtggccgtcatcatggacaactttgactacctgacccgggactggagcatcctgggcccccaccacctggatgagttcaagaggatctgggccgagtatgaccctgaggccaagggccgcatcaagcacctggatgtggtgaccctgctgcggcgcatccagccccccctgggctttgggaagctgtgcccccaccgggtggcctgcaagaggctggtgtccatgaacatgcccctgaacagtgatggcaccgtgatgtttaatgccaccctgtttgccctggtgaggacagccctgcgcatcaagacagagggcaacctggagcaggccaatgaggagctgcgggccatcatcaagaagatctggaagaggacctccatgaagctgctggaccaggtggtgcccccagctggagatgatgaggtgacagtgggcaagttctacgccaccttcctgatccaggagtacttcaggaagttcaagaagaggaaggagcagggcctggtgggcaagcccagccagagaaatgccctgagcctgcaggccggcctgcggaccctgcatgacatcggccctgagatccggcgggccatcagcggggacctgacagctgaggaggagctggacaaggccatgaaggaggccgtgtctgctgcctctgaagatgacatcttcagaagagctgggggcctgtttggaaaccacgtgtcctactaccagagtgatggccgcagcgccttcccccagaccttcaccacccagaggcccctgcacatcaacaaggccggcagcagccagggcgacacagagagccccagccatgagaagctggtggacagcaccttcacccccagcagctacagcagcacaggcagcaatgccaacatcaacaatgccaacaacacagccctgggccgcctgcccaggcctgctggctaccccagcacagtgtccacagtggagggccacggcccccccctgagccctgccatccgggtgcaggaggtggcctggaagctgagcagcaaccgctgccacagccgggagagccaggccgccatggccggccaggaggagaccagccaggatgagacctatgaggtgaagatgaaccacgacacagaggcctgcagcgagcccagcctgctgagcacagagatgctgagctaccaggatgatgaaaatcggcagctgaccctgcctgaggaggacaagagggacatccggcagagccccaagaggggcttcctgcggagcgccagcctgggcagaagagccagcttccacctggagtgcctgaagaggcagaaggacagaggaggagacatcagccagaagacagtgctgcccctgcacctggtgcaccaccaggccctggccgtggccggcctgagccccctgctgcagaggagccacagccctgccagcttcccccggccctttgccaccccaccagccaccccaggcagccggggctggccaccccagcctgtgcccaccctgcggctggagggcgtggagagcagcgagaagctgaacagcagcttccccagcatccactgcggctcctgggccgagaccacccctgggggcggcggcagcagcgctgccaggagagtgcggcctgtgtccctgatggtgcccagccaggccggggcccctggccggcagttccacggcagcgccagcagcctggtggaggccgtgctgatcagcgagggcctgggccagtttgcccaggaccccaagttcatcgaggtgaccacccaggagctggctgatgcctgtgacatgaccatcgaggagatggagagcgctgctgacaacatcctgtctggaggagccccccagagccccaatggagccctgctgccctttgtgaactgcagagatgctggccaggaccgggccggcggggaggaggatgctggctgtgtgcgggcccggggccggcccagcgaggaggagctgcaggacagccgggtgtatgtgagcagcctgtag

SEQ ID NO: 46986 - DNA, 3840 bp, Artificial Sequence
  derived and/or modified sequence
atggtgaatgaaaacaccaggatgtacatccctgaggagaaccaccagggcagcaactacggcagccccaggcctgcccacgccaacatgaatgccaatgctgctgctggcctggcccctgagcacatccccacccctggggccgccctgtcctggcaggccgccattgatgctgcccggcaggccaagctgatgggcagcgctggaaatgccaccatcagcacagtgagcagcacccagaggaagaggcagcagtatggcaagcccaagaagcagggcagcaccacagccacccggcccccccgggccctgctgtgcctgaccctgaagaaccccatccggcgggcctgcatcagcatcgtggagtggaagccctttgagatcatcatcctgctgaccatctttgccaactgtgtggccctggccatctacatccccttcccagaagatgacagcaatgccaccaacagcaacctggagcgggtggagtacctgttcctgatcatcttcaccgtggaggccttcctgaaggtgattgcctacggcctgctcttccaccccaatgcctacctgagaaatggctggaacctgctggacttcatcatcgtggtggtgggcctcttcagcgccatcctggagcaggccaccaaggcagatggagccaatgccctgggcggcaaaggagctggctttgatgtgaaggccctgcgggccttccgggtgctgcggcccctgcggctggtgtctggagtgcccagcctgcaggtggtgctgaacagcatcatcaaggccatggtgcccctgctgcacatcgccctgctggtgctgtttgtgatcatcatctatgccatcatcggcctggagctgttcatgggcaagatgcacaagacctgctacaaccaggagggcattgctgatgtgcctgcagaagatgaccccagcccctgtgccctggagaccggccacggccggcagtgccagaatggcaccgtgtgcaagccaggctgggatggccccaagcacggcatcaccaactttgacaactttgcctttgccatgctgactgtgttccagtgcatcaccatggagggctggacagatgtgctgtactgggtgaatgatgctgtgggccgggactggccctggatctactttgtgaccctcatcatcatcggcagcttctttgtgctgaacctggtgctgggcgtgctgtctggagagttcagcaaggagcgggagaaggccaaggcccggggggacttccagaagctgcgggagaagcagcagctggaggaggacctgaagggctacctggactggatcacccaggctgaagatattgatcctgaaaatgaagatgagggcatggatgaggagaagcccaggaacatgtccatgcccaccagcgagacagaatctgtgaacacagaaaatgtggccggcggggacatcgagggggagaactgtggggcccggctggcccaccgcatcagcaagagcaagttcagccgctactggaggcgctggaaccgcttctgcaggaggaagtgcagagctgctgtgaagagcaatgtgttctactggctggtgatcttcctggtgttcctgaacaccctgaccatcgccagcgagcactacaaccagcccaactggctgacagaggtgcaggacacagccaacaaggccctgctggccctcttcaccgctgagatgctgctgaagatgtacagcctgggcctgcaggcctactttgtgtccctcttcaacagatttgactgctttgtggtgtgtggcggcatcctggagaccatcctggtggagaccaagatcatgagccccctgggcatctctgtgctgcgctgtgtgcggctgctgcgcatcttcaagatcacccgctactggaacagcctgagcaacctggtggccagcctgctgaacagcgtgcgcagcatcgccagcctgctgctgctgctcttcctgttcatcatcatcttcagcctgctgggcatgcagctgtttggaggcaagttcaactttgatgagatgcagaccaggaggagcacctttgacaacttcccccagagcctgctgaccgtcttccagatcctgaccggggaggactggaacagcgtgatgtatgatggcatcatggcctatggaggccccagcttccctggcatgctggtgtgcatctacttcatcatcctcttcatctgtggcaactacatcctgctgaatgtgttcctggccatcgctgtggacaacctggctgatgctgagagcctgaccagcgcccagaaggaggaggaggaggagaaggagaggaagaagctggccaggacagccagccctgagaagaagcaggagctggtggagaagccagctgtgggggagagcaaggaggagaagattgagctgaagagcatcacagcagatggagagagccccccagccaccaagatcaacatggatgacctgcagcccaatgaaaatgaagacaagagcccctaccccaaccctgagaccactggagaggaggatgaggaggagcctgagatgcctgtgggcccccggccccggcccctgtctgagctgcacctgaaggagaaggctgtgcccatgcctgaggccagcgccttcttcatcttcagcagcaacaaccgcttccggctgcagtgccaccgcatcgtgaatgacaccatcttcaccaacctgatcctcttcttcatcctgctgagcagcatcagcctggccgctgaggaccctgtgcagcacaccagcttcaggaaccacatcctgggcaatgctgactatgtgttcaccagcatcttcaccctggagatcatcctgaagatgacagcctatggagccttcctgcacaagggcagcttctgcaggaactacttcaacatcctggacctgctggtggtgtctgtgtccctcatcagctttggcatccagagcagcgccatcaacgtggtgaagatcctgcgggtgctgcgggtgctgcggcccctgcgggccatcaacagagccaagggcctgaagcacgtggtgcagtgtgtgtttgtggccatccgcaccatcggcaacatcgtcatcgtgaccaccctgctgcagttcatgtttgcctgcatcggcgtgcagctgttcaagggcaagctgtacacctgcagcgacagcagcaagcagacagaagctgagtgcaagggcaactacatcacctacaaggatggagaggtggaccaccccatcatccagcccaggtcctgggagaacagcaagtttgattttgacaacgtgctggccgccatgatggccctcttcaccgtgtccacctttgagggctggccagagctgctgtaccgcagcattgacagccacacagaggacaagggccccatctacaactacagagtggagatcagcatcttcttcatcatctacatcatcatcatcgccttcttcatgatgaacatctttgtgggcttcgtcatcgtgaccttccaggagcagggcgagcaggagtacaagaactgtgagctggacaagaaccagaggcagtgtgtggagtatgccctgaaggcccggcccctgcggcgctacatccccaagaaccagcaccagtacaaggtgtggtacgtggtgaacagcacctactttgagtacctgatgtttgtgctgatcctgctgaacaccatctgcctggccatgcagcactacggccagagctgcctcttcaagatcgccatgaacatcctgaacatgctgttcaccggcctcttcaccgtggagatgatcctgaagctgattgccttcaagcccaaggtgggcctgtag

SEQ ID NO: 46987 - DNA, 6417 bp, Artificial Sequence
  derived and/or modified sequence
atggtgaacgagaacacccggatgtacatccccgaggagaaccaccaaggttcaaattacggaagtccaaggcccgctcacgcaaacatgaatgccaacgctgcagctgggctggcccccgagcatatcccaactccgggcgcagcactctcttggcaggctgctatcgacgcggcgcgacaggcaaagttgatgggaagcgccggtaacgcaacaatctccaccgtcagctctacccagcgaaagaggcagcagtacgggaaacccaagaaacaaggaagcactactgctacccggccccccagggcattactctgccttacactgaagaatcctataaggcgggcctgcatttccatcgtggaatggaaacctttcgagatcattatcttgctgacaatttttgcgaattgcgtcgctctggcaatttatattccgtttcccgaggatgatagtaatgccactaactcaaacctcgagagagttgaatatctgtttctcataatcttcactgtcgaggccttcctcaaggtgatagcatacggcctgttgtttcatccaaacgcatatctgagaaatggctggaacctactggactttatcatcgtggtggtagggctttttagtgccatcctggagcaggcaacgaaagctgacggtgctaacgctctgggcggaaaaggtgccgggttcgacgtaaaagcgctgagagcatttcgcgtcctgcgcccactacggctggtgagtggcgtcccgagtctgcaggtggtgcttaattccataatcaaggccatggtgcctttgttgcatatcgcgctactcgtgctatttgtgatcattatttatgctatcattggtttagagcttttcatgggaaagatgcacaaaacctgctacaatcaggagggcatcgcagatgtgccagccgaagatgacccatcgccgtgcgccctggaaacgggacacggccggcagtgccagaatggtaccgtttgcaaaccagggtgggatggcccaaaacacgggattacgaattttgacaacttcgcgtttgctatgctaacagtattccaatgtattaccatggagggatggaccgacgtcctgtactgggtgaacgatgcagtcggacgagattggccctggatatatttcgtgaccctaataatcattgggtcattcttcgtgttaaatcttgtgcttggggttctgtccggagaattttctaaagagcgcgagaaggctaaggccagaggagacttccagaagctgcgtgagaagcagcagctagaagaagacctgaagggctacctcgattggattacacaggcagaagatatcgacccagaaaacgaggatgagggtatggatgaggagaagcccagaaatatgtccatgcctacttctgaaactgagtccgtgaatacagagaacgttgccggcggagatatcgagggcgagaactgcggcgccagactggcacatcgcattagtaagagcaagttttcacggtactggcgcaggtggaaccgcttttgtaggcggaagtgtagagctgcagtcaaatctaacgtgttttactggctggtcattttccttgtgttcctcaatactcttacaatcgcgagtgaacactataatcagccaaattggttaacagaagttcaggacaccgccaacaaagcgctcctggcccttttcacggccgaaatgctcctgaaaatgtactccctcggtctccaagcttatttcgtgtccttgttcaataggtttgattgcttcgtcgtgtgcggcggcatactggaaactattctggtggagaccaaaattatgtcccctctgggaatttcagtgttgcgctgtgtgagactgctgagaattttcaagattacgcggtactggaattctttgtctaacctcgtcgccagcctgctgaactctgttcggagtatagcttcgcttctcctactgctgtttctgtttattattattttttctttactaggcatgcaactgtttggagggaaattcaatttcgacgagatgcagacacggaggtctaccttcgataactttccccaatccctgctgacggtgtttcaaatcctgacaggtgaggattggaattccgtaatgtatgatggcatcatggcttatgggggcccaagctttcccggtatgctggtttgcatctactttatcattctttttatctgcggcaactacattctgcttaacgtgtttttggctatcgctgtcgataaccttgccgacgcagaaagccttaccagtgcccaaaaagaagaggaggaagaaaaagagaggaagaaactagctcgaacagcttcccccgaaaaaaagcaggaacttgtcgagaagccagccgttggagagagtaaagaggaaaaaattgagctgaagagtattacagcagatggagaaagtcctccagcaacgaaaataaatatggacgacctccagcccaatgagaatgaagacaaaagcccctatccgaatcctgagaccaccggggaggaggatgaggaagagcctgaaatgcccgtggggccgagacctcgccccttgagtgagctgcacctcaaggaaaaggcagtgcctatgcccgaggcctcggccttctttattttcagctccaataaccggtttcgccttcagtgccacagaattgtgaatgatacaattttcacaaatctgatcctgttctttatcctgctcagttcaatcagcctggctgccgaggaccccgttcaacacacgtcctttcgcaaccatattctgggtaacgccgactatgtttttacaagcatatttaccctcgagataatcctgaaaatgactgcctacggggcctttctccataagggtagcttttgtcgtaactacttcaatatcctggacctcttggtagtcagtgtatcacttatcagcttcggcatccagagttctgctatcaatgtagtcaaaatattacgggtactgcgcgtgctgcgtcccttaagagctattaaccgagctaaaggactgaaacatgtggtacaatgcgtttttgtggcgatccgaaccatcgggaatattgtgattgtgacaaccttactgcagttcatgtttgcatgtatcggcgtgcagctgttcaagggtaaactgtatacctgttctgacagcagtaaacagaccgaagccgagtgtaagggcaactatatcacctacaaggacggcgaagtggatcaccccatcatccaaccaaggtcatgggagaattctaagttcgactttgataacgttttagccgctatgatggcactgttcacagtgagtacttttgaagggtggcctgaactcctgtatcggtctatcgactcccatactgaagacaagggccctatttacaactatagagttgaaatctctatatttttcatcatctacattattatcattgctttctttatgatgaacattttcgtgggcttcgttatcgtcacattccaggagcagggcgagcaagagtacaagaactgcgagctggacaaaaatcagcgccagtgcgtggagtatgccttaaaggcccgtcccctccgaaggtacatcccaaagaatcaacatcagtacaaggtttggtatgtcgtgaactcaacctacttcgagtacctcatgtttgttctaatcttgttaaataccatatgcctcgccatgcagcactatggacagagctgcctctttaagattgccatgaatattttgaacatgctgttcacggggctgtttactgtagaaatgattctgaagcttattgctttcaagcccaagggctacttctctgatccttggaatgtatttgacttccttattgtgattggctctatcattgacgtcatattgagtgagactaaccccgccgagcacacgcagtgctctccatccatgaatgccgaggagaacagccgcatctctatcactttcttccggttgtttcgagttatgcgcctggtcaagcttctcagcagaggcgaagggattagaacgctgctgtggacttttattaagtcatttcaggccctgccgtatgtagctttgctgattgttatgctgtttttcatctatgccgtgattggcatgcaagtcttcggcaagatagccttaaatgacaccactgagatcaaccgcaataataactttcagacctttccccaggccgtgctgctcctattccgctgcgcgactggtgaggcttggcaagacatcatgcttgcgtgcatgccagggaaaaaatgcgcgcccgagagcgagcccagcaattctactgaaggggaaaccccctgtggttctagcttcgcagttttctactttatcagcttttatatgctgtgcgctttcctgattattaatctgtttgtggctgtgattatggataattttgattacctgacccgcgactggagcatccttggtccgcaccacttggatgaattcaagagaatttgggctgagtacgaccctgaagcaaaaggccggatcaagcacctcgatgtagtgacattgctgcggaggattcagccacccctgggattcgggaaattatgtccgcacagagttgcctgtaaaagactggtgtctatgaacatgcctcttaactctgatggcaccgtcatgttcaacgcaaccctgttcgctctggtgcgcaccgcactccggatcaaaaccgagggtaatctagaacaagccaacgaggaactgcgggctataatcaagaagatctggaaacgcacctcgatgaagctgctcgatcaagtcgtgcctcccgccggggatgacgaggtaactgtgggaaagttctatgcaacatttctgattcaggaatacttccgaaagtttaagaagaggaaggaacagggtctcgttggcaagccaagtcaacgaaacgcactgtcgctgcaggccggactaaggacgctgcacgacataggtcccgaaattcgcagggctatatctggggacctgacagcagaggaggagctcgacaaggctatgaaagaggccgtgtccgcagcctcggaggatgacatctttcggcgggccgggggcctattcggcaatcacgtgtcatattatcagagtgacggtcgctctgctttccctcagactttcaccacacagcggcctctgcacattaacaaggccggcagcagccagggtgatactgagagcccaagccacgagaagctggtggattcaactttcactcctagttcatacagctctacaggtagtaacgccaacattaacaatgcaaacaacaccgccctgggtcgcctcccacggccagctgggtacccttccactgtaagcaccgtggagggacatggaccgcctctgagtccggccatccgggtgcaggaggtcgcgtggaagttaagctccaataggtgccattcaagggagtcacaggccgcaatggctggacaagaagaaacgagccaagatgagacctacgaagtcaagatgaatcatgataccgaagcctgctcagagccctcattactgagtaccgagatgctttcctaccaggatgacgagaatagacaactcacactgccagaagaagataagcgcgatatccgacaaagtcctaagcggggttttctgcggagcgccagtctgggacggcgggcatcatttcatttagagtgcctcaagaggcaaaaagacagggggggcgacatttcacaaaagaccgtattacctttgcacctggtgcatcaccaggcgttggccgtggctggcttgtctccactgctgcaacgttcacactcgcccgcctccttcccccgaccttttgcgacacccccagctacacccggaagccgaggctggccaccccagcctgtgcctacccttagactggagggggtcgagtcgtctgaaaaattaaatagctcatttccatcaatccattgtggctcctgggctgagaccacaccagggggaggcggaagcagtgccgccaggagggtcagacccgtctccctcatggttcctagccaagccggggcccccggaagacaattccatggctctgcttcttccctcgtggaggctgtgttaattagcgagggattagggcaattcgcccaggacccaaaatttatcgaggtcaccacgcaggagctggccgacgcttgcgacatgaccattgaagaaatggaaagtgcggctgataacatcctgtccggaggcgccccgcagtctcccaacggcgcccttttaccatttgtgaactgccgcgatgcagggcaggacagggccgggggggaggaggacgcaggctgtgtgcgggcgcggggcagacctagtgaagaggaactgcaagactcgcgcgtctacgtatccagtctttag

SEQ ID NO: 46988 - DNA, 3840 bp, Artificial Sequence
  derived and/or modified sequence
atggtgaacgagaacacccggatgtacatccccgaggagaaccaccaggggtctaattacgggagtccacgcccagctcatgccaacatgaatgccaatgctgcggctgggttagcaccagaacacatccctacacccggtgccgccttatcctggcaagcagccattgatgccgctagacaggccaaattaatgggcagcgcgggcaacgccacgatctccaccgttagcagtacacaacgcaagagacagcagtatggaaaaccaaagaaacagggtagcacaactgctaccagacctccgcgagccctgctttgcctgactcttaagaatcctatcagaagagcttgtattagcatcgtggaatggaaaccattcgaaattataattctcttaaccatattcgctaattgcgtcgccctggcgatttatatccccttccccgaggatgattcgaacgcgactaattctaatctcgagagagtggaatacctcttcctcatcatcttcaccgtggaggctttcctgaaggtgatcgcatatggattgttgttccaccccaatgcatacctgaggaacggttggaatctgcttgattttatcattgttgtggtgggcttgtttagtgctatcttggagcaggcaaccaaagccgacggcgccaatgcactgggaggcaagggcgcaggatttgacgttaaggctctcagggctttccgggtgctgagacctctgaggctcgtgtctggagtgccttccttgcaagtagtgcttaattccataattaaagctatggtgccactgctccacatagctctgctggtgctattcgtgattattatctatgcaattataggattagagctctttatgggtaagatgcataagacttgctacaatcaggagggcattgccgatgttcctgcggaagacgacccaagcccatgcgctctggaaacagggcacggtcggcagtgccaaaatggtaccgtgtgcaaaccaggctgggacggccctaaacacgggattacaaacttcgataattttgcgtttgcaatgctcaccgtcttccagtgcataaccatggaagggtggacagacgtcctatactgggtcaatgacgccgtcggaagggactggccgtggatttacttcgtcacccttatcatcatcgggagctttttcgtgctcaacctggtgctcggcgttctgtctggggaattttctaaagagcgcgaaaaggccaaagccagaggagatttccagaagttgcgcgagaagcagcagctagaggaggacttaaaagggtacctggactggatcacacaagccgaggacatcgatcccgagaatgaggatgaaggtatggacgaagagaaacctaggaatatgagcatgcccacatctgagaccgaatccgtgaacaccgagaacgtggcgggcggcgacattgaaggcgaaaattgcggtgcccgtctggcccatcgaatatcaaaatctaagtttagtcgctactggcgtcgctggaatcgtttttgccgccgtaaatgcagagccgcagtgaagagtaatgtattctattggctggtgattttcctggttttcttaaataccctcacaatcgcgagtgagcattacaaccagcccaattggcttacggaagtgcaggataccgccaataaagctctgctagcattgtttaccgccgagatgctcttaaagatgtactcactgggcctacaggcctactttgtttccttattcaaccgcttcgattgctttgtggtgtgcggaggcatcctcgaaactattcttgtggagaccaagataatgagtccgctcgggatcagtgtccttcgctgcgtgagactgctccgcatcttcaagattacccgatattggaattcgttatctaatttggtagcttctctgctgaactcggtcagatccatcgccagcctgctcctgctcctcttcttattcataatcatcttcagtcttttgggcatgcagctctttggcggtaagttcaatttcgacgagatgcagacgcgacggtcaacgtttgataactttccccaatctcttttaaccgtgttccagattttaacgggcgaggattggaactctgtgatgtatgacggtatcatggcctacggcgggccatcattccccggcatgctggtgtgtatctactttatcatcttattcatctgcggcaattacatccttcttaacgtgttcctcgctatcgctgtagataacctggcggatgccgaatccctgactagtgctcagaaagaagaggaagaggaaaaggagcgcaagaagctagcccggaccgcctcgccggagaagaagcaagaactcgtcgaaaaacctgcagtgggggaatcgaaggaggagaagattgagctcaagtccataactgcagacggggagtcaccaccggccaccaagattaatatggacgatctgcagccaaacgagaatgaagataagtccccttatcccaatccagagacaacaggggaggaggacgaagaagagcctgaaatgccagtcgggccacgacccagacccctgagcgagctgcacctgaaggagaaggcagtcccgatgcccgaagccagcgctttcttcattttttcctccaataacagatttagactacagtgtcataggatcgtgaatgataccattttcaccaacctgatcttattttttattctgctgagctccatcagcctggctgctgaggaccctgtccaacacacctctttcagaaatcatatacttggaaatgctgattacgtgtttacctcaatttttacgcttgagataatactcaaaatgactgcctacggtgcctttctgcataaagggagtttctgccgcaattactttaatatccttgacctgcttgtggtgagcgtgtctttgatctcctttggtattcagagttctgcgattaacgtggtcaagattctgcgtgtcctccgggtgctgcggcctttgagggcgattaaccgggccaaggggttaaaacatgtcgtccagtgcgtcttcgtggcgattaggaccatcggcaatatagttatcgtgactactctgttgcagttcatgtttgcctgcattggtgttcagcttttcaagggaaaactctacacttgttccgactcgtctaaacagacagaggcggagtgtaaagggaattatatcacgtacaaggacggggaggttgaccacccgatcatccagccaaggtcctgggagaattctaaattcgatttcgacaatgtcctagccgccatgatggccctgttcaccgtgagtacatttgagggatggcccgagctcctttacaggagcatcgactctcatacagaggataaagggcctatctacaattacagagtggagatctcgatttttttcattatttatatcatcataattgcgttcttcatgatgaacattttcgtcggcttcgtaatcgtcactttccaggaacagggggagcaggaatataaaaattgcgaactcgacaaaaatcaacgccagtgcgtggaatatgcgcttaaagcgaggccacttcgtcgctatattcccaaaaatcaacaccaatataaagtatggtacgtggttaacagtacatactttgagtacctgatgttcgttttgatactgttgaacactatctgtttggccatgcagcactatggccagtcctgcctgttcaaaatagctatgaacatcctcaatatgctgtttacaggtctgtttaccgtcgaaatgatcctgaaactcattgcgttcaaacccaaagtggggctgtag

SEQ ID NO: 46989 - DNA, 6417 bp, Artificial Sequence
  derived and/or modified sequence
atggtcaatgagaacacgcgtatgtatatacccgaggaaaatcatcaggggtctaactatgggtcaccaaggccagcgcacgctaatatgaatgccaatgcagccgcaggattggccccagaacatataccgaccccaggcgctgcactgtcctggcaagcagcaattgatgcggctagacaagccaaactcatggggtcggcaggtaatgccacaatttcgaccgtcagtagtacccagaggaagcgccaacagtacggtaaacctaaaaagcaggggagtactaccgctacccgccctccccgtgccctgctgtgtctgaccctcaaaaaccctattaggagggcctgtatctccatagtcgaatggaagccattcgagatcatcatactcctgaccatcttcgccaactgtgtcgcactcgctatatatattccttttccggaggatgacagtaacgcaacaaattcaaacctcgagcgtgtggagtaccttttcctgataatatttacagtggaggcttttttgaaggtgatcgcctatggactcttgttccacccgaatgcctacctgagaaatggctggaacttgctggactttatcatcgtggtagttggactgttctccgccatattagaacaggccactaaagccgatggcgctaacgccctgggcggaaagggagctgggtttgatgtgaaggccctgagggcttttagagtcctaagaccccttcgcttggtgtccggggtcccatcgctgcaagtggtgctgaactcaatcatcaaagctatggttccactgttacatattgcccttctggtgctctttgttattataatttatgctattatcggcttggaactttttatgggtaagatgcataaaacttgctacaatcaggaggggatcgctgacgttccagcagaagacgatcccagcccatgtgccctggagaccggtcatggaaggcaatgccaaaatggaaccgtatgtaagcccggatgggacggcccaaaacacggtatcacaaatttcgacaacttcgccttcgcaatgctgaccgtgtttcagtgcatcaccatggaaggttggaccgacgtgctgtactgggtcaatgacgccgtgggtcgggactggccttggatctacttcgtgactctgataatcatcggaagcttttttgtgctcaacctggtgctaggagtgttgtccggagagttctcaaaagagcgcgaaaaggctaaagccaggggcgatttccagaagctacgcgagaagcagcaactcgaggaagatctgaaggggtatttggactggataacccaggccgaagacattgacccggagaacgaggacgaggggatggacgaagagaaaccccgtaatatgtctatgccaactagcgaaaccgaatctgtcaacacagagaatgtggccggtggtgacattgaaggagagaattgcggcgcaagactggcccatcgcatctccaaatcaaagttctctcggtactggcgtcggtggaaccgtttctgtcgcaggaaatgtagagccgctgtgaagtcaaatgtgttttattggctggttatcttcctcgtctttctgaacactctgacaatagctagcgagcattacaaccaacctaactggctgactgaagtgcaggatactgccaacaaggctttactcgccctcttcacggcagagatgctgctaaaaatgtactcccttggcctgcaggcctatttcgtgtcgcttttcaatagatttgattgctttgtggtctgtgggggaattctggaaaccatcttggtggagactaaaataatgtcccctctgggcatatcagttctgagatgtgtacgcctgcttcgcatcttcaagatcacccggtattggaattcattaagcaatttggtggctagtttgctgaattcagtgcgatctattgcatcccttttgctgctgctgtttctattcattatcattttcagcttattaggtatgcagttgttcggtgggaagtttaacttcgatgagatgcagactagacggagtacctttgataacttcccgcaatcactcctgaccgtgttccagatcttgactggcgaggactggaattccgtcatgtacgatggcattatggcttatggcggaccgtctttcccgggtatgctggtgtgtatttattttatcatcctctttatctgtggaaattacatactcttgaatgtgtttctagcaatcgctgttgataatctggctgacgcagagtccctcactagtgcccaaaaggaggaggaagaagagaaggaacgcaagaagctcgcgcgtactgcctcccctgagaaaaaacaggaattagtggagaaacctgctgtgggagagtcaaaagaagagaaaattgaactaaagtctatcaccgctgacggagaaagtccaccggcaaccaagataaatatggatgatctccagcctaatgagaatgaggacaaatccccatatccgaaccccgagacaactggggaggaggacgaagaagaacctgagatgcccgtcgggcctagaccacggcctctcagtgagctgcacctgaaagagaaagccgtgccaatgccagaggcgagcgctttctttattttctctagcaataatcgatttcgtctgcagtgccataggattgtcaacgacaccatttttacaaatctgatcctgttcttcattctcctgtcatcgattagtctcgcagcagaggatccggtgcagcacacctccttccgcaaccacatcttaggcaacgctgattatgtgtttacatctatctttactctggagattatcttgaaaatgaccgcctacggagcgttcctacataaaggaagtttttgtcggaactactttaacattttggacctgttagtggtatctgtgtcgctgatctcttttggcattcagagttccgccattaacgtagtgaagatcctgagagtccttagagtcttgcgccctctgagagccatcaacagagctaagggtttaaaacatgtagtgcagtgcgtttttgtcgcgatcagaacgattggcaatattgtcattgtaacaaccttactgcagtttatgtttgcctgtatcggtgtgcagcttttcaagggaaagttgtatacctgtagcgatagttccaagcaaacagaggctgagtgtaagggcaattacattacatacaaagatggcgaggtggatcaccccatcatccagcctcgctcatgggaaaattcgaagtttgacttcgacaatgtgctcgccgcaatgatggcactgtttacagtgtccacctttgaggggtggcctgagctgctttatcgcagcatagactctcacaccgaggataaaggccctatctacaactaccgagtggagatctctatcttctttataatttatatcattatcatagcgtttttcatgatgaatatctttgtgggtttcgtgatagtgacttttcaggaacaaggagaacaggaatacaagaactgcgagctcgataaaaatcagcggcaatgcgtcgagtatgcgctgaaagctagaccactgagacggtacataccgaagaaccagcaccagtacaaggtgtggtacgtggtaaactctacttatttcgaataccttatgttcgtgctaattctgcttaatacaatctgtctcgctatgcagcattatgggcagtcatgcctattcaagatcgcaatgaatattctgaatatgctcttcactgggcttttcactgtggagatgattttgaagctaatcgcctttaaaccgaaaggttacttttctgatccatggaatgtgttcgattttctcatcgtgatcggctccataattgacgttattctgagcgagacgaatcctgccgagcacacccagtgtagtccgagtatgaacgcggaagagaactctcggatctctatcacgttttttcgtctgttcagggtcatgcgcctggtgaaactgctgagtagaggagagggcatccgcaccctgctctggacctttataaaaagttttcaagctctcccctatgtagctctactgattgttatgctgttcttcatctacgcagtgattgggatgcaggtcttcggcaaaattgcactgaatgacacaaccgagataaacagaaataacaacttccaaactttcccacaagccgtcctcctcctctttagatgcgcaaccggtgaagcatggcaagatattatgctggcatgcatgcccggaaagaagtgcgcacctgagtcagagccttctaactccacggagggcgaaacgccctgtggctcttcttttgccgtgttttattttatttccttttacatgctgtgcgctttcctgatcatcaacctctttgtagcggttattatggacaatttcgactacctgacacgggactggtctatacttgggcctcaccacttggacgagttcaaaagaatatgggccgagtatgacccagaagccaaggggagaatcaagcatttagatgttgtcaccctgctgaggcgaattcagccgccactgggatttggtaagctgtgtccacaccgggttgcttgcaaaagacttgtgagcatgaacatgccactcaactccgacggaactgtgatgttcaacgccactctgttcgccctggttcgaaccgcactgcggataaaaaccgaaggcaacctggaacaagcaaacgaagagcttcgagccatcattaagaagatatggaaacgcacctccatgaaacttttggatcaggtagttccaccagccggtgacgacgaagttacagttggtaagttttacgcaacattccttatccaggagtactttagaaagttcaagaaaagaaaggaacaaggcctagttgggaaacctagccagagaaatgccctgagcctgcaagcaggacttcgtacgttgcacgacattgggcctgaaatccgccgagccatctccggcgacctgactgccgaggaagagcttgacaaagctatgaaagaggctgttagcgcagcttcagaagacgacattttcaggagagccggtgggctgtttgggaaccacgtgtcctactaccagagtgacggcagatcagcatttccccagacgttcaccacacagaggccgctgcacataaacaaagccggaagcagccagggggacactgaatctccctcccacgagaagctggtggactcaacgttcactcccagctcctattcctccaccggatctaatgctaacatcaataacgccaacaacaccgcccttggcagactgccccgtcccgctggatacccttcaacagtatctaccgtggaaggacacgggccacctctaagcccagccatcagagtgcaggaggtggcctggaagctcagctccaacaggtgccatagccgagaatcacaggcagctatggcaggccaggaagagacttcacaggacgaaacctacgaagtgaagatgaatcacgatacagaagcctgtagtgagccttctcttctgtccactgaaatgctgagttatcaagacgatgagaaccgccaattgactctccctgaggaggataaaagggatatccggcagtcacccaagcggggattcctgcgctctgcttcgctagggcgacgcgcatctttccaccttgagtgtttgaaaaggcagaaagacagaggcggagatatctctcagaagaccgtcttacccctacacctcgttcatcaccaggcactagcagtggcagggctctcgcccctgctgcagcggagccatagtccagctagtttcccccgtccatttgccaccccccctgctacccctggaagtcgcggttggccccctcaacccgtgcctaccctgagattagaaggcgtcgaatccagtgaaaagttgaattccagctttcctagcattcactgcggctcctgggcagaaactaccccagggggtggcggttccagtgcagcccgtcgcgtccgccctgtgagtctgatggtcccctcgcaggcaggcgctccagggcgtcagtttcacggaagcgcctcctcacttgtggaagcagtgctgatcagcgaagggctggggcagttcgcacaggatcctaagttcattgaagtgacgacacaagagctcgcggatgcttgtgatatgacaatagaggagatggagtcggccgctgataacatcttatctggcggagctcctcagtccccaaacggcgctcttctgcctttcgtgaactgtagagatgctggccaagaccgggcagggggagaagaggacgccggatgcgtcagagcacgaggaagaccttctgaagaggagctgcaagacagccgtgtgtatgtctcctccctgtag

SEQ ID NO: 46990 - DNA, 3840 bp, Artificial Sequence
  derived and/or modified sequence
atggtgaatgagaacacccgtatgtacattcccgaggaaaaccaccaagggagcaactatggcagtccaagaccagcacacgccaatatgaacgctaacgccgcagctggcctcgcaccagaacatatccctactcctggtgcagcccttagctggcaagccgctatcgatgcggctcgccaggcgaagctgatggggagtgctggtaatgccacaatcagtaccgtgtcctctactcagcggaagagacagcagtatggtaagccaaaaaaacaggggtctaccaccgcgacccgcccaccacgggcactgctttgtctaactctgaaaaaccctattaggagggcttgcatctctattgtcgaatggaaaccattcgaaatcatcattctgttaaccattttcgctaattgcgtggccctggctatatacatcccttttcccgaggacgatagtaacgctactaactctaatctggagagggtggagtaccttttcttaattatattcacagtcgaagcatttctcaaggttattgcgtacggcctgctattccatccgaacgcctatctgaggaacggttggaatttgctggatttcatcattgtcgtggtcggccttttcagtgccattctcgagcaggctactaaagcagatggagcaaacgctctggggggaaagggtgccggattcgacgtcaaagccctgcgcgcattccgagttctgcgcccactccggctggtttccggtgtgccatccctccaagtggtccttaactcaattattaaggcaatggtgccactacttcatatcgcccttctcgttctgttcgtgatcatcatctatgctatcatcgggttggagctgtttatgggtaaaatgcacaagacctgttataaccaagaggggatcgctgatgtgccagccgaggacgacccctctccatgtgctttggaaacgggtcatggacggcagtgccagaatggcacagtgtgtaaaccagggtgggatggtccaaagcacggaatcactaacttcgacaattttgctttcgccatgctgaccgttttccagtgtatcaccatggaggggtggaccgacgtgctatattgggtgaatgatgccgtcggcagggattggccttggatctatttcgtgactctgatcatcatcggaagctttttcgtcctcaatctggtgttgggagtgctctcaggggaattctccaaggaaagggagaaagccaaggctcgcggagacttccaaaaactccgagaaaagcaacagttagaggaggacttaaaaggatatctggactggatcacacaagctgaagatatagaccccgaaaacgaagatgaggggatggacgaagagaagcctcggaacatgtctatgcccacatccgaaaccgaatccgtgaataccgaaaatgtggccggaggagacatcgagggcgagaattgcggtgctcgattagctcatcgcatttctaagagtaagttcagccggtactggaggcgatggaataggttttgtaggaggaaatgccgagccgcagtgaagtctaacgttttctactggctggtgatctttctggtttttttgaacactctgacgattgcatctgagcactacaaccagcctaattggctcacagaggtccaggacacagcaaacaaggccctcctcgctttgttcacagccgaaatgctgctgaagatgtactcgttgggtctgcaggcgtattttgtttctctgtttaatagattcgactgttttgttgtttgcgggggaattctcgaaaccatcctcgttgagaccaaaatcatgtccccactggggataagcgttctgcgctgcgtgcgtctgctgcgtattttcaaaattactaggtactggaattctctaagtaatctcgttgcctctctgctaaatagtgtaaggagtatagcctctctgctgctactactctttctttttattataatttttagtctcctcggaatgcaactgtttggcggtaagtttaacttcgacgagatgcaaactaggcggagcacattcgacaatttcccacagagtctgcttacagtgttccagatcttgacaggtgaagactggaatagtgtgatgtacgatgggatcatggcgtacgggggtccgtcatttcccggtatgctggtttgcatttactttatcatcctgttcatatgcggaaattatattcttctgaatgtgttccttgctatcgccgtagataaccttgcggatgcagaaagcctgacaagcgcacagaaagaagaagaagaagagaaagaaaggaagaaattggcacgcactgcatcccctgaaaagaagcaagagctggtcgagaaaccggcagtgggagagtccaaggaagagaaaatcgaactgaaatccattaccgctgacggtgagagcccgcctgccaccaagatcaacatggatgatttacagcccaatgagaacgaggataagagcccgtaccctaaccctgagaccaccggggaagaagacgaggaggaaccagaaatgccagtcggccctcgacctagacccctgagtgagttacatttaaaagaaaaagcggttcctatgccggaggcgtctgcatttttcatctttagttccaacaatcgattcagactgcagtgtcaccggattgtcaacgatacaatcttcactaatctaatactgttctttatcttactctcctccatctcactggcagctgaggacccggttcagcataccagttttagaaatcacattctgggcaatgccgattacgtctttacttccatttttaccctggagatcatactgaaaatgacagcttatggcgcttttctgcacaaaggatccttttgccggaactactttaacattttagacctcctggtagtgtccgtgtcactcatctcattcggcatccagagtagcgcgatcaacgtggttaagatcctccgggtcctgcgcgtactccgcccactcagagcgattaaccgtgctaagggcctaaagcacgtggttcagtgtgtatttgtggcgatccggacaatcggaaatatcgtaatcgttactactcttctccagttcatgttcgcctgtatcggagtgcagcttttcaaagggaagctttacacatgctccgacagtagtaagcagacagaggcggaatgcaaaggcaattatatcacgtataaggatggagaagtcgaccatcccattatccagcccagatcttgggaaaactctaaatttgatttcgataatgtgctggccgctatgatggctcttttcaccgtcagcacttttgaagggtggccggagctgctgtacagatcaattgacagtcacaccgaagacaagggtcccatttacaactaccgggtcgagatctcgattttcttcattatttacataatcatcatcgccttcttcatgatgaacattttcgtagggtttgtcattgtcacattccaggaacaaggggaacaggagtacaagaattgcgaacttgacaaaaaccagcggcagtgcgtggagtacgccctgaaggcaaggccactccgcagatacatacccaagaaccagcaccagtacaaagtctggtacgtggtgaactctacatactttgagtacctcatgttcgttttgattctgctgaacaccatttgtctcgctatgcagcactacggccagtcctgcctcttcaagattgcaatgaatatcctcaatatgctgtttactggcttattcactgtggagatgatcctgaagcttattgcctttaagccgaaagtgggactttag

SEQ ID NO: 46991 - DNA, 6511 bp, Artificial Sequence
  derived and/or modified sequence
atggtcaatgagaatacgaggatgtacattccagaggaaaaccaccaaggttccaactatgggagcccacgccccgcccatgccaacatgaatgccaatgcggcagcggggctggcccctgagcacatccccaccccgggggctgccctgtcgtggcaggcggccatcgacgcagcccggcaggctaagctgatgggcagcgctggcaatgcgaccatctccacagtcagctccacgcagcggaagcggcagcaatatgggaaacccaagaagcagggcagcaccacggccacacgcccgccccgagccctgctctgcctgaccctgaagaaccccatccggagggcctgcatcagcattgtcgaatggaaaccatttgaaataattattttactgactatttttgccaattgtgtggccttagcgatctatattccctttccagaagatgattccaacgccaccaattccaacctggaacgagtggaatatctctttctcataatttttacggtggaagcgtttttaaaagtaatcgcctatggactcctctttcaccccaatgcctacctccgcaacggctggaacctactagattttataattgtggttgtggggctttttagtgcaattttagaacaagcaaccaaagcagatggggcaaacgctctcggagggaaaggggccggatttgatgtgaaggcgctgagggccttccgcgtgctgcgccccctgcggctggtgtccggagtcccaagtctccaggtggtcctgaattccatcatcaaggccatggtccccctgctgcacatcgccctgcttgtgctgtttgtcatcatcatctacgccatcatcggcttggagctcttcatggggaagatgcacaagacctgctacaaccaggagggcatagcagatgttccagcagaagatgacccttccccttgtgcgctggaaacgggccacgggcggcagtgccagaacggcacggtgtgcaagcccggctgggatggtcccaagcacggcatcaccaactttgacaactttgccttcgccatgctcacggtgttccagtgcatcaccatggagggctggacggacgtgctgtactgggtcaatgatgccgtaggaagggactggccctggatctattttgttacactaatcatcatagggtcattttttgtacttaacttggttctcggtgtgcttagcggagagttttccaaagagagggagaaggccaaggcccggggagatttccagaagctgcgggagaagcagcagctagaagaggatctcaaaggctacctggattggatcactcaggccgaagacatcgatcctgagaatgaggacgaaggcatggatgaggagaagccccgaaacatgagcatgcccaccagtgagaccgagtccgtcaacaccgaaaacgtggctggaggtgacatcgagggagaaaactgcggggccaggctggcccaccggatctccaagtcaaagttcagccgctactggcgccggtggaatcggttctgcagaaggaagtgccgcgccgcagtcaagtctaatgtcttctactggctggtgattttcctggtgttcctcaacacgctcaccattgcctctgagcactacaaccagcccaactggctcacagaagtccaagacacggcaaacaaggccctgctggccctgttcacggcagagatgctcctgaagatgtacagcctgggcctgcaggcctacttcgtgtccctcttcaaccgctttgactgcttcgtcgtgtgtggcggcatcctggagaccatcctggtggagaccaagatcatgtccccactgggcatctccgtgctcagatgcgtccggctgctgaggattttcaagatcacgaggtactggaactccttgagcaacctggtggcatccttgctgaactctgtgcgctccatcgcctccctgctccttctcctcttcctcttcatcatcatcttctccctcctggggatgcagctctttggaggaaagttcaactttgatgagatgcagacccggaggagcacattcgataacttcccccagtccctcctcactgtgtttcagatcctgaccggggaggactggaattcggtgatgtatgatgggatcatggcttatggcggcccctcttttccagggatgttagtctgtatttacttcatcatcctcttcatctgtggaaactatatcctactgaatgtgttcttggccattgctgtggacaacctggctgatgctgagagcctcacatctgcccaaaaggaggaggaagaggagaaggagagaaagaagctggccaggactgccagcccagagaagaaacaagagttggtggagaagccggcagtgggggaatccaaggaggagaagattgagctgaaatccatcacggctgacggagagtctccacccgccaccaagatcaacatggatgacctccagcccaatgaaaatgaggataagagcccctaccccaacccagaaactacaggagaagaggatgaggaggagccagagatgcctgtcggccctcgcccacgaccactctctgagcttcaccttaaggaaaaggcagtgcccatgccagaagccagcgcgtttttcatcttcagctctaacaacaggtttcgcctccagtgccaccgcattgtcaatgacacgatcttcaccaacctgatcctcttcttcattctgctcagcagcatttccctggctgctgaggacccggtccagcacacctccttcaggaaccatatcctaggcaatgcagactatgtcttcactagtatctttacattagaaattatccttaagatgactgcttatggggctttcttgcacaagggttctttctgccggaactacttcaacatcctggacctgctggtggtcagcgtgtccctcatctcctttggcatccagtccagtgcaatcaatgtcgtgaagatcttgcgagtcctgcgagtactcaggcccctgagggccatcaacagggccaaggggctaaagcatgtggttcagtgtgtgtttgtcgccatccggaccatcgggaacatcgtgattgtcaccaccctgctgcagttcatgtttgcctgcatcggggtccagctcttcaagggaaagctgtacacctgttcagacagttccaagcagacagaggcggaatgcaagggcaactacatcacgtacaaagacggggaggttgaccaccccatcatccaaccccgcagctgggagaacagcaagtttgactttgacaatgttctggcagccatgatggccctcttcaccgtctccaccttcgaagggtggccagagctgctgtaccgctccatcgactcccacacggaagacaagggccccatctacaactaccgtgtggagatctccatcttcttcatcatctacatcatcatcatcgccttcttcatgatgaacatcttcgtgggcttcgtcatcgtcacctttcaggagcagggggagcaggagtacaagaactgtgagctggacaagaaccagcgacagtgcgtggaatacgccctcaaggcccggcccctgcggaggtacatccccaagaaccagcaccagtacaaagtgtggtacgtggtcaactccacctacttcgagtacctgatgttcgtcctcatcctgctcaacaccatctgcctggccatgcagcactacggccagagctgcctgttcaaaatcgccatgaacatcctcaacatgctcttcactggcctcttcaccgtggagatgatcctgaagctcattgccttcaaacccaagggttactttagtgatccctggaatgtttttgacttcctcatcgtaattggcagcataattgacgtcattctcagtgagactaatccagctgaacatacccaatgctctccctctatgaacgcagaggaaaactcccgcatctccatcaccttcttccgcctgttccgggtcatgcgtctggtgaagctgctgagccgtggggagggcatccggacgctgctgtggaccttcatcaagtccttccaggccctgccctatgtggccctcctgatcgtgatgctgttcttcatctacgcggtgatcgggatgcaggtgtttgggaaaattgccctgaatgataccacagagatcaaccggaacaacaactttcagaccttcccccaggccgtgctgctcctcttcaggtgtgccaccggggaggcctggcaggacatcatgctggcctgcatgccaggcaagaagtgtgccccagagtccgagcccagcaacagcacggagggtgaaacaccctgtggtagcagctttgctgtcttctacttcatcagcttctacatgctctgtgccttcctgatcatcaacctctttgtagctgtcatcatggacaactttgactacctgacaagggactggtccatccttggtccccaccacctggatgagtttaaaagaatctgggcagagtatgaccctgaagccaagggtcgtatcaaacacctggatgtggtgaccctcctccggcggattcagccgccactaggttttgggaagctgtgccctcaccgcgtggcttgcaaacgcctggtctccatgaacatgcctctgaacagcgacgggacagtcatgttcaatgccaccctgtttgccctggtcaggacggccctgaggatcaaaacagaagggaacctagaacaagccaatgaggagctgcgggcgatcatcaagaagatctggaagcggaccagcatgaagctgctggaccaggtggtgccccctgcaggtgatgatgaggtcaccgttggcaagttctacgccacgttcctgatccaggagtacttccggaagttcaagaagcgcaaagagcagggccttgtgggcaagccctcccagaggaacgcgctgtctctgcaggctggcttgcgcacactgcatgacatcgggcctgagatccgacgggccatctctggagatctcaccgctgaggaggagctggacaaggccatgaaggaggctgtgtccgctgcttctgaagatgacatcttcaggagggccggtggcctgttcggcaaccacgtcagctactaccaaagcgacggccggagcgccttcccccagaccttcaccactcagcgcccgctgcacatcaacaaggcgggcagcagccagggcgacactgagtcgccatcccacgagaagctggtggactccaccttcaccccgagcagctactcgtccaccggctccaacgccaacatcaacaacgccaacaacaccgccctgggtcgcctccctcgccccgccggctaccccagcacggtcagcactgtggagggccacgggccccccttgtcccctgccatccgggtgcaggaggtggcgtggaagctcagctccaacaggtgccactcccgggagagccaggcagccatggcgggtcaggaggagacgtctcaggatgagacctatgaagtgaagatgaaccatgacacggaggcctgcagtgagcccagcctgctctccacagagatgctctcctaccaggatgacgaaaatcggcaactgacgctcccagaggaggacaagagggacatccggcaatctccgaagaggggtttcctccgctctgcctcactaggtcgaagggcctccttccacctggaatgtctgaagcgacagaaggaccgagggggagacatctctcagaagacagtcctgcccttgcatctggttcatcatcaggcattggcagtggcaggcctgagccccctcctccagagaagccattcccctgcctcattccctaggccttttgccaccccaccagccacacctggcagccgaggctggcccccacagcccgtccccaccctgcggcttgagggggtcgagtccagtgagaaactcaacagcagcttcccatccatccactgcggctcctgggctgagaccacccccggtggcgggggcagcagcgccgcccggagagtccggcccgtctccctcatggtgcccagccaggctggggccccagggaggcagttccacggcagtgccagcagcctggtggaagcggtcttgatttcagaaggactggggcagtttgctcaagatcccaagttcatcgaggtcaccacccaggagctggccgacgcctgcgacatgaccatagaggagatggagagcgcggccgacaacatcctcagcgggggcgccccacagagccccaatggcgccctcttaccctttgtgaactgcagggacgcggggcaggaccgagccgggggcgaagaggacgcgggctgtgtgcgcgcgcggggtcgaccgagtgaggaggagctccaggacagcagggtctacgtcagcagcctgtagtgggcgctgccagatgcgggcttttttttatttgtttcaatgttcctaatgggttcgtttcagaagtgcctcactgttctcgtgacctggagtt

SEQ ID NO: 46992 - DNA, 6811 bp, Artificial Sequence
  derived and/or modified sequence
ctcctattaaaaccatttttggtccatggtcaatgagaatacgaggatgtacattccagaggaaaaccaccaaggttccaactatgggagcccacgccccgcccatgccaacatgaatgccaatgcggcagcggggctggcccctgagcacatccccaccccgggggctgccctgtcgtggcaggcggccatcgacgcagcccggcaggctaagctgatgggcagcgctggcaatgcgaccatctccacagtcagctccacgcagcggaagcggcagcaatatgggaaacccaagaagcagggcagcaccacggccacacgcccgccccgagccctgctctgcctgaccctgaagaaccccatccggagggcctgcatcagcattgtcgaatggaaaccatttgaaataattattttactgactatttttgccaattgtgtggccttagcgatctatattccctttccagaagatgattccaacgccaccaattccaacctggaacgagtggaatatctctttctcataatttttacggtggaagcgtttttaaaagtaatcgcctatggactcctctttcaccccaatgcctacctccgcaacggctggaacctactagattttataattgtggttgtggggctttttagtgcaattttagaacaagcaaccaaagcagatggggcaaacgctctcggagggaaaggggccggatttgatgtgaaggcgctgagggccttccgcgtgctgcgccccctgcggctggtgtccggagtcccaagtctccaggtggtcctgaattccatcatcaaggccatggtccccctgctgcacatcgccctgcttgtgctgtttgtcatcatcatctacgccatcatcggcttggagctcttcatggggaagatgcacaagacctgctacaaccaggagggcatagcagatgttccagcagaagatgacccttccccttgtgcgctggaaacgggccacgggcggcagtgccagaacggcacggtgtgcaagcccggctgggatggtcccaagcacggcatcaccaactttgacaactttgccttcgccatgctcacggtgttccagtgcatcaccatggagggctggacggacgtgctgtactgggtcaatgatgccgtaggaagggactggccctggatctattttgttacactaatcatcatagggtcattttttgtacttaacttggttctcggtgtgcttagcggagagttttccaaagagagggagaaggccaaggcccggggagatttccagaagctgcgggagaagcagcagctagaagaggatctcaaaggctacctggattggatcactcaggccgaagacatcgatcctgagaatgaggacgaaggcatggatgaggagaagccccgaaacatgagcatgcccaccagtgagaccgagtccgtcaacaccgaaaacgtggctggaggtgacatcgagggagaaaactgcggggccaggctggcccaccggatctccaagtcaaagttcagccgctactggcgccggtggaatcggttctgcagaaggaagtgccgcgccgcagtcaagtctaatgtcttctactggctggtgattttcctggtgttcctcaacacgctcaccattgcctctgagcactacaaccagcccaactggctcacagaagtccaagacacggcaaacaaggccctgctggccctgttcacggcagagatgctcctgaagatgtacagcctgggcctgcaggcctacttcgtgtccctcttcaaccgctttgactgcttcgtcgtgtgtggcggcatcctggagaccatcctggtggagaccaagatcatgtccccactgggcatctccgtgctcagatgcgtccggctgctgaggattttcaagatcacgaggtactggaactccttgagcaacctggtggcatccttgctgaactctgtgcgctccatcgcctccctgctccttctcctcttcctcttcatcatcatcttctccctcctggggatgcagctctttggaggaaagttcaactttgatgagatgcagacccggaggagcacattcgataacttcccccagtccctcctcactgtgtttcagatcctgaccggggaggactggaattcggtgatgtatgatgggatcatggcttatggcggcccctcttttccagggatgttagtctgtatttacttcatcatcctcttcatctgtggaaactatatcctactgaatgtgttcttggccattgctgtggacaacctggctgatgctgagagcctcacatctgcccaaaaggaggaggaagaggagaaggagagaaagaagctggccaggactgccagcccagagaagaaacaagagttggtggagaagccggcagtgggggaatccaaggaggagaagattgagctgaaatccatcacggctgacggagagtctccacccgccaccaagatcaacatggatgacctccagcccaatgaaaatgaggataagagcccctaccccaacccagaaactacaggagaagaggatgaggaggagccagagatgcctgtcggccctcgcccacgaccactctctgagcttcaccttaaggaaaaggcagtgcccatgccagaagccagcgcgtttttcatcttcagctctaacaacaggtttcgcctccagtgccaccgcattgtcaatgacacgatcttcaccaacctgatcctcttcttcattctgctcagcagcatttccctggctgctgaggacccggtccagcacacctccttcaggaaccatatcctaggcaatgcagactatgtcttcactagtatctttacattagaaattatccttaagatgactgcttatggggctttcttgcacaagggttctttctgccggaactacttcaacatcctggacctgctggtggtcagcgtgtccctcatctcctttggcatccagtccagtgcaatcaatgtcgtgaagatcttgcgagtcctgcgagtactcaggcccctgagggccatcaacagggccaaggggctaaagcatgtggttcagtgtgtgtttgtcgccatccggaccatcgggaacatcgtgattgtcaccaccctgctgcagttcatgtttgcctgcatcggggtccagctcttcaagggaaagctgtacacctgttcagacagttccaagcagacagaggcggaatgcaagggcaactacatcacgtacaaagacggggaggttgaccaccccatcatccaaccccgcagctgggagaacagcaagtttgactttgacaatgttctggcagccatgatggccctcttcaccgtctccaccttcgaagggtggccagagctgctgtaccgctccatcgactcccacacggaagacaagggccccatctacaactaccgtgtggagatctccatcttcttcatcatctacatcatcatcatcgccttcttcatgatgaacatcttcgtgggcttcgtcatcgtcacctttcaggagcagggggagcaggagtacaagaactgtgagctggacaagaaccagcgacagtgcgtggaatacgccctcaaggcccggcccctgcggaggtacatccccaagaaccagcaccagtacaaagtgtggtacgtggtcaactccacctacttcgagtacctgatgttcgtcctcatcctgctcaacaccatctgcctggccatgcagcactacggccagagctgcctgttcaaaatcgccatgaacatcctcaacatgctcttcactggcctcttcaccgtggagatgatcctgaagctcattgccttcaaacccaaggtaggcctctgagaaagacctttgattcccaggcatcaggggtggacagaacggggaggtggggtgcaggtattgaaggcagaatgaggggaagagggaaaaaggcatcggtgaaggaccatccctgctccgatggtcagtgccccaactcctacacctgcccagagctgaaccaggccaactccaggaaacactctcagctctcagtgttgaccctggctggcatgcacaagctgcagattcctcgctgagctgaacctctgagcctctcctaggagaggcaggtgatggtctttctcctatgtcccatcctctagtacataacctgttaatagaagaaactatgctcatagactggcagaccaaacctctccaggcccagccccccagatccactcaggcctctgttccaccctcctcccatttcatcagccacacagaccaacctcatataaaacattcagccagggctggatttgctcagggctcaggactgagggctccagcccatgggcactcctgttccctgcctaagaggctatggcattgctccttacatgctctggggcaggaagaacaattaccagcaaatttctctgctttgttccttgtgtaagggcaagaagattaggcctgctgctgaatgaggcagggtcagaattcctgttctttggatcatctgtgcccttcctagccagtcacccccattgtcctcagtggtggaggagcagacactggtatgagccacaccttccaccctgggcctctgtagatgggtcagaatcacgggtatccactggccgggattcaccaccaggacagctgcttctgagggaggctataagagcaactgagcagcccccaggctaccataacaccttttggagaaggatgagaaggaacgagttctaggagcatcatgcagttacagacttgagacaatctctccagcttactgagccttcccctccctcctttggtagttttcccagaggcaacacagatcaacaggaggccaagagcaagaatccctggccatatcttctattttcattcaagtttttactggtctcaagattaattgggggtgggggagggtccagctcggcctttgaatccatgttcattgaggagatatccacagccttctttgaatgaatattcactcacactttggattccatatcatgtgctacatgtatatcatcgcacgtcattctcaaaacgtccctttaaagtaggtattagcatccctctgtggagaagggggaagggaggctcaaacaattaagtgcccaggattaattgatccactgctaagaactggcagaacggagactggaatccggcacctctgacttcactgtattttccaccacactgaggttaactatcattttcccatgtcaagtgttctgcgggtattttttagcaagagggaaacaaccttggagggacttaaaagataagacaatattcctacaatgcagattcttctgtcactcaaagaatgcctggggatcccagctgattttcatagaggaagtctcctaagggacatcctttggtgatagaacggtggtttcctgccttctccagagaagcaagtacactctttttcaccttcctgtacaagtcccatttaggaggacagatcttgtcctgacctagagaggacccctgcgttgccctgacaccttccttagggtacacggtgtctgtgcccacacatggtcctattccaagccctgcagcccaggagctctgacagttcgccacccacagcagcatgaccagctgaggccaggagtgcagtcactgcctagccgagcctcagtctcggatgactcctctcagtggggaaactggcatcattttcatacagtgtcacgagacatatggtttaaatatttcaaagccttgagtcattccacagttgactcagatgtgtttctgacgatgtctgaggcagtctggagagcctgcagtggactttctgaatcatgcctcctgagcacgggagacatacagacaaccttccctgggaagtgcatgaaattgacacctgcaggagcctccgtcctccgtctaaaagacactccacctaaatcctgccaatcaaggaacaagccagtttcctaggaagtaaccattgcgagtggtctaaactgtaaagtgcctcctaatttcctctgtccctggttttctattgtgagaagatggggcaagataacagagacttttacccaagaaggaagacagccatcctgggcccatttgcatttcacattccagggtacatctatggtgtaaagagaaaggaaaatggatctttccctgtgaatttccctaaaggggctctggcaagagggggataaaggtcaccacccagttaggagcatcatggagcacagctgagtccctggattcttactgagctatgttcttcattcacaaatagactccaggtaaagcagctccaaaattttcaggcagaaaaccaaactggaaaaacttgaagctctggaagaatatccagctggatctggcccaagaaccagtggcttctaaccatgacctgaatccatgacaactttcatttcccaccattaagtaggactctgtgctgcactttttatttcactggcatggttgtttgtgtatgacccagatgagcatcagcatttgctgtgaaaggatggctaggaaccaaggatgttgaagacagtctgaagttgtcactgcttatgtttcgtctctgcaactggctggttggttggtccatcagccggtcaacttgtattcttgcttcattctttcattgttttcatggtcatggatgttcccaatttcttcatttctgtgtgttctcctcaccactccatggaaaataaatttactcaagtaagtccctgccttaaatctaaccatcccactccttaaattcatactctgttc

SEQ ID NO: 46993 - DNA, 6417 bp, Artificial Sequence
  derived and/or modified sequence
atggtgaacgagaacaccagaatgtacatccccgaggagaaccaccagggcagcaactacggcagccccagacccgcccacgccaacatgaacgccaacgccgccgccggcctggcccccgagcacatccccacccccggcgccgccctgagctggcaggccgccatcgacgccgccagacaggccaagctgatgggcagcgccggcaacgccaccatcagcaccgtgagcagcacccagagaaagagacagcagtacggcaagcccaagaagcagggcagcaccaccgccaccagaccccccagagccctgctgtgcctgaccctgaagaaccccatcagaagagcctgcatcagcatcgtggagtggaagcccttcgagatcatcatcctgctgaccatcttcgccaactgcgtggccctggccatctacatccccttccccgaggacgacagcaacgccaccaacagcaacctggagagagtggagtacctgttcctgatcatcttcaccgtggaggccttcctgaaggtgatcgcctacggcctgctgttccaccccaacgcctacctgagaaacggctggaacctgctggacttcatcatcgtggtggtgggcctgttcagcgccatcctggagcaggccaccaaggccgacggcgccaacgccctgggcggcaagggcgccggcttcgacgtgaaggccctgagagccttcagagtgctgagacccctgagactggtgagcggcgtgcccagcctgcaggtggtgctgaacagcatcatcaaggccatggtgcccctgctgcacatcgccctgctggtgctgttcgtgatcatcatctacgccatcatcggcctggagctgttcatgggcaagatgcacaagacctgctacaaccaggagggcatcgccgacgtgcccgccgaggacgaccccagcccctgcgccctggagaccggccacggcagacagtgccagaacggcaccgtgtgcaagcccggctgggacggccccaagcacggcatcaccaacttcgacaacttcgccttcgccatgctgaccgtgttccagtgcatcaccatggagggctggaccgacgtgctgtactgggtgaacgacgccgtgggcagagactggccctggatctacttcgtgaccctgatcatcatcggcagcttcttcgtgctgaacctggtgctgggcgtgctgagcggcgagttcagcaaggagagagagaaggccaaggccagaggcgacttccagaagctgagagagaagcagcagctggaggaggacctgaagggctacctggactggatcacccaggccgaggacatcgaccccgagaacgaggacgagggcatggacgaggagaagcccagaaacatgagcatgcccaccagcgagaccgagagcgtgaacaccgagaacgtggccggcggcgacatcgagggcgagaactgcggcgccagactggcccacagaatcagcaagagcaagttcagcagatactggagaagatggaacagattctgcagaagaaagtgcagagccgccgtgaagagcaacgtgttctactggctggtgatcttcctggtgttcctgaacaccctgaccatcgccagcgagcactacaaccagcccaactggctgaccgaggtgcaggacaccgccaacaaggccctgctggccctgttcaccgccgagatgctgctgaagatgtacagcctgggcctgcaggcctacttcgtgagcctgttcaacagattcgactgcttcgtggtgtgcggcggcatcctggagaccatcctggtggagaccaagatcatgagccccctgggcatcagcgtgctgagatgcgtgagactgctgagaatcttcaagatcaccagatactggaacagcctgagcaacctggtggccagcctgctgaacagcgtgagaagcatcgccagcctgctgctgctgctgttcctgttcatcatcatcttcagcctgctgggcatgcagctgttcggcggcaagttcaacttcgacgagatgcagaccagaagaagcaccttcgacaacttcccccagagcctgctgaccgtgttccagatcctgaccggcgaggactggaacagcgtgatgtacgacggcatcatggcctacggcggccccagcttccccggcatgctggtgtgcatctacttcatcatcctgttcatctgcggcaactacatcctgctgaacgtgttcctggccatcgccgtggacaacctggccgacgccgagagcctgaccagcgcccagaaggaggaggaggaggagaaggagagaaagaagctggccagaaccgccagccccgagaagaagcaggagctggtggagaagcccgccgtgggcgagagcaaggaggagaagatcgagctgaagagcatcaccgccgacggcgagagcccccccgccaccaagatcaacatggacgacctgcagcccaacgagaacgaggacaagagcccctaccccaaccccgagaccaccggcgaggaggacgaggaggagcccgagatgcccgtgggccccagacccagacccctgagcgagctgcacctgaaggagaaggccgtgcccatgcccgaggccagcgccttcttcatcttcagcagcaacaacagattcagactgcagtgccacagaatcgtgaacgacaccatcttcaccaacctgatcctgttcttcatcctgctgagcagcatcagcctggccgccgaggaccccgtgcagcacaccagcttcagaaaccacatcctgggcaacgccgactacgtgttcaccagcatcttcaccctggagatcatcctgaagatgaccgcctacggcgccttcctgcacaagggcagcttctgcagaaactacttcaacatcctggacctgctggtggtgagcgtgagcctgatcagcttcggcatccagagcagcgccatcaacgtggtgaagatcctgagagtgctgagagtgctgagacccctgagagccatcaacagagccaagggcctgaagcacgtggtgcagtgcgtgttcgtggccatcagaaccatcggcaacatcgtgatcgtgaccaccctgctgcagttcatgttcgcctgcatcggcgtgcagctgttcaagggcaagctgtacacctgcagcgacagcagcaagcagaccgaggccgagtgcaagggcaactacatcacctacaaggacggcgaggtggaccaccccatcatccagcccagaagctgggagaacagcaagttcgacttcgacaacgtgctggccgccatgatggccctgttcaccgtgagcaccttcgagggctggcccgagctgctgtacagaagcatcgacagccacaccgaggacaagggccccatctacaactacagagtggagatcagcatcttcttcatcatctacatcatcatcatcgccttcttcatgatgaacatcttcgtgggcttcgtgatcgtgaccttccaggagcagggcgagcaggagtacaagaactgcgagctggacaagaaccagagacagtgcgtggagtacgccctgaaggccagacccctgagaagatacatccccaagaaccagcaccagtacaaggtgtggtacgtggtgaacagcacctacttcgagtacctgatgttcgtgctgatcctgctgaacaccatctgcctggccatgcagcactacggccagagctgcctgttcaagatcgccatgaacatcctgaacatgctgttcaccggcctgttcaccgtggagatgatcctgaagctgatcgccttcaagcccaagggctacttcagcgacccctggaacgtgttcgacttcctgatcgtgatcggcagcatcatcgacgtgatcctgagcgagaccaaccccgccgagcacacccagtgcagccccagcatgaacgccgaggagaacagcagaatcagcatcaccttcttcagactgttcagagtgatgagactggtgaagctgctgagcagaggcgagggcatcagaaccctgctgtggaccttcatcaagagcttccaggccctgccctacgtggccctgctgatcgtgatgctgttcttcatctacgccgtgatcggcatgcaggtgttcggcaagatcgccctgaacgacaccaccgagatcaacagaaacaacaacttccagaccttcccccaggccgtgctgctgctgttcagatgcgccaccggcgaggcctggcaggacatcatgctggcctgcatgcccggcaagaagtgcgcccccgagagcgagcccagcaacagcaccgagggcgagaccccctgcggcagcagcttcgccgtgttctacttcatcagcttctacatgctgtgcgccttcctgatcatcaacctgttcgtggccgtgatcatggacaacttcgactacctgaccagagactggagcatcctgggcccccaccacctggacgagttcaagagaatctgggccgagtacgaccccgaggccaagggcagaatcaagcacctggacgtggtgaccctgctgagaagaatccagccccccctgggcttcggcaagctgtgcccccacagagtggcctgcaagagactggtgagcatgaacatgcccctgaacagcgacggcaccgtgatgttcaacgccaccctgttcgccctggtgagaaccgccctgagaatcaagaccgagggcaacctggagcaggccaacgaggagctgagagccatcatcaagaagatctggaagagaaccagcatgaagctgctggaccaggtggtgccccccgccggcgacgacgaggtgaccgtgggcaagttctacgccaccttcctgatccaggagtacttcagaaagttcaagaagagaaaggagcagggcctggtgggcaagcccagccagagaaacgccctgagcctgcaggccggcctgagaaccctgcacgacatcggccccgagatcagaagagccatcagcggcgacctgaccgccgaggaggagctggacaaggccatgaaggaggccgtgagcgccgccagcgaggacgacatcttcagaagagccggcggcctgttcggcaaccacgtgagctactaccagagcgacggcagaagcgccttcccccagaccttcaccacccagagacccctgcacatcaacaaggccggcagcagccagggcgacaccgagagccccagccacgagaagctggtggacagcaccttcacccccagcagctacagcagcaccggcagcaacgccaacatcaacaacgccaacaacaccgccctgggcagactgcccagacccgccggctaccccagcaccgtgagcaccgtggagggccacggcccccccctgagccccgccatcagagtgcaggaggtggcctggaagctgagcagcaacagatgccacagcagagagagccaggccgccatggccggccaggaggagaccagccaggacgagacctacgaggtgaagatgaaccacgacaccgaggcctgcagcgagcccagcctgctgagcaccgagatgctgagctaccaggacgacgagaacagacagctgaccctgcccgaggaggacaagagagacatcagacagagccccaagagaggcttcctgagaagcgccagcctgggcagaagagccagcttccacctggagtgcctgaagagacagaaggacagaggcggcgacatcagccagaagaccgtgctgcccctgcacctggtgcaccaccaggccctggccgtggccggcctgagccccctgctgcagagaagccacagccccgccagcttccccagacccttcgccaccccccccgccacccccggcagcagaggctggcccccccagcccgtgcccaccctgagactggagggcgtggagagcagcgagaagctgaacagcagcttccccagcatccactgcggcagctgggccgagaccacccccggcggcggcggcagcagcgccgccagaagagtgagacccgtgagcctgatggtgcccagccaggccggcgcccccggcagacagttccacggcagcgccagcagcctggtggaggccgtgctgatcagcgagggcctgggccagttcgcccaggaccccaagttcatcgaggtgaccacccaggagctggccgacgcctgcgacatgaccatcgaggagatggagagcgccgccgacaacatcctgagcggcggcgccccccagagccccaacggcgccctgctgcccttcgtgaactgcagagacgccggccaggacagagccggcggcgaggaggacgccggctgcgtgagagccagaggcagacccagcgaggaggagctgcaggacagcagagtgtacgtgagcagcctgtag

SEQ ID NO: 46994 - DNA, 3840 bp, Artificial Sequence
  derived and/or modified sequence
atggtgaacgagaacaccagaatgtacatccccgaggagaaccaccagggcagcaactacggcagccccagacccgcccacgccaacatgaacgccaacgccgccgccggcctggcccccgagcacatccccacccccggcgccgccctgagctggcaggccgccatcgacgccgccagacaggccaagctgatgggcagcgccggcaacgccaccatcagcaccgtgagcagcacccagagaaagagacagcagtacggcaagcccaagaagcagggcagcaccaccgccaccagaccccccagagccctgctgtgcctgaccctgaagaaccccatcagaagagcctgcatcagcatcgtggagtggaagcccttcgagatcatcatcctgctgaccatcttcgccaactgcgtggccctggccatctacatccccttccccgaggacgacagcaacgccaccaacagcaacctggagagagtggagtacctgttcctgatcatcttcaccgtggaggccttcctgaaggtgatcgcctacggcctgctgttccaccccaacgcctacctgagaaacggctggaacctgctggacttcatcatcgtggtggtgggcctgttcagcgccatcctggagcaggccaccaaggccgacggcgccaacgccctgggcggcaagggcgccggcttcgacgtgaaggccctgagagccttcagagtgctgagacccctgagactggtgagcggcgtgcccagcctgcaggtggtgctgaacagcatcatcaaggccatggtgcccctgctgcacatcgccctgctggtgctgttcgtgatcatcatctacgccatcatcggcctggagctgttcatgggcaagatgcacaagacctgctacaaccaggagggcatcgccgacgtgcccgccgaggacgaccccagcccctgcgccctggagaccggccacggcagacagtgccagaacggcaccgtgtgcaagcccggctgggacggccccaagcacggcatcaccaacttcgacaacttcgccttcgccatgctgaccgtgttccagtgcatcaccatggagggctggaccgacgtgctgtactgggtgaacgacgccgtgggcagagactggccctggatctacttcgtgaccctgatcatcatcggcagcttcttcgtgctgaacctggtgctgggcgtgctgagcggcgagttcagcaaggagagagagaaggccaaggccagaggcgacttccagaagctgagagagaagcagcagctggaggaggacctgaagggctacctggactggatcacccaggccgaggacatcgaccccgagaacgaggacgagggcatggacgaggagaagcccagaaacatgagcatgcccaccagcgagaccgagagcgtgaacaccgagaacgtggccggcggcgacatcgagggcgagaactgcggcgccagactggcccacagaatcagcaagagcaagttcagcagatactggagaagatggaacagattctgcagaagaaagtgcagagccgccgtgaagagcaacgtgttctactggctggtgatcttcctggtgttcctgaacaccctgaccatcgccagcgagcactacaaccagcccaactggctgaccgaggtgcaggacaccgccaacaaggccctgctggccctgttcaccgccgagatgctgctgaagatgtacagcctgggcctgcaggcctacttcgtgagcctgttcaacagattcgactgcttcgtggtgtgcggcggcatcctggagaccatcctggtggagaccaagatcatgagccccctgggcatcagcgtgctgagatgcgtgagactgctgagaatcttcaagatcaccagatactggaacagcctgagcaacctggtggccagcctgctgaacagcgtgagaagcatcgccagcctgctgctgctgctgttcctgttcatcatcatcttcagcctgctgggcatgcagctgttcggcggcaagttcaacttcgacgagatgcagaccagaagaagcaccttcgacaacttcccccagagcctgctgaccgtgttccagatcctgaccggcgaggactggaacagcgtgatgtacgacggcatcatggcctacggcggccccagcttccccggcatgctggtgtgcatctacttcatcatcctgttcatctgcggcaactacatcctgctgaacgtgttcctggccatcgccgtggacaacctggccgacgccgagagcctgaccagcgcccagaaggaggaggaggaggagaaggagagaaagaagctggccagaaccgccagccccgagaagaagcaggagctggtggagaagcccgccgtgggcgagagcaaggaggagaagatcgagctgaagagcatcaccgccgacggcgagagcccccccgccaccaagatcaacatggacgacctgcagcccaacgagaacgaggacaagagcccctaccccaaccccgagaccaccggcgaggaggacgaggaggagcccgagatgcccgtgggccccagacccagacccctgagcgagctgcacctgaaggagaaggccgtgcccatgcccgaggccagcgccttcttcatcttcagcagcaacaacagattcagactgcagtgccacagaatcgtgaacgacaccatcttcaccaacctgatcctgttcttcatcctgctgagcagcatcagcctggccgccgaggaccccgtgcagcacaccagcttcagaaaccacatcctgggcaacgccgactacgtgttcaccagcatcttcaccctggagatcatcctgaagatgaccgcctacggcgccttcctgcacaagggcagcttctgcagaaactacttcaacatcctggacctgctggtggtgagcgtgagcctgatcagcttcggcatccagagcagcgccatcaacgtggtgaagatcctgagagtgctgagagtgctgagacccctgagagccatcaacagagccaagggcctgaagcacgtggtgcagtgcgtgttcgtggccatcagaaccatcggcaacatcgtgatcgtgaccaccctgctgcagttcatgttcgcctgcatcggcgtgcagctgttcaagggcaagctgtacacctgcagcgacagcagcaagcagaccgaggccgagtgcaagggcaactacatcacctacaaggacggcgaggtggaccaccccatcatccagcccagaagctgggagaacagcaagttcgacttcgacaacgtgctggccgccatgatggccctgttcaccgtgagcaccttcgagggctggcccgagctgctgtacagaagcatcgacagccacaccgaggacaagggccccatctacaactacagagtggagatcagcatcttcttcatcatctacatcatcatcatcgccttcttcatgatgaacatcttcgtgggcttcgtgatcgtgaccttccaggagcagggcgagcaggagtacaagaactgcgagctggacaagaaccagagacagtgcgtggagtacgccctgaaggccagacccctgagaagatacatccccaagaaccagcaccagtacaaggtgtggtacgtggtgaacagcacctacttcgagtacctgatgttcgtgctgatcctgctgaacaccatctgcctggccatgcagcactacggccagagctgcctgttcaagatcgccatgaacatcctgaacatgctgttcaccggcctgttcaccgtggagatgatcctgaagctgatcgccttcaagcccaaggtgggcctgtag

SEQ ID NO: 46995 - protein, 2138 aa, Artificial Sequence
  derived and/or modified sequence
MVNENTRMYIPEENHQGSNYGSPRPAHANMNANAAAGLAPEHIPTPGAALSWQAAIDAARQAKLMGSAGNATISTVSSTQRKRQQYGKPKKQGSTTATRPPRALLCLTLKNPIRRACISIVEWKPFEIIILLTIFANCVALAIYIPFPEDDSNATNSNLERVEYLFLIIFTVEAFLKVIAYGLLFHPNAYLRNGWNLLDFIIVVVGLFSAILEQATKADGANALGGKGAGFDVKALRAFRVLRPLRLVSGVPSLQVVLNSIIKAMVPLLHIALLVLFVIIIYAIIGLELFMGKMHKTCYNQEGIADVPAEDDPSPCALETGHGRQCQNGTVCKPGWDGPKHGITNFDNFAFAMLTVFQCITMEGWTDVLYWVNDAVGRDWPWIYFVTLIIIGSFFVLNLVLGVLSGEFSKEREKAKARGDFQKLREKQQLEEDLKGYLDWITQAEDIDPENEDEGMDEEKPRNMSMPTSETESVNTENVAGGDIEGENCGARLAHRISKSKFSRYWRRWNRFCRRKCRAAVKSNVFYWLVIFLVFLNTLTIASEHYNQPNWLTEVQDTANKALLALFTAEMLLKMYSLGLQAYFVSLFNRFDCFVVCGGILETILVETKIMSPLGISVLRCVRLLRIFKITRYWNSLSNLVASLLNSVRSIASLLLLLFLFIIIFSLLGMQLFGGKFNFDEMQTRRSTFDNFPQSLLTVFQILTGEDWNSVMYDGIMAYGGPSFPGMLVCIYFIILFICGNYILLNVFLAIAVDNLADAESLTSAQKEEEEEKERKKLARTASPEKKQELVEKPAVGESKEEKIELKSITADGESPPATKINMDDLQPNENEDKSPYPNPETTGEEDEEEPEMPVGPRPRPLSELHLKEKAVPMPEASAFFIFSSNNRFRLQCHRIVNDTIFTNLILFFILLSSISLAAEDPVQHTSFRNHILFYFDIVFTTIFTIEIALKMTAYGAFLHKGSFCRNYFNILDLLVVSVSLISFGIQSSAINVVKILRVLRVLRPLRAINRAKGLKHVVQCVFVAIRTIGNIVIVTTLLQFMFACIGVQLFKGKLYTCSDSSKQTEAECKGNYITYKDGEVDHPIIQPRSWENSKFDFDNVLAAMMALFTVSTFEGWPELLYRSIDSHTEDKGPIYNYRVEISIFFIIYIIIIAFFMMNIFVGFVIVTFQEQGEQEYKNCELDKNQRQCVEYALKARPLRRYIPKNQHQYKVWYVVNSTYFEYLMFVLILLNTICLAMQHYGQSCLFKIAMNILNMLFTGLFTVEMILKLIAFKPKGYFSDPWNVFDFLIVIGSIIDVILSETNPAEHTQCSPSMNAEENSRISITFFRLFRVMRLVKLLSRGEGIRTLLWTFIKSFQALPYVALLIVMLFFIYAVIGMQVFGKIALNDTTEINRNNNFQTFPQAVLLLFRCATGEAWQDIMLACMPGKKCAPESEPSNSTEGETPCGSSFAVFYFISFYMLCAFLIINLFVAVIMDNFDYLTRDWSILGPHHLDEFKRIWAEYDPEAKGRIKHLDVVTLLRRIQPPLGFGKLCPHRVACKRLVSMNMPLNSDGTVMFNATLFALVRTALRIKTEGNLEQANEELRAIIKKIWKRTSMKLLDQVVPPAGDDEVTVGKFYATFLIQEYFRKFKKRKEQGLVGKPSQRNALSLQAGLRTLHDIGPEIRRAISGDLTAEEELDKAMKEAVSAASEDDIFRRAGGLFGNHVSYYQSDGRSAFPQTFTTQRPLHINKAGSSQGDTESPSHEKLVDSTFTPSSYSSTGSNANINNANNTALGRLPRPAGYPSTVSTVEGHGPPLSPAIRVQEVAWKLSSNRCHSRESQAAMAGQEETSQDETYEVKMNHDTEACSEPSLLSTEMLSYQDDENRQLTLPEEDKRDIRQSPKRGFLRSASLGRRASFHLECLKRQKDRGGDISQKTVLPLHLVHHQALAVAGLSPLLQRSHSPASFPRPFATPPATPGSRGWPPQPVPTLRLEGVESSEKLNSSFPSIHCGSWAETTPGGGGSSAARRVRPVSLMVPSQAGAPGRQFHGSASSLVEAVLISEGLGQFAQDPKFIEVTTQELADACDMTIEEMESAADNILSGGAPQSPNGALLPFVNCRDAGQDRAGGEEDAGCVRARGRPSEEELQDSRVYVSSL

SEQ ID NO: 46996 - DNA, 13480 bp, Artificial Sequence
  derived and/or modified sequence
ttattttttcaaatggtgtagccgccggaggtgcggtgctcagttcttggaaggggcccggatgtactgaggatgcgttacagtttcactcgaggaggcagtagtggaaaggagcagtttttggggtttgatgccataatgggaatcaggtaatcgtcggcggggaagaagaaacgctgcagaccacggcttcctcgaatcttgcgcgaaagccgccggcctcggaggagggattaatccagacccgccggggggtgttttcacatttcttcctcttcgtggctgctcctcctattaaaaccatttttggtccatggtcaatgagaatacgaggatgtacattccagaggaaaaccaccaaggttccaactatgggagcccacgccccgcccatgccaacatgaatgccaatgcggcagcggggctggcccctgagcacatccccaccccgggggctgccctgtcgtggcaggcggccatcgacgcagcccggcaggctaagctgatgggcagcgctggcaatgcgaccatctccacagtcagctccacgcagcggaagcggcagcaatatgggaaacccaagaagcagggcagcaccacggccacacgcccgccccgagccctgctctgcctgaccctgaagaaccccatccggagggcctgcatcagcattgtcgaatggaaaccatttgaaataattattttactgactatttttgccaattgtgtggccttagcgatctatattccctttccagaagatgattccaacgccaccaattccaacctggaacgagtggaatatctctttctcataatttttacggtggaagcgtttttaaaagtaatcgcctatggactcctctttcaccccaatgcctacctccgcaacggctggaacctactagattttataattgtggttgtggggctttttagtgcaattttagaacaagcaaccaaagcagatggggcaaacgctctcggagggaaaggggccggatttgatgtgaaggcgctgagggccttccgcgtgctgcgccccctgcggctggtgtccggagtcccaagtctccaggtggtcctgaattccatcatcaaggccatggtccccctgctgcacatcgccctgcttgtgctgtttgtcatcatcatctacgccatcatcggcttggagctcttcatggggaagatgcacaagacctgctacaaccaggagggcatagcagatgttccagcagaagatgacccttccccttgtgcgctggaaacgggccacgggcggcagtgccagaacggcacggtgtgcaagcccggctgggatggtcccaagcacggcatcaccaactttgacaactttgccttcgccatgctcacggtgttccagtgcatcaccatggagggctggacggacgtgctgtactgggtcaatgatgccgtaggaagggactggccctggatctattttgttacactaatcatcatagggtcattttttgtacttaacttggttctcggtgtgcttagcggagagttttccaaagagagggagaaggccaaggcccggggagatttccagaagctgcgggagaagcagcagctagaagaggatctcaaaggctacctggattggatcactcaggccgaagacatcgatcctgagaatgaggacgaaggcatggatgaggagaagccccgaaacatgagcatgcccaccagtgagaccgagtccgtcaacaccgaaaacgtggctggaggtgacatcgagggagaaaactgcggggccaggctggcccaccggatctccaagtcaaagttcagccgctactggcgccggtggaatcggttctgcagaaggaagtgccgcgccgcagtcaagtctaatgtcttctactggctggtgattttcctggtgttcctcaacacgctcaccattgcctctgagcactacaaccagcccaactggctcacagaagtccaagacacggcaaacaaggccctgctggccctgttcacggcagagatgctcctgaagatgtacagcctgggcctgcaggcctacttcgtgtccctcttcaaccgctttgactgcttcgtcgtgtgtggcggcatcctggagaccatcctggtggagaccaagatcatgtccccactgggcatctccgtgctcagatgcgtccggctgctgaggattttcaagatcacgaggtactggaactccttgagcaacctggtggcatccttgctgaactctgtgcgctccatcgcctccctgctccttctcctcttcctcttcatcatcatcttctccctcctggggatgcagctctttggaggaaagttcaactttgatgagatgcagacccggaggagcacattcgataacttcccccagtccctcctcactgtgtttcagatcctgaccggggaggactggaattcggtgatgtatgatgggatcatggcttatggcggcccctcttttccagggatgttagtctgtatttacttcatcatcctcttcatctgtggaaactatatcctactgaatgtgttcttggccattgctgtggacaacctggctgatgctgagagcctcacatctgcccaaaaggaggaggaagaggagaaggagagaaagaagctggccaggactgccagcccagagaagaaacaagagttggtggagaagccggcagtgggggaatccaaggaggagaagattgagctgaaatccatcacggctgacggagagtctccacccgccaccaagatcaacatggatgacctccagcccaatgaaaatgaggataagagcccctaccccaacccagaaactacaggagaagaggatgaggaggagccagagatgcctgtcggccctcgcccacgaccactctctgagcttcaccttaaggaaaaggcagtgcccatgccagaagccagcgcgtttttcatcttcagctctaacaacaggtttcgcctccagtgccaccgcattgtcaatgacacgatcttcaccaacctgatcctcttcttcattctgctcagcagcatttccctggctgctgaggacccggtccagcacacctccttcaggaaccatattctgttttattttgatattgtttttaccaccattttcaccattgaaattgctctgaagatgactgcttatggggctttcttgcacaagggttctttctgccggaactacttcaacatcctggacctgctggtggtcagcgtgtccctcatctcctttggcatccagtccagtgcaatcaatgtcgtgaagatcttgcgagtcctgcgagtactcaggcccctgagggccatcaacagggccaaggggctaaagcatgtggttcagtgtgtgtttgtcgccatccggaccatcgggaacatcgtgattgtcaccaccctgctgcagttcatgtttgcctgcatcggggtccagctcttcaagggaaagctgtacacctgttcagacagttccaagcagacagaggcggaatgcaagggcaactacatcacgtacaaagacggggaggttgaccaccccatcatccaaccccgcagctgggagaacagcaagtttgactttgacaatgttctggcagccatgatggccctcttcaccgtctccaccttcgaagggtggccagagctgctgtaccgctccatcgactcccacacggaagacaagggccccatctacaactaccgtgtggagatctccatcttcttcatcatctacatcatcatcatcgccttcttcatgatgaacatcttcgtgggcttcgtcatcgtcacctttcaggagcagggggagcaggagtacaagaactgtgagctggacaagaaccagcgacagtgcgtggaatacgccctcaaggcccggcccctgcggaggtacatccccaagaaccagcaccagtacaaagtgtggtacgtggtcaactccacctacttcgagtacctgatgttcgtcctcatcctgctcaacaccatctgcctggccatgcagcactacggccagagctgcctgttcaaaatcgccatgaacatcctcaacatgctcttcactggcctcttcaccgtggagatgatcctgaagctcattgccttcaaacccaagggttactttagtgatccctggaatgtttttgacttcctcatcgtaattggcagcataattgacgtcattctcagtgagactaatccagctgaacatacccaatgctctccctctatgaacgcagaggaaaactcccgcatctccatcaccttcttccgcctgttccgggtcatgcgtctggtgaagctgctgagccgtggggagggcatccggacgctgctgtggaccttcatcaagtccttccaggccctgccctatgtggccctcctgatcgtgatgctgttcttcatctacgcggtgatcgggatgcaggtgtttgggaaaattgccctgaatgataccacagagatcaaccggaacaacaactttcagaccttcccccaggccgtgctgctcctcttcaggtgtgccaccggggaggcctggcaggacatcatgctggcctgcatgccaggcaagaagtgtgccccagagtccgagcccagcaacagcacggagggtgaaacaccctgtggtagcagctttgctgtcttctacttcatcagcttctacatgctctgtgccttcctgatcatcaacctctttgtagctgtcatcatggacaactttgactacctgacaagggactggtccatccttggtccccaccacctggatgagtttaaaagaatctgggcagagtatgaccctgaagccaagggtcgtatcaaacacctggatgtggtgaccctcctccggcggattcagccgccactaggttttgggaagctgtgccctcaccgcgtggcttgcaaacgcctggtctccatgaacatgcctctgaacagcgacgggacagtcatgttcaatgccaccctgtttgccctggtcaggacggccctgaggatcaaaacagaagggaacctagaacaagccaatgaggagctgcgggcgatcatcaagaagatctggaagcggaccagcatgaagctgctggaccaggtggtgccccctgcaggtgatgatgaggtcaccgttggcaagttctacgccacgttcctgatccaggagtacttccggaagttcaagaagcgcaaagagcagggccttgtgggcaagccctcccagaggaacgcgctgtctctgcaggctggcttgcgcacactgcatgacatcgggcctgagatccgacgggccatctctggagatctcaccgctgaggaggagctggacaaggccatgaaggaggctgtgtccgctgcttctgaagatgacatcttcaggagggccggtggcctgttcggcaaccacgtcagctactaccaaagcgacggccggagcgccttcccccagaccttcaccactcagcgcccgctgcacatcaacaaggcgggcagcagccagggcgacactgagtcgccatcccacgagaagctggtggactccaccttcaccccgagcagctactcgtccaccggctccaacgccaacatcaacaacgccaacaacaccgccctgggtcgcctccctcgccccgccggctaccccagcacggtcagcactgtggagggccacgggccccccttgtcccctgccatccgggtgcaggaggtggcgtggaagctcagctccaacaggtgccactcccgggagagccaggcagccatggcgggtcaggaggagacgtctcaggatgagacctatgaagtgaagatgaaccatgacacggaggcctgcagtgagcccagcctgctctccacagagatgctctcctaccaggatgacgaaaatcggcaactgacgctcccagaggaggacaagagggacatccggcaatctccgaagaggggtttcctccgctctgcctcactaggtcgaagggcctccttccacctggaatgtctgaagcgacagaaggaccgagggggagacatctctcagaagacagtcctgcccttgcatctggttcatcatcaggcattggcagtggcaggcctgagccccctcctccagagaagccattcccctgcctcattccctaggccttttgccaccccaccagccacacctggcagccgaggctggcccccacagcccgtccccaccctgcggcttgagggggtcgagtccagtgagaaactcaacagcagcttcccatccatccactgcggctcctgggctgagaccacccccggtggcgggggcagcagcgccgcccggagagtccggcccgtctccctcatggtgcccagccaggctggggccccagggaggcagttccacggcagtgccagcagcctggtggaagcggtcttgatttcagaaggactggggcagtttgctcaagatcccaagttcatcgaggtcaccacccaggagctggccgacgcctgcgacatgaccatagaggagatggagagcgcggccgacaacatcctcagcgggggcgccccacagagccccaatggcgccctcttaccctttgtgaactgcagggacgcggggcaggaccgagccgggggcgaagaggacgcgggctgtgtgcgcgcgcggggtcgaccgagtgaggaggagctccaggacagcagggtctacgtcagcagcctgtagtgggcgctgccagatgcgggcttttttttatttgtttcaatgttcctaatgggttcgtttcagaagtgcctcactgttctcgtgacctggagttaaccggaacagcgtcttcattcatttctgttgggaccagacgcggagcctgggtgcgcgagccgccctccgggaggaaggcgcccggctgcgtctgcagaggcggggagaggaggcggcgagggtcccggggcgcgaggaaggcgcctgccctctcccagctcgcaggccccgggcccggccgcgcctccgcggggagagcaccccggcttcccgcgcgccctcaccaaaaggaccctacagcaaacgggtgtctttcgactctgcttgtagaaaccatttgcacatattctgtacgagcctcgctgtctccctagagccagggccctgcggatttggagaagggagcggggcaggacttccaggaggaccccaacccggcccggagagggaggaggaggcctccaggggcgcggagctctggggatgggcgtcgggccggcagtggtgcggctcactccgtccctgcccacctgcgacgggatcccccgaccggcacgggccacgccgagctcccggccagccgccggcccgcaggcagcgcgagggaggagctgcgccgccggctccgcccaaccaggtggtgctgagcttccgctgagcgctcttttgttttgtggtttgacacttttcttgacagcatgttgcagtttcttttcggttttggttttttttaaatgttttattttgctttcccagcgggaggggaggaagaagagtgtttacaaagtcctgtagccccctcacctttctgttttcacttttgccaatgtacatcgggtttggttttcttgtattatttaaacggttgtggtttcctttttccacggaggttcaatagaagccgctgcaggagagttttaccaaccattgtgtatgcccaataatttgttatcatttccttaggtagtaacctatttttgttctggtttggttcggttatctaatggaaaggtaactggcaatgcacttgatgtggtcttgcacatgtgggtgatagagttgggttcctttttatgctgggtgtacaggtgggtttgggagagaggagcatgcgcgagagagtctccgagtgtgtgcgacgcgtgtgtgtgtggtgggttgtctgtgtgcatatgtcctgcccgtgtatatgcacccacaccatgtgcccgtgcacaccagtgactacgcagtcccccctttctggtttagctgtgggaagatctgaatctggggccgtttgaaagcaaaaacaaaccactgtctctgcttctgaaacgggaatcagtaactctttgcattttctgtcccacaagatatgcaaaaacaatgcaataatattcatttaaaaatacaattgtgagttgtgttggcattaaaactgtattttaaaaaaagacagaaatttaagggaaaaacacaagaaggcattttgcttcaatatattccgtgtaatgttttattgcattgataatgtttctgttgaagaaaccgttatacttgaattcaggtcagtttcagtatttttcaaatatttttttaaaactgaattgcaattgtgccaagcgaatataatgaattgaattaagttggttttcggattcacttcttgtatattttgctgcatgtaaagtaaatcattttgtatttggagtgtgacaagctttacctttgaactcaagtgcttttctatatgtggttgggggaaagggaacaagttttctttagtttgcacaatgagcaaaggtatcaccagtgtagtcattattctgctctccacaaacaggtttggacattactgttttgcatatcttgtgtttgcttacatttccctcaatttttccaaaatcgtttgctgggtatgtttgtaccgcctcttgctgtgagagaccaggacctattttattccagtcttcactctgtccactctgctctggtcatctgatttggtacttctccaagaacagcccttcactgtgaggtgcagggaggcgttctgatgagccctcagtcactgggccgtcatccgcatcccccatggaagaggtagctggctttcccttcccttccaccacacggaattttctctttggcttccttaggaaagtgtacactaaccgggaggataaaattaaagtcaggctgcttggagggaggggcatcctcacttccggattcttgttgctctacccaacaaggacagcaggggctcgagaaaggaactggtgaaaccctgatccatctgaaagtcaactctgcgtgctcctttctccatcccttcctcactctggagcagcctttccttcaggcttgccctaatgtttgggctgccggggagggggccaggacaagggaagaggcatccggagctcacagtgggggtgggaacagatttttgtgggggcatctctaatgctcacttatatctccctagaacatcactcttttggtgctgtgtccttcaaatgtatgtcaacagtggtggctgaaaagggactgctttggggaaaacaggacccaaccattcacccagaattgacccattaaatctcttccagtcctagtgttccctgagcccctcttggcacatatataagtaagctagaaattacaataagggacagtccattcctctatgacagcttgctggactgattcatgacaaagtggagaaatgtactcaatactccccggttaacacagtctagaaacagagtttctttatggatatccacacccaagtcatccaaactttcttgattccttttcactgccatcaaggtcctctagaaattgagtttaggtatcatcctttgaaaagttcccaagatttctaccaggaggtacacacaggcgttccctgtctagggcaggaggactatcctagcttgaccttctgatccactagaataagactggcgtatgatgcctgtcatcagaacagactggcacaagtagtgacatcaatgaaccacagcacaatcttccaagtgatgtctactctccacctaaaatggaattttccccatgaccttgtaaaacataattgtcacatcttccatacccctcctgacagcccccaagtgtcaggagaaaacagtcaggggctaagggcccaagggacttgaagaaacaacagtttaaggtctgcagtttggtcaacttaattcttgtcctccgaccagccctgcctctttcatttccagaccttggagaatttttcccagctttgattcagaaggtactagttataacccctttccttcttcttaatccaataggcctcactctcactgggaaatccactcaaaggaacaaggcaatgtctctcattctatttcccagttccaaattccaggtgcttgtctggagtgaagctacccgttactttctcccagcttttctccacccagcatgtctcctgcccatgcagctgaagacagtggggcaacctcaggagaagcagacctttccatgcccaagttcatctcctgagcaacagtgacacctagaaaatgaggactttggaagtcacccaaaagatggtggctactttatggagtcctgaagatacacagccaccactcctaaaggcaaagaaagaaaacacgaatgtaggtcagggatagagtggaaccctggtcatcggggtttttagcctcatcgtgggaaaggtggtaaaggaggatgatggcatctccatccctagaggccaagaattgaaatatcattgtcaaggattagaaacaattcagcaaagaggccacaaaaagggcctgctgactcccagaagacctctttaaaccccaggggaggcaaatacttgctgatggagtctgggccgtttccatattttaaagaagacctgcctctggggcaaatgtcagcacagagaggactgggaggagaatggaggcaagaaaagggcatattttgactccctctgtgcctcttcccagttcatggaaggatgtgttcagcttacccacccacagtgaccagtgtggtggagccgctgacatctcaaggatctatttgggaaggtgagaagagtactcattccatctgggggtgttgttccagccacatcagcctacctggtgggatgtgggggtgtctgccaccctgtcccccctctgctgatgtccctcccctcaggctgtccaggtgccacctgacacaggctgctgtgcaaagacaggcggggaagcccaaacctcactcccagggaggccctcagccgccagagtccaggttctccagaggctacgatttgaggaggttgagggggaagacaggagggaaagaaaagtcctacaactgtcaggaatggggcacctttccctgtccctaagcaaagctccctcttcccactgccctccccagccccagctccctgtcctccccaacacctagtgagaaagacggtgcgtggaagggagtcccatgggcagatgcttacacgacctctttgtgaagcctcttctgggtttaacttcattcatcaatttattcttatgtcaaagcaatgaaacttttctttctggagccagataccaatacaacaggtgaacgggtttctgccacatctctacattgacgggggatgcttgaacaacccccctcactacacagacacacaccgttaaggcacaagggctggggttgagctctagatgagggactttcctgctcctgcaagggtgagcactgtatacacagacaaggagggtgcagtagagtgactcccttggatggaagtagtaccatcagaacctactattattatgacataaattctatttacatacattgagagaatactacaatcaacactttttcctgggatgactttaagaggtttgagccacagcacctgaagtggcaaagatccatggtctttgtagggtattagagaactcttccagtcacctctgaaagcactctagatcttgcagctgagtggatgaagtgtaacaaatctgttgcacgctgagaggagtcagaattagcatttttcatgaaagttccccacgtctctactaagaatgaggaagaaaagactaagactaggtaattacacagaggcttgaaatgttacatcaccagagccaagtcctctcccttcagatcagttactggctgctacacagggacacccccaccttttcagggcatcccatgcactccacttctcaggatctaaggaatttgactttgtagggatcccagaaagggcactgtgccacttcccctggtgtgaatcagacatacattgtacattcatttctaaaattcactcatgcacctcaaaccaaggtcattatccaaaaaaaaaaaaaaaaagctctgggtggaagagtttgtaagttttaagagagggtcatttctatgtgaggaaatgcagaaatggacagaatgattcttattcactgtttgggtctggagaattcccattgtggaaatcttagagatctcaagtttattaccaagggaataaggaaaaaaaggtgagcaggcaccaggccaagcagtggctcccttgccaaggaacctgaggctgcaggtttcagggacccccttgaagaaacctctcctggccattggccaggagaaaagagaagtctctcctgtagagtcacaagagaagcaaaagagggtgggtcactgggtcctggacatagcccccaaccccaagacttcccaatatggagaaactacaccaatgtttaaaaggggaaaaggaaagaacttgtacatcaagggaagatgatttgtaaacacacagtcctgtgcagaaagatccccttcaggaggtgtctccagcatcccaaagctgtgcgcaccttctcttttcctgcctcaggccacctatgcatccagctgcagcccatacccacacctgaaatccatctcttgaatcccagccaggttatataccaccccattgccatgtcctgtcctggccagaatgcatgctgttcccccaagcctcgtgggagtgaggccatgggaaacagagatgagcatgtctggacaagtctgtgatggtagtggatgagaataacccatggcaaaacacgcacattcattaagaaatagggcgacagattccccgttggtgaagcactgaaaggtctattactctcataatattgctgttttattttaatccaccagagctaccatgcaaaactttcctcctgtgaaacgctccagataaagctcctctaatctccccttccctcatgtcctccagctcaaacccaccttcatcccccaaaccaatctgtatcatgcctgttatcagagaggcacagaaagatgggcagtgcctccgttgtcaccattccccacacccctacacacccccacaccctcccctccaggctccacgacttcacagtcttactgttgtaaatatcattgtacagtttgtaatcctcaaataatcccattgtcagaggcctcgcctgatgggccttctcaccctcgagaaaggccagggaatctagaaggggcaacccttcaaggagagcttcagggtcatctctgtgtgagacactattgtatattcctgtaagattgcatttttatctaaggaatgatgttatttaaaaaacaaacaaaaaacacaaaaaataagaattgcaaataaatttcttaacaatgtct

SEQ ID NO: 46997 - DNA, 6417 bp, Artificial Sequence
  derived and/or modified sequence
atggttaacgagaacaccaggatgtatatacctgaggaaaatcatcagggttcaaattatggctcacccaggcccgcacacgcgaacatgaatgcaaacgctgcagcaggtttagcaccggagcatatacccacacctggggccgctctgtcctggcaagcagccatagatgccgcacgccaggctaaactaatgggtagcgccggaaacgcaacaatttcaacagtgtctagcactcagcgcaagagacagcagtatggaaaacctaaaaagcaggggagcacgaccgctaccaggccaccccgggctcttctctgcctaacactgaaaaatcccatccggcgcgcatgcattagcattgtggagtggaaaccatttgagattatcatcctgctgacaatcttcgctaattgcgtcgccctcgcaatctacatcccgtttccagaagatgattccaacgctactaactccaacttggaacgcgttgaatacctttttctcataatattcaccgtcgaagctttcttaaaggtcatagcatacggtctgctgttccacccaaacgcctatctgcggaacggctggaacctgttggacttcataatcgttgtggtgggtctctttagcgccattcttgagcaggcaaccaaagccgacggcgcgaatgcactgggcggcaaaggggcagggtttgatgttaaggcactccgggcctttcgagttctgaggcctctgcgtttagtgtccggcgtgccatcactgcaggtggtgctgaattcaatcattaaggccatggtgccactccttcacatcgccctgcttgtgctgttcgttattatcatttacgccatcatcgggctagaactgttcatgggaaaaatgcacaaaacatgttacaatcaagaagggatagcagatgtgcctgccgaggacgatccatcaccctgtgccctggaaacagggcatggtagacagtgtcagaatggcactgtttgcaagcctggctgggacgggccgaaacatggcattacgaactttgataacttcgcgttcgccatgctgacagtcttccagtgcatcaccatggagggttggactgatgtgttgtactgggtcaacgatgcagtgggtagagactggccttggatatatttcgtgactctgatcataattgggtctttcttcgtgctgaacttggtgctgggggtcctgagcggagaattcagcaaagagagagaaaaggccaaggcgcgaggtgacttccagaagctgagagaaaagcagcagctggaggaggatctgaagggctaccttgactggataactcaggctgaggacattgatcctgagaacgaagatgagggcatggacgaagaaaaaccccgcaatatgagtatgcccacctcagagactgaatctgtgaatactgagaatgtcgcgggaggggatatcgagggcgagaactgtggggctcgcctggcccacagaatctccaaatcaaaattttcacggtattggcgccggtggaacaggttttgcaggagaaagtgcagagccgccgtcaagtcaaacgtgttttactggttagtgattttccttgtgtttcttaacaccttgacaatcgcaagcgagcactataatcagccgaactggttgaccgaggtgcaggataccgccaataaggcactattggcactgttcaccgccgaaatgctgctcaaaatgtactccttgggacttcaggcgtattttgtatccctgtttaatagatttgactgctttgtcgtatgcggcggaatacttgaaactatcctggtggaaaccaagatcatgtcgccactgggcatcagcgtactgcggtgcgtgaggctgttgcgcattttcaaaattacacgctactggaacagcctgtctaacctagtggcttccctcctgaattcagtgaggagtattgcttccttgctactcctcctgttcttgttcattattattttcagcctgctaggcatgcagctcttcgggggaaaatttaacttcgacgaaatgcagaccaggcgcagtacttttgataactttccccagtccctcttaaccgtgttccagatccttaccggcgaagattggaactccgtgatgtatgacggtatcatggcatatgggggcccatctttccctggcatgctggtgtgtatctacttcatcatactttttatttgtgggaactacatcttgctaaacgtgtttttggccatcgctgtcgataacctggccgatgccgaatcattgacgtcagcacagaaagaagaggaagaggagaaggagcgaaagaaactggcccgaacggccagtcccgagaagaagcaggagctggtggagaaacctgccgtgggggagtcaaaggaggagaaaattgagctgaagtccataacggcagatggcgagtccccaccagccacgaagatcaacatggatgacttacagccaaacgagaacgaagacaaatccccctatcctaatcccgaaaccaccggggaggaagacgaagaagaacccgaaatgcctgtcggacctaggccccggccattgagcgagttacacctaaaggagaaagcagtcccaatgccagaggcaagtgcgttttttatcttcagtagtaacaaccgattccggctgcaatgtcatcgaatcgtcaatgacactattttcactaacctgatcctgttcttcatattactaagcagtatttcacttgcagccgaagatcctgtccagcacactagctttcgcaaccacatcctgttctattttgatatcgttttcacaacaatcttcacaatcgaaatcgcactgaaaatgacggcttacggggcctttctgcataaagggtccttctgtagaaattatttcaacatcctggatctgctggtcgtgtccgtgtccttgatttccttcgggattcaatcctcagccattaacgtagtaaaaatcctgcgggtgctacgcgtgcttcgcccgttacgagcaattaaccgggctaaggggctgaagcacgtggtgcaatgcgtgttcgtagcaatcagaacaattggaaatattgtgattgtgaccactcttcttcagtttatgtttgcctgtattggcgtccagttgtttaagggcaagttgtacacatgcagtgactccagcaagcagacagaggctgagtgcaagggaaattatatcacatataaggatggtgaagtggaccaccccatcatccagcccaggtcttgggagaatagtaaatttgatttcgataatgttttagctgcaatgatggccctcttcacggtgagcaccttcgagggctggcctgaattactgtaccgaagcattgacagtcacaccgaggacaaaggacccatctataactatagggtagaaattagcatattttttatcatctatatcattatcattgcgtttttcatgatgaacattttcgtaggatttgttatcgtgactttccaggagcagggtgagcaggagtataaaaactgcgagcttgataaaaaccagaggcaatgcgtggaatacgccctcaaggctcgtccgctccgcaggtacattcccaaaaatcagcatcagtacaaagtatggtatgtagtgaacagcacctactttgaatatctaatgttcgtgctgatcttgctcaacaccatttgtttggccatgcagcactacggacagtcttgtctcttcaagattgcaatgaatatcctaaacatgcttttcactggcctcttcactgtagagatgatcctcaaactgatcgcattcaaaccgaaaggatacttcagcgatccatggaatgtgttcgatttcctgatagttatcggatccattattgacgtgatcctgtctgaaaccaaccctgcagagcacacccaatgcagcccgagcatgaacgcggaggagaatagcaggatctccattacttttttcaggctgtttagagtgatgagattggtgaagttgttatcaagaggtgagggcattagaaccctactctggacttttataaaatcctttcaagccttgccatacgtggctctgttgatcgtaatgctgttttttatctatgctgtcatcgggatgcaggtctttggcaaaatcgctctgaacgacacaactgagatcaatagaaataataacttccagacttttcctcaagccgtgctgcttctattccgatgtgctaccggggaagcatggcaggacataatgctagcctgtatgcctggtaagaagtgcgctcctgaatcagagccgtccaattccacggaaggcgagaccccatgcgggagtagtttcgcagtgttctactttatctcattctacatgttgtgtgcatttctgatcatcaatctgttcgtcgctgtcatcatggacaacttcgactatcttacccgcgattggagtatcctaggaccacatcaccttgacgaattcaagaggatctgggccgaatacgatcccgaagctaaaggcaggatcaaacaccttgacgttgtcacgcttttaaggcgaattcagccaccactgggatttggaaaactttgcccgcacagggtagcatgcaagcggttagttagcatgaacatgcctcttaactctgatggcactgtgatgtttaatgccaccttgttcgcacttgtcagaaccgccctgagaatcaaaacagaggggaatcttgaacaagcaaacgaggaactgcgagccattattaagaaaatttggaaacggactagtatgaagctgctggaccaggtggttccgcctgctggcgacgacgaagttacggtggggaaattctatgctacatttctgattcaagagtactttaggaaattcaagaaacgtaaagagcaagggctggtggggaagccaagtcagcgtaacgcgttgagcctgcaggccggcctgcggacactgcatgatattggacccgagatccggcgtgctattagtggggacttgaccgcagaggaggaactggacaaagcaatgaaggaagccgtttctgcagcgtccgaggatgacattttcaggcgggcaggtggactgtttgggaaccacgtgtcatactatcagagtgacgggaggtccgcttttccacagacgtttaccacacaaaggcctctgcatattaataaagccggttcctcacaaggcgatacggaaagcccaagccacgagaaattggtggacagcacatttactccatcgtcgtatagcagtactggctctaacgccaatatcaacaacgccaataatacagctctcggccggctcccacgcccggctggctatccctcaaccgtgagtacagtggaggggcacgggccacccttgtctcctgcaatcagggtgcaggaggtggcctggaaacttagcagcaatcgttgtcatagtcgggagagtcaggccgccatggcaggtcaggaggagacatctcaggatgagacctatgaagttaagatgaatcacgatactgaggcgtgcagtgagccaagtctgctcagtacagagatgctatcctatcaggacgatgagaatcggcagctcaccctgccagaagaagataagagagatattcgccagtccccaaagagggggttccttcggagtgcttctctcggccgtagagcctcatttcatttggaatgtctcaaacgtcagaaagaccggggaggtgatatatctcaaaaaactgtgctgcctctccatctggtgcaccatcaggccctggcagtcgccggcttgtcaccgctgctgcagcgctctcattcacctgctagctttcctcggccattcgcaacccccccggccacccccggctcacggggttggcccccccaacctgttccaacactgcggttagaaggcgtggagtcttctgagaagctgaatagcagctttccttcaatccattgtggatcatgggccgagaccaccccgggcgggggtggctctagcgcagccagacgggtgcgtccggtatctctgatggtcccgtctcaggcaggggctccaggacgccaatttcacggatccgcatcaagccttgtggaggccgtactgatttcagaagggctaggacagtttgcccaggatcccaagttcatcgaggtgaccacccaagaactagccgacgcctgcgatatgacaattgaagagatggagtccgctgctgataacatcttgtctggcggagcaccccagagtcctaatggtgctctgctgccattcgtgaattgtagggatgctggccaagatagagcaggcggtgaggaggacgcagggtgtgtgcgggctaggggacgcccctctgaggaagagttgcaggacagtcgcgtctatgtatcctccttgtag

SEQ ID NO: 46998 - DNA, 6417 bp, Artificial Sequence
  derived and/or modified sequence
atggtgaatgaaaacaccaggatgtacatccctgaggagaaccaccagggcagcaactacggcagccccaggcctgcccacgccaacatgaatgccaatgctgctgctggcctggcccctgagcacatccccacccctggggccgccctgtcctggcaggccgccattgatgctgcccggcaggccaagctgatgggcagcgctggaaatgccaccatcagcacagtgagcagcacccagaggaagaggcagcagtatggcaagcccaagaagcagggcagcaccacagccacccggcccccccgggccctgctgtgcctgaccctgaagaaccccatccggcgggcctgcatcagcatcgtggagtggaagccctttgagatcatcatcctgctgaccatctttgccaactgtgtggccctggccatctacatccccttcccagaagatgacagcaatgccaccaacagcaacctggagcgggtggagtacctgttcctgatcatcttcaccgtggaggccttcctgaaggtgattgcctacggcctgctcttccaccccaatgcctacctgagaaatggctggaacctgctggacttcatcatcgtggtggtgggcctcttcagcgccatcctggagcaggccaccaaggcagatggagccaatgccctgggcggcaaaggagctggctttgatgtgaaggccctgcgggccttccgggtgctgcggcccctgcggctggtgtctggagtgcccagcctgcaggtggtgctgaacagcatcatcaaggccatggtgcccctgctgcacatcgccctgctggtgctgtttgtgatcatcatctatgccatcatcggcctggagctgttcatgggcaagatgcacaagacctgctacaaccaggagggcattgctgatgtgcctgcagaagatgaccccagcccctgtgccctggagaccggccacggccggcagtgccagaatggcaccgtgtgcaagccaggctgggatggccccaagcacggcatcaccaactttgacaactttgcctttgccatgctgactgtgttccagtgcatcaccatggagggctggacagatgtgctgtactgggtgaatgatgctgtgggccgggactggccctggatctactttgtgaccctcatcatcatcggcagcttctttgtgctgaacctggtgctgggcgtgctgtctggagagttcagcaaggagcgggagaaggccaaggcccggggggacttccagaagctgcgggagaagcagcagctggaggaggacctgaagggctacctggactggatcacccaggctgaagatattgatcctgaaaatgaagatgagggcatggatgaggagaagcccaggaacatgtccatgcccaccagcgagacagaatctgtgaacacagaaaatgtggccggcggggacatcgagggggagaactgtggggcccggctggcccaccgcatcagcaagagcaagttcagccgctactggaggcgctggaaccgcttctgcaggaggaagtgcagagctgctgtgaagagcaatgtgttctactggctggtgatcttcctggtgttcctgaacaccctgaccatcgccagcgagcactacaaccagcccaactggctgacagaggtgcaggacacagccaacaaggccctgctggccctcttcaccgctgagatgctgctgaagatgtacagcctgggcctgcaggcctactttgtgtccctcttcaacagatttgactgctttgtggtgtgtggcggcatcctggagaccatcctggtggagaccaagatcatgagccccctgggcatctctgtgctgcgctgtgtgcggctgctgcgcatcttcaagatcacccgctactggaacagcctgagcaacctggtggccagcctgctgaacagcgtgcgcagcatcgccagcctgctgctgctgctcttcctgttcatcatcatcttcagcctgctgggcatgcagctgtttggaggcaagttcaactttgatgagatgcagaccaggaggagcacctttgacaacttcccccagagcctgctgaccgtcttccagatcctgaccggggaggactggaacagcgtgatgtatgatggcatcatggcctatggaggccccagcttccctggcatgctggtgtgcatctacttcatcatcctcttcatctgtggcaactacatcctgctgaatgtgttcctggccatcgctgtggacaacctggctgatgctgagagcctgaccagcgcccagaaggaggaggaggaggagaaggagaggaagaagctggccaggacagccagccctgagaagaagcaggagctggtggagaagccagctgtgggggagagcaaggaggagaagattgagctgaagagcatcacagcagatggagagagccccccagccaccaagatcaacatggatgacctgcagcccaatgaaaatgaagacaagagcccctaccccaaccctgagaccactggagaggaggatgaggaggagcctgagatgcctgtgggcccccggccccggcccctgtctgagctgcacctgaaggagaaggctgtgcccatgcctgaggccagcgccttcttcatcttcagcagcaacaaccgcttccggctgcagtgccaccgcatcgtgaatgacaccatcttcaccaacctgatcctcttcttcatcctgctgagcagcatcagcctggccgctgaggaccctgtgcagcacaccagcttcaggaaccacatcctcttctactttgacatcgtgttcaccaccatcttcaccatcgagatcgccctgaagatgacagcctatggagccttcctgcacaagggcagcttctgcaggaactacttcaacatcctggacctgctggtggtgtctgtgtccctcatcagctttggcatccagagcagcgccatcaacgtggtgaagatcctgcgggtgctgcgggtgctgcggcccctgcgggccatcaacagagccaagggcctgaagcacgtggtgcagtgtgtgtttgtggccatccgcaccatcggcaacatcgtcatcgtgaccaccctgctgcagttcatgtttgcctgcatcggcgtgcagctgttcaagggcaagctgtacacctgcagcgacagcagcaagcagacagaagctgagtgcaagggcaactacatcacctacaaggatggagaggtggaccaccccatcatccagcccaggtcctgggagaacagcaagtttgattttgacaacgtgctggccgccatgatggccctcttcaccgtgtccacctttgagggctggccagagctgctgtaccgcagcattgacagccacacagaggacaagggccccatctacaactacagagtggagatcagcatcttcttcatcatctacatcatcatcatcgccttcttcatgatgaacatctttgtgggcttcgtcatcgtgaccttccaggagcagggcgagcaggagtacaagaactgtgagctggacaagaaccagaggcagtgtgtggagtatgccctgaaggcccggcccctgcggcgctacatccccaagaaccagcaccagtacaaggtgtggtacgtggtgaacagcacctactttgagtacctgatgtttgtgctgatcctgctgaacaccatctgcctggccatgcagcactacggccagagctgcctcttcaagatcgccatgaacatcctgaacatgctgttcaccggcctcttcaccgtggagatgatcctgaagctgattgccttcaagcccaagggctacttcagtgacccctggaatgtgtttgacttcctgattgtcatcggcagcatcattgatgtgatcctgtctgagaccaacccagctgagcacacccagtgcagccccagcatgaatgctgaggagaacagccgcatcagcatcaccttcttccgcctcttccgggtgatgaggctggtgaagctgctgagcagaggagagggcatccgcaccctgctgtggaccttcatcaagagcttccaggccctgccctacgtggccctgctgattgtgatgctgttcttcatctatgctgtgattggcatgcaggtgtttgggaagatcgccctgaatgacaccacagagatcaacagaaacaacaacttccagaccttcccccaggccgtgctgctgctcttccgctgtgccaccggggaggcctggcaggacatcatgctggcctgcatgcctgggaagaagtgtgcccctgagagcgagcccagcaacagcacagaaggagagaccccctgtggcagcagctttgctgtgttctacttcatctccttctacatgctgtgtgccttcctgatcatcaacctgtttgtggccgtcatcatggacaactttgactacctgacccgggactggagcatcctgggcccccaccacctggatgagttcaagaggatctgggccgagtatgaccctgaggccaagggccgcatcaagcacctggatgtggtgaccctgctgcggcgcatccagccccccctgggctttgggaagctgtgcccccaccgggtggcctgcaagaggctggtgtccatgaacatgcccctgaacagtgatggcaccgtgatgtttaatgccaccctgtttgccctggtgaggacagccctgcgcatcaagacagagggcaacctggagcaggccaatgaggagctgcgggccatcatcaagaagatctggaagaggacctccatgaagctgctggaccaggtggtgcccccagctggagatgatgaggtgacagtgggcaagttctacgccaccttcctgatccaggagtacttcaggaagttcaagaagaggaaggagcagggcctggtgggcaagcccagccagagaaatgccctgagcctgcaggccggcctgcggaccctgcatgacatcggccctgagatccggcgggccatcagcggggacctgacagctgaggaggagctggacaaggccatgaaggaggccgtgtctgctgcctctgaagatgacatcttcagaagagctgggggcctgtttggaaaccacgtgtcctactaccagagtgatggccgcagcgccttcccccagaccttcaccacccagaggcccctgcacatcaacaaggccggcagcagccagggcgacacagagagccccagccatgagaagctggtggacagcaccttcacccccagcagctacagcagcacaggcagcaatgccaacatcaacaatgccaacaacacagccctgggccgcctgcccaggcctgctggctaccccagcacagtgtccacagtggagggccacggcccccccctgagccctgccatccgggtgcaggaggtggcctggaagctgagcagcaaccgctgccacagccgggagagccaggccgccatggccggccaggaggagaccagccaggatgagacctatgaggtgaagatgaaccacgacacagaggcctgcagcgagcccagcctgctgagcacagagatgctgagctaccaggatgatgaaaatcggcagctgaccctgcctgaggaggacaagagggacatccggcagagccccaagaggggcttcctgcggagcgccagcctgggcagaagagccagcttccacctggagtgcctgaagaggcagaaggacagaggaggagacatcagccagaagacagtgctgcccctgcacctggtgcaccaccaggccctggccgtggccggcctgagccccctgctgcagaggagccacagccctgccagcttcccccggccctttgccaccccaccagccaccccaggcagccggggctggccaccccagcctgtgcccaccctgcggctggagggcgtggagagcagcgagaagctgaacagcagcttccccagcatccactgcggctcctgggccgagaccacccctgggggcggcggcagcagcgctgccaggagagtgcggcctgtgtccctgatggtgcccagccaggccggggcccctggccggcagttccacggcagcgccagcagcctggtggaggccgtgctgatcagcgagggcctgggccagtttgcccaggaccccaagttcatcgaggtgaccacccaggagctggctgatgcctgtgacatgaccatcgaggagatggagagcgctgctgacaacatcctgtctggaggagccccccagagccccaatggagccctgctgccctttgtgaactgcagagatgctggccaggaccgggccggcggggaggaggatgctggctgtgtgcgggcccggggccggcccagcgaggaggagctgcaggacagccgggtgtatgtgagcagcctgtag

SEQ ID NO: 46999 - DNA, 6417 bp, Artificial Sequence
  derived and/or modified sequence
atggtgaacgagaacacccggatgtacatccccgaggagaaccaccagggatccaactacggtagcccgcgcccagctcatgccaatatgaatgcgaatgctgctgccggcttggcccctgagcacattccgaccccaggcgcggccttatcctggcaggcagcgatcgatgccgcccgtcaggctaaactcatggggagcgccggaaatgcaactatttctactgtgagctctactcagcgcaaacgtcagcagtacggaaaacctaaaaaacagggcagcacaacagctacccgacccccccgtgcgttgctctgtttgaccttgaagaaccccataagacgcgcgtgtatcagcattgtggagtggaagccgtttgaaattataattcttctcaccatcttcgcaaactgcgtggctctcgctatttacattccattcccagaagatgacagcaacgccactaatagcaacctggagcgtgtggagtacctatttcttattatcttcactgtcgaggctttcctcaaagtgatcgcttacggattactcttccatcctaatgcctatctgcggaacggctggaacctgctcgactttattatcgtcgtggtggggctcttcagtgctattctcgaacaagccacaaaagccgacggggctaacgcccttgggggcaagggggccggctttgatgtaaaggctctccgcgccttccgagtgcttcgtcccttgcggctggtgtcaggcgtcccaagtctgcaggttgtgctcaacagtatcattaaggcaatggtacccctgctgcacatagccctgctggtgctattcgtgattatcatctacgcaattataggactggaactgtttatgggcaaaatgcataagacatgttataaccaggagggcattgcagatgtgcctgcggaggacgacccctccccttgtgccctggaaaccggacacggccggcagtgtcagaatggcactgtgtgcaaacccggatgggatggcccaaagcacggcattactaacttcgataactttgcctttgccatgttgacagtgtttcaatgcatcactatggagggatggaccgatgtgctctactgggtaaacgacgccgtgggccgggactggccatggatatactttgtaacactcattattataggaagctttttcgtactcaatctcgtgcttggggtcctaagcggagagttctcgaaggagagggagaaggctaaggcgcggggtgactttcagaagctgcgtgaaaagcagcaactggaagaagacttgaagggatacctggattggatcacccaggctgaagatatagacccggagaacgaggatgaggggatggatgaagagaaaccccgcaacatgtcaatgccaacctcagagacagaaagcgtcaacacggagaacgtcgccggtggtgacattgagggtgagaattgtggtgcgcgccttgcccacaggatttcaaaatctaaattttctaggtactggcgccgctggaatcgtttttgccgcaggaagtgccgagcagctgttaaatccaacgttttctactggttagtgatcttcctcgtgttccttaatacactgacgattgctagtgagcattacaaccagccaaattggctgactgaagtacaggacaccgctaataaagctctcctggctctattcaccgctgagatgctcctcaagatgtatagcctgggcctgcaagcctattttgtttccctgttcaaccggtttgattgcttcgtggtctgtggaggaatcttggagaccatactggtagaaacgaaaatcatgtctcccctgggaatttctgtgttgcggtgcgtgcggctgctcaggatttttaagataacaaggtactggaatagcctgagcaacttggtggcatcattgctcaactcagttcgaagtattgccagcctgctgttacttctgttcctttttattataatattcagcctgttggggatgcaactgttcggtggaaagttcaatttcgatgagatgcaaacacggcggtcaaccttcgataatttcccccagagtctccttactgtgtttcagattctcacaggagaggattggaactccgtgatgtacgacggtatcatggcctacggcggtccctcctttccggggatgctagtgtgcatttacttcattatcttattcatatgtggcaattatatccttctgaatgtctttctcgcaatagccgtggacaacctggccgatgccgagtctctgacaagcgcacagaaggaagaagaggaggaaaaagagaggaaaaagcttgcaaggacagcatctcctgagaaaaagcaagagctggtcgaaaaaccggctgtcggcgagagcaaagaagagaagatcgaactgaagtccattacagccgacggggagagcccgccagcaaccaaaatcaacatggacgatctgcagcccaatgagaatgaagataaatccccgtatccaaaccccgagactactggcgaggaggatgaagaggaaccggaaatgcctgtgggccctcggcctcggcccctatcagaactccaccttaaggaaaaggccgtgccaatgccagaagcctctgccttcttcatattcagttccaataatcgatttaggcttcagtgccatcggatagtgaacgatactatcttcaccaatctcatcctctttttcatcctgctgtcaagcatttccctggccgccgaagatcccgttcagcacacttcgtttcgcaaccacattctgttttattttgacatcgtgttcacaacaatcttcacaattgagatagccctaaaaatgactgcttacggcgcctttcttcacaagggcagtttctgtcggaactattttaatattctggaccttctggtggtgtctgtttcactgatcagtttcgggatccagagctcagccataaacgtggtgaagatcctgcgagttctcagagtgctgaggccgctgcgcgccatcaaccgggctaaaggcctcaagcacgtcgtgcaatgcgttttcgtagctatcaggactatcggaaacatagttatcgtgactacattactccaattcatgttcgcgtgcattggtgtgcagctgtttaaggggaagctttatacctgtagcgacagtagcaagcaaaccgaagctgaatgcaaagggaactacatcacgtacaaagatggagaagtggaccaccccatcatacagcctagatcctgggagaattccaagtttgatttcgacaacgtgctggccgccatgatggccctcttcacggtgagtacttttgaaggatggcccgagcttctctacagaagtatcgactcccacactgaggataagggtcccatttataactacagagtggagatttcgatatttttcatcatttacattatcatcatcgccttcttcatgatgaacatattcgtgggcttcgttatcgtcacattccaggaacagggagaacaagaatacaaaaattgcgaactggacaagaaccagaggcagtgtgtggagtacgcattgaaagctcgcccgctgcggcgatacatacctaaaaatcagcaccagtacaaggtttggtatgtcgtaaattctacgtacttcgaataccttatgtttgtgcttatcctcctgaataccatttgtctagcaatgcaacactacgggcagtcatgcctgttcaagatagccatgaatatcctgaacatgctctttacaggcctgtttacggtggaaatgatcctgaagctgatcgcctttaaaccaaagggctatttcagtgacccgtggaatgttttcgactttctgatcgtcattggcagcataatcgacgtgatccttagtgaaacaaatcctgcagagcacacacaatgcagcccttccatgaacgccgaggaaaatagtcgtatttcaatcaccttcttcagactctttagggtcatgaggcttgtcaagctacttagcaggggcgagggcattaggacgttgctctggacctttatcaaatcctttcaggccctcccatatgtagcactgctcatagttatgctgttcttcatctacgcggtcatcggtatgcaggtgttcggaaagatcgcactcaatgatacaactgagataaaccggaataacaattttcagacatttccccaggccgtgctgctcctgttcagatgtgcaaccggggaagcctggcaggatataatgctcgcatgtatgcccggtaagaaatgtgctcccgagagtgagccctccaattccaccgaaggcgagaccccttgcggcagcagttttgcagtgttttatttcatctccttttacatgttatgcgctttcttaataattaatttatttgtggccgtgatcatggataactttgattatctcacacgggattggtccattcttggcccacaccatctggacgaattcaagagaatttgggccgagtacgatcccgaagccaagggaaggatcaagcacctggacgttgtgacactcttgcgcaggatacagccacccctggggttcggcaaactgtgtccccaccgtgtggcctgcaagaggctggtcagtatgaatatgcctttaaactccgatgggaccgtgatgtttaatgcaaccttgtttgcactggtgcgcactgcactgcgcatcaagacagaggggaatttagagcaggccaatgaagaactccgcgcaattatcaagaaaatttggaagaggacgtccatgaaactattggatcaagtcgtcccgcctgctggcgatgatgaagtcaccgtggggaaattttatgctaccttcctgatccaggagtactttaggaagttcaagaagcgcaaggagcagggacttgtcgggaaaccctctcagaggaatgccttgagcctccaggccggcctccgcacattgcacgatatcggcccagagatcagacgggctatctccggggacctgactgcagaggaagagctggacaaagctatgaaggaggctgtgtcggctgcctctgaagatgacatatttcgccgggccggcggactgtttggaaaccatgtcagctactatcagtctgatggccggtctgcctttccccaaacatttactacacagagaccgctccacatcaataaggctggttccagccagggagataccgagagccccagccacgagaagctggtggattccacatttacgccatcctcctatagcagtacgggatctaatgctaatataaataatgccaacaatacagcactgggtcgactgccaaggccggctggttacccatcaactgtctccaccgtcgagggccatggccctcctttaagtccagcaattcgggtgcaagaggtggcttggaaactttcaagcaatcgatgccattctagagaatctcaggccgccatggccggtcaggaggagaccagtcaggatgagacctacgaggtgaagatgaaccacgacaccgaggcatgctcggaacctagccttctaagcacagagatgctcagctatcaggacgatgagaatcgtcagcttacacttcccgaggaggataagcgggatatccggcagtcccccaagcgtggatttctgagatccgcttctttaggtagacgcgcgtcgttccatttggagtgcttaaaacgacagaaggaccgggggggagatatcagccagaagactgtcctgcctttgcacctagtccaccatcaggccctggctgtcgcggggctctctccccttttgcagcgatctcacagtcccgccagcttccccaggcccttcgcaaccccacccgccaccccaggaagcagagggtggccacctcagccagtgccaactctgcgtttggagggagttgagtctagtgagaaactaaattcttcattcccctcaatccactgcgggtcctgggcagagaccactcccggcggcggtgggtcctcagcagcaaggcgggtcagaccagtctcgcttatggtccccagtcaagccggtgccccgggtcggcaatttcacgggagtgcgtcatcactcgttgaggcagtgctgatcagcgaaggattaggccagttcgctcaggatcctaaatttatagaagtaacaacccaggagctggccgatgcttgcgacatgacaatcgaggaaatggagtcagctgccgacaatatattgagcggcggcgccccgcagtctcccaacggagcactgttgccgttcgtgaactgcagggatgcaggccaggacagggccggcggagaagaagatgctggctgtgtaagagcgcgcgggcgtcctagcgaagaggaactgcaggattctagggtgtacgtgagttctctgtag

SEQ ID NO: 47000 - DNA, 6416 bp, Artificial Sequence
  derived and/or modified sequence
atggtgaatgaaaacacacgaatgtacattcccgaagagaaccaccaaggaagcaattatggatcacctcggcctgcccatgcaaacatgaatgccaatgccgcagccggattagccccagaacacattcctacacccggagccgctctcagttggcaggcagcaatcgacgcagccagacaggctaagctcatgggctctgccggtaacgctactatttccacggtgtctagtacacagagaaagcggcagcagtacgggaaaccaaaaaagcaaggctccaccactgccactcgtccccctcgggctctgctgtgtctgaccttgaagaaccccatccggcgtgcttgtatcagcatcgtggagtggaaaccctttgagattattatactgctcactatttttgctaactgtgttgcccttgcgatctacatcccttttcctgaggatgacagcaacgccacaaactcaaatctcgaacgtgtagagtatttgtttctgatcatattcaccgtagaggctttcctgaaagtaattgcttacgggctgttgttccaccctaacgcatatctgcgtaacggctggaacctgctggactttattatcgtggtcgtcggtctcttctcggccatacttgaacaagccaccaaagctgatggtgctaacgctctggggggtaaaggagcgggatttgatgtcaaagcccttagggcttttagagtgctccggcctctgcgtcttgtgtccggcgtgccatccctacaagtcgtgctcaacagtatcatcaaggccatggttccgttactgcacatagccctgctcgtgctgtttgtaattatcatttatgccatcattggcctcgagttgtttatgggtaaaatgcacaagacgtgctacaatcaggaagggattgcagatgtccctgccgaggacgatccttctccgtgtgctctagaaaccggccacggtaggcagtgccagaatggaacagtatgtaaaccaggatgggacggccctaagcacggcattactaattttgataattttgcgttcgccatgcttactgtttttcagtgcattaccatggaaggctggacagacgtcctctactgggtgaacgatgcagtgggcagggattggccatggatttatttcgtgactctcatcatcattggaagcttctttgtgcttaatctggtgctcggggtcttatcaggagaatttagcaaagagcgcgagaaagctaaggccaggggagattttcagaaactgagggaaaaacagcagctcgaagaggacctaaagggttacctggattggattacccaggctgaagatattgaccccgaaaacgaagacgaaggtatggatgaagagaagcctcgtaacatgtcaatgcctacatcagagactgaatccgtgaacacggagaatgtagccggaggggacattgaaggcgagaattgtggagccagactggcccatcgcataagtaaatcaaaattctcgagatactggcggcgttggaatcgcttctgccgaaggaagtgtcgcgcagctgtaaaatctaatgttttctactggcttgtgattttcttggtttttctgaatactctgaccattgcctccgagcattacaaccagcccaactggctcacagaggtccaggatacggctaacaaggcactgttagccctgttcacagcggagatgctcctgaaaatgtattctttagggcttcaagcctactttgtctcactgtttaatcggttcgattgctttgtggtatgtgggggtatcctcgagacaattctcgtggagaccaaaatcatgagccccctcggaatttccgtcctcaggtgcgtgcgcctgctccggatcttcaaaatcacgcgctattggaattcgctatccaatctggtagcgagcctgttaaactccgtgcgttccatcgcttcactgttgctgctgctgtttttgttcatcataatcttctctctgctggggatgcagctgttcggcggaaagttcaatttcgacgagatgcaaactcgacgctctacgtttgacaattttccacagtcacttctgaccgtgtttcagatcctaaccggggaggactggaactccgtgatgtacgacggcattatggcttatggcggaccatcattccccggtatgctggtgtgcatctacttcataatcttgttcatttgcggaaattatatcctcctgaatgtctttctggccatcgcagtggacaacttggccgatgcggagtccctgacgtccgcacagaaggaagaggaggaagagaaggagaggaagaagcttgccagaaccgccagtcccgaaaagaagcaggagctggttgagaagcccgcagtcggagagagtaaggaggagaaaattgaactcaagagcatcactgcagatggcgagtcgccgccagccactaaaatcaatatggacgacttacagcccaacgagaatgaggataagtcgccgtacccaaatcctgagaccactggcgaggaggatgaagaggagccagaaatgcctgtgggccctcgcccacgacccctgtcagaactgcacctcaaagagaaggcagtgccgatgccagaggcatccgcattttttatctttagctctaataatagattcagattgcagtgtcaccgcatagttaatgacacgatattcactaacctcatattattcttcatcttgttgagctccatctcgctcgccgcagaagatcccgtacagcatacaagctttagaaaccacatcctgttctacttcgacattgtcttcaccactatcttcactattgagatagccctgaaaatgaccgcctatggcgctttcttgcacaaaggctctttctgtaggaattattttaacatattagacctactggtagtgtcagtgagccttataagtttcgggatccagtcatctgccatcaacgtcgtcaagatcctgagagttttacgcgtgttgcgaccccttagggctatcaatcgggctaaaggcttaaagcatgtggtgcagtgcgtatttgtggctatcagaactattggaaacattgtgatcgtgacaacattgttacagtttatgttcgcctgtatcggcgttcagctgttcaagggcaagctgtatacatgcagcgactcgtctaagcagaccgaagctgagtgcaaaggaaactacattacttacaaggatggcgaagttgatcatcctatcatccaaccgaggagttgggagaactccaagttcgattttgataacgtgttggcggctatgatggccctttttaccgtgtcaacctttgaaggctggcccgagctcttgtacaggagcatcgactcgcatacagaggataagggccctatctataattatcgggttgagatatcaatcttctttatcatatacattatcatcatcgcattctttatgatgaacatcttcgtgggatttgtcattgtcacctttcaggagcagggagagcaggaatacaaaaactgcgagctggataagaaccagcgccaatgtgtggagtacgcactgaaggccagacccctgcgcaggtacatcccgaagaatcagcaccaatacaaagtatggtacgttgtcaactctacatactttgaatatctaatgtttgtcttaatactcttgaacactatctgcctggccatgcagcactacggacaatcttgcctcttcaagattgcaatgaacatactgaatatgctatttaccggcctgttcacagtcgagatgatcttaaaactgattgcattcaagcctaagggatatttttccgacccttggaacgttttcgatttcttaattgtgatcggaagcatcattgacgtgatcctctccgaaacaaaccccgctgagcacacacaatgctctccttccatgaacgctgaggagaactcaaggatatctatcaccttttttcgtcttttcagagtcatgaggttagtgaagttactgtcacgcggagaagggatccgcaccctgttatggactttcatcaagtcttttcaagcactgccatacgtggccctcctgatagtgatgctcttcttcatatatgcagtcattggcatgcaggtgtttggaaaaattgccctgaatgatactacagagatcaaccgaaacaataactttcagacattcccccaggcagtcctgctgctgttccggtgtgccacaggagaagcctggcaggatataatgctggcctgcatgcccggaaagaaatgcgcgcctgagagtgagcctagcaactctacagagggagaaacgccatgtggaagcagttttgccgtattttatttcatatccttttatatgctttgtgcttttttgattatcaatttgttcgtcgctgtcataatggataactttgactatctaactcgcgattggagtatcttgggaccacatcatctggatgaattcaagcgcatctgggctgagtatgatccagaagccaaaggtcgcattaaacatctggacgtcgtgaccttgcttaggaggatccagcctcccctcgggttcggcaagctttgtccccacagggtggcatgtaagcggcttgtgtcaatgaacatgcccctcaacagtgatgggaccgtcatgttcaatgcgacattattcgcactggttcgaaccgctctgagaatcaaaacggagggaaacctggagcaagcgaatgaggaactaagggccatcatcaaaaaaatctggaagaggacctctatgaagctgctggatcaggtggtccctcccgcaggcgacgacgaagtgacagtagggaaattctacgccacgttcctcattcaggagtatttcaggaagtttaaaaaacgcaaggagcaggggcttgtgggtaaacccagccagcggaacgcattgtcgcttcaggcaggacttaggacattgcatgacatcggccctgagattaggcgcgcaatttccggagacctcaccgccgaggaagagcttgataaggcaatgaaagaagcggtgtccgctgcatctgaggacgatatttttcgcagagctggcggactttttggaaatcatgtaagttactatcaaagtgatggtaggtctgccttcccccagacgttcacaacccagcggccactgcacattaataaagctggcagttcccagggagacaccgagagtccctctcatgagaaactcgtcgatagtactttcacaccttcctcttactctagcaccgggtctaatgccaatatcaataacgcaaataacaccgctctaggtcgactgcccaggccagcaggatatccttctacggtgtctacagtggagggtcacgggccaccattgagccctgcaatacgagtacaggaggtggcctggaagctgtctagtaataggtgccatagccgggaaagtcaagccgctatggccggacaggaggagacatcacaggatgaaacctatgaggtcaaaatgaaccacgataccgaggcctgcagcgagccaagtctcctgagcacggagatgctctcctaccaagatgacgagaacagacagttgacactgcccgaggaggacaagcgcgatatacggcagagccccaagcgcggattcctgaggtccgcctcattgggtcgcagggcttcattccatttggagtgccttaagagacagaaagatcggggtggcgacatctctcagaagactgttctgcccctgcaccttgtgcaccaccaggccctcgcagtggcaggcctatctccgctgctgcaacggagccattcaccggcaagtttccctcgcccatttgccacacctccagccactccgggaagccgcggatggccaccgcagccggtgcccacccttaggctcgagggcgtagagagttctgagaaactgaacagttcctttccttcaatccattgcggcagctgggccgaaacgacgcctggcggtggagggtcctctgccgctagaagagtgcgccctgtctcattaatggtaccctctcaagctggggcacctgggcgacagtttcatggctccgccagtagtttagtggaggcagtcctcatcagcgaaggcctgggccagtttgcacaggacccaaagttcatcgaggtaaccactcaggaattggcggatgcttgtgacatgacaattgaggagatggagagtgctgctgataacatcctgtccggaggggcaccccagtctcccaacggcgctttgctcccttttgttaattgtagggatgctggtcaggatagagctgggggtgaagaagacgcgggatgcgttagagcacggggacggccaagtgaggaagaattgcaggatagtcgagtatacgtctctagtctata

SEQ ID NO: 47001 - DNA, 6511 bp, Artificial Sequence
  derived and/or modified sequence
atggtcaatgagaatacgaggatgtacattccagaggaaaaccaccaaggttccaactatgggagcccacgccccgcccatgccaacatgaatgccaatgcggcagcggggctggcccctgagcacatccccaccccgggggctgccctgtcgtggcaggcggccatcgacgcagcccggcaggctaagctgatgggcagcgctggcaatgcgaccatctccacagtcagctccacgcagcggaagcggcagcaatatgggaaacccaagaagcagggcagcaccacggccacacgcccgccccgagccctgctctgcctgaccctgaagaaccccatccggagggcctgcatcagcattgtcgaatggaaaccatttgaaataattattttactgactatttttgccaattgtgtggccttagcgatctatattccctttccagaagatgattccaacgccaccaattccaacctggaacgagtggaatatctctttctcataatttttacggtggaagcgtttttaaaagtaatcgcctatggactcctctttcaccccaatgcctacctccgcaacggctggaacctactagattttataattgtggttgtggggctttttagtgcaattttagaacaagcaaccaaagcagatggggcaaacgctctcggagggaaaggggccggatttgatgtgaaggcgctgagggccttccgcgtgctgcgccccctgcggctggtgtccggagtcccaagtctccaggtggtcctgaattccatcatcaaggccatggtccccctgctgcacatcgccctgcttgtgctgtttgtcatcatcatctacgccatcatcggcttggagctcttcatggggaagatgcacaagacctgctacaaccaggagggcatagcagatgttccagcagaagatgacccttccccttgtgcgctggaaacgggccacgggcggcagtgccagaacggcacggtgtgcaagcccggctgggatggtcccaagcacggcatcaccaactttgacaactttgccttcgccatgctcacggtgttccagtgcatcaccatggagggctggacggacgtgctgtactgggtcaatgatgccgtaggaagggactggccctggatctattttgttacactaatcatcatagggtcattttttgtacttaacttggttctcggtgtgcttagcggagagttttccaaagagagggagaaggccaaggcccggggagatttccagaagctgcgggagaagcagcagctagaagaggatctcaaaggctacctggattggatcactcaggccgaagacatcgatcctgagaatgaggacgaaggcatggatgaggagaagccccgaaacatgagcatgcccaccagtgagaccgagtccgtcaacaccgaaaacgtggctggaggtgacatcgagggagaaaactgcggggccaggctggcccaccggatctccaagtcaaagttcagccgctactggcgccggtggaatcggttctgcagaaggaagtgccgcgccgcagtcaagtctaatgtcttctactggctggtgattttcctggtgttcctcaacacgctcaccattgcctctgagcactacaaccagcccaactggctcacagaagtccaagacacggcaaacaaggccctgctggccctgttcacggcagagatgctcctgaagatgtacagcctgggcctgcaggcctacttcgtgtccctcttcaaccgctttgactgcttcgtcgtgtgtggcggcatcctggagaccatcctggtggagaccaagatcatgtccccactgggcatctccgtgctcagatgcgtccggctgctgaggattttcaagatcacgaggtactggaactccttgagcaacctggtggcatccttgctgaactctgtgcgctccatcgcctccctgctccttctcctcttcctcttcatcatcatcttctccctcctggggatgcagctctttggaggaaagttcaactttgatgagatgcagacccggaggagcacattcgataacttcccccagtccctcctcactgtgtttcagatcctgaccggggaggactggaattcggtgatgtatgatgggatcatggcttatggcggcccctcttttccagggatgttagtctgtatttacttcatcatcctcttcatctgtggaaactatatcctactgaatgtgttcttggccattgctgtggacaacctggctgatgctgagagcctcacatctgcccaaaaggaggaggaagaggagaaggagagaaagaagctggccaggactgccagcccagagaagaaacaagagttggtggagaagccggcagtgggggaatccaaggaggagaagattgagctgaaatccatcacggctgacggagagtctccacccgccaccaagatcaacatggatgacctccagcccaatgaaaatgaggataagagcccctaccccaacccagaaactacaggagaagaggatgaggaggagccagagatgcctgtcggccctcgcccacgaccactctctgagcttcaccttaaggaaaaggcagtgcccatgccagaagccagcgcgtttttcatcttcagctctaacaacaggtttcgcctccagtgccaccgcattgtcaatgacacgatcttcaccaacctgatcctcttcttcattctgctcagcagcatttccctggctgctgaggacccggtccagcacacctccttcaggaaccatattctgttttattttgatattgtttttaccaccattttcaccattgaaattgctctgaagatgactgcttatggggctttcttgcacaagggttctttctgccggaactacttcaacatcctggacctgctggtggtcagcgtgtccctcatctcctttggcatccagtccagtgcaatcaatgtcgtgaagatcttgcgagtcctgcgagtactcaggcccctgagggccatcaacagggccaaggggctaaagcatgtggttcagtgtgtgtttgtcgccatccggaccatcgggaacatcgtgattgtcaccaccctgctgcagttcatgtttgcctgcatcggggtccagctcttcaagggaaagctgtacacctgttcagacagttccaagcagacagaggcggaatgcaagggcaactacatcacgtacaaagacggggaggttgaccaccccatcatccaaccccgcagctgggagaacagcaagtttgactttgacaatgttctggcagccatgatggccctcttcaccgtctccaccttcgaagggtggccagagctgctgtaccgctccatcgactcccacacggaagacaagggccccatctacaactaccgtgtggagatctccatcttcttcatcatctacatcatcatcatcgccttcttcatgatgaacatcttcgtgggcttcgtcatcgtcacctttcaggagcagggggagcaggagtacaagaactgtgagctggacaagaaccagcgacagtgcgtggaatacgccctcaaggcccggcccctgcggaggtacatccccaagaaccagcaccagtacaaagtgtggtacgtggtcaactccacctacttcgagtacctgatgttcgtcctcatcctgctcaacaccatctgcctggccatgcagcactacggccagagctgcctgttcaaaatcgccatgaacatcctcaacatgctcttcactggcctcttcaccgtggagatgatcctgaagctcattgccttcaaacccaagggttactttagtgatccctggaatgtttttgacttcctcatcgtaattggcagcataattgacgtcattctcagtgagactaatccagctgaacatacccaatgctctccctctatgaacgcagaggaaaactcccgcatctccatcaccttcttccgcctgttccgggtcatgcgtctggtgaagctgctgagccgtggggagggcatccggacgctgctgtggaccttcatcaagtccttccaggccctgccctatgtggccctcctgatcgtgatgctgttcttcatctacgcggtgatcgggatgcaggtgtttgggaaaattgccctgaatgataccacagagatcaaccggaacaacaactttcagaccttcccccaggccgtgctgctcctcttcaggtgtgccaccggggaggcctggcaggacatcatgctggcctgcatgccaggcaagaagtgtgccccagagtccgagcccagcaacagcacggagggtgaaacaccctgtggtagcagctttgctgtcttctacttcatcagcttctacatgctctgtgccttcctgatcatcaacctctttgtagctgtcatcatggacaactttgactacctgacaagggactggtccatccttggtccccaccacctggatgagtttaaaagaatctgggcagagtatgaccctgaagccaagggtcgtatcaaacacctggatgtggtgaccctcctccggcggattcagccgccactaggttttgggaagctgtgccctcaccgcgtggcttgcaaacgcctggtctccatgaacatgcctctgaacagcgacgggacagtcatgttcaatgccaccctgtttgccctggtcaggacggccctgaggatcaaaacagaagggaacctagaacaagccaatgaggagctgcgggcgatcatcaagaagatctggaagcggaccagcatgaagctgctggaccaggtggtgccccctgcaggtgatgatgaggtcaccgttggcaagttctacgccacgttcctgatccaggagtacttccggaagttcaagaagcgcaaagagcagggccttgtgggcaagccctcccagaggaacgcgctgtctctgcaggctggcttgcgcacactgcatgacatcgggcctgagatccgacgggccatctctggagatctcaccgctgaggaggagctggacaaggccatgaaggaggctgtgtccgctgcttctgaagatgacatcttcaggagggccggtggcctgttcggcaaccacgtcagctactaccaaagcgacggccggagcgccttcccccagaccttcaccactcagcgcccgctgcacatcaacaaggcgggcagcagccagggcgacactgagtcgccatcccacgagaagctggtggactccaccttcaccccgagcagctactcgtccaccggctccaacgccaacatcaacaacgccaacaacaccgccctgggtcgcctccctcgccccgccggctaccccagcacggtcagcactgtggagggccacgggccccccttgtcccctgccatccgggtgcaggaggtggcgtggaagctcagctccaacaggtgccactcccgggagagccaggcagccatggcgggtcaggaggagacgtctcaggatgagacctatgaagtgaagatgaaccatgacacggaggcctgcagtgagcccagcctgctctccacagagatgctctcctaccaggatgacgaaaatcggcaactgacgctcccagaggaggacaagagggacatccggcaatctccgaagaggggtttcctccgctctgcctcactaggtcgaagggcctccttccacctggaatgtctgaagcgacagaaggaccgagggggagacatctctcagaagacagtcctgcccttgcatctggttcatcatcaggcattggcagtggcaggcctgagccccctcctccagagaagccattcccctgcctcattccctaggccttttgccaccccaccagccacacctggcagccgaggctggcccccacagcccgtccccaccctgcggcttgagggggtcgagtccagtgagaaactcaacagcagcttcccatccatccactgcggctcctgggctgagaccacccccggtggcgggggcagcagcgccgcccggagagtccggcccgtctccctcatggtgcccagccaggctggggccccagggaggcagttccacggcagtgccagcagcctggtggaagcggtcttgatttcagaaggactggggcagtttgctcaagatcccaagttcatcgaggtcaccacccaggagctggccgacgcctgcgacatgaccatagaggagatggagagcgcggccgacaacatcctcagcgggggcgccccacagagccccaatggcgccctcttaccctttgtgaactgcagggacgcggggcaggaccgagccgggggcgaagaggacgcgggctgtgtgcgcgcgcggggtcgaccgagtgaggaggagctccaggacagcagggtctacgtcagcagcctgtagtgggcgctgccagatgcgggcttttttttatttgtttcaatgttcctaatgggttcgtttcagaagtgcctcactgttctcgtgacctggagtt

SEQ ID NO: 47002 - DNA, 6417 bp, Artificial Sequence
  derived and/or modified sequence
atggtgaacgagaacaccagaatgtacatccccgaggagaaccaccagggcagcaactacggcagccccagacccgcccacgccaacatgaacgccaacgccgccgccggcctggcccccgagcacatccccacccccggcgccgccctgagctggcaggccgccatcgacgccgccagacaggccaagctgatgggcagcgccggcaacgccaccatcagcaccgtgagcagcacccagagaaagagacagcagtacggcaagcccaagaagcagggcagcaccaccgccaccagaccccccagagccctgctgtgcctgaccctgaagaaccccatcagaagagcctgcatcagcatcgtggagtggaagcccttcgagatcatcatcctgctgaccatcttcgccaactgcgtggccctggccatctacatccccttccccgaggacgacagcaacgccaccaacagcaacctggagagagtggagtacctgttcctgatcatcttcaccgtggaggccttcctgaaggtgatcgcctacggcctgctgttccaccccaacgcctacctgagaaacggctggaacctgctggacttcatcatcgtggtggtgggcctgttcagcgccatcctggagcaggccaccaaggccgacggcgccaacgccctgggcggcaagggcgccggcttcgacgtgaaggccctgagagccttcagagtgctgagacccctgagactggtgagcggcgtgcccagcctgcaggtggtgctgaacagcatcatcaaggccatggtgcccctgctgcacatcgccctgctggtgctgttcgtgatcatcatctacgccatcatcggcctggagctgttcatgggcaagatgcacaagacctgctacaaccaggagggcatcgccgacgtgcccgccgaggacgaccccagcccctgcgccctggagaccggccacggcagacagtgccagaacggcaccgtgtgcaagcccggctgggacggccccaagcacggcatcaccaacttcgacaacttcgccttcgccatgctgaccgtgttccagtgcatcaccatggagggctggaccgacgtgctgtactgggtgaacgacgccgtgggcagagactggccctggatctacttcgtgaccctgatcatcatcggcagcttcttcgtgctgaacctggtgctgggcgtgctgagcggcgagttcagcaaggagagagagaaggccaaggccagaggcgacttccagaagctgagagagaagcagcagctggaggaggacctgaagggctacctggactggatcacccaggccgaggacatcgaccccgagaacgaggacgagggcatggacgaggagaagcccagaaacatgagcatgcccaccagcgagaccgagagcgtgaacaccgagaacgtggccggcggcgacatcgagggcgagaactgcggcgccagactggcccacagaatcagcaagagcaagttcagcagatactggagaagatggaacagattctgcagaagaaagtgcagagccgccgtgaagagcaacgtgttctactggctggtgatcttcctggtgttcctgaacaccctgaccatcgccagcgagcactacaaccagcccaactggctgaccgaggtgcaggacaccgccaacaaggccctgctggccctgttcaccgccgagatgctgctgaagatgtacagcctgggcctgcaggcctacttcgtgagcctgttcaacagattcgactgcttcgtggtgtgcggcggcatcctggagaccatcctggtggagaccaagatcatgagccccctgggcatcagcgtgctgagatgcgtgagactgctgagaatcttcaagatcaccagatactggaacagcctgagcaacctggtggccagcctgctgaacagcgtgagaagcatcgccagcctgctgctgctgctgttcctgttcatcatcatcttcagcctgctgggcatgcagctgttcggcggcaagttcaacttcgacgagatgcagaccagaagaagcaccttcgacaacttcccccagagcctgctgaccgtgttccagatcctgaccggcgaggactggaacagcgtgatgtacgacggcatcatggcctacggcggccccagcttccccggcatgctggtgtgcatctacttcatcatcctgttcatctgcggcaactacatcctgctgaacgtgttcctggccatcgccgtggacaacctggccgacgccgagagcctgaccagcgcccagaaggaggaggaggaggagaaggagagaaagaagctggccagaaccgccagccccgagaagaagcaggagctggtggagaagcccgccgtgggcgagagcaaggaggagaagatcgagctgaagagcatcaccgccgacggcgagagcccccccgccaccaagatcaacatggacgacctgcagcccaacgagaacgaggacaagagcccctaccccaaccccgagaccaccggcgaggaggacgaggaggagcccgagatgcccgtgggccccagacccagacccctgagcgagctgcacctgaaggagaaggccgtgcccatgcccgaggccagcgccttcttcatcttcagcagcaacaacagattcagactgcagtgccacagaatcgtgaacgacaccatcttcaccaacctgatcctgttcttcatcctgctgagcagcatcagcctggccgccgaggaccccgtgcagcacaccagcttcagaaaccacatcctgttctacttcgacatcgtgttcaccaccatcttcaccatcgagatcgccctgaagatgaccgcctacggcgccttcctgcacaagggcagcttctgcagaaactacttcaacatcctggacctgctggtggtgagcgtgagcctgatcagcttcggcatccagagcagcgccatcaacgtggtgaagatcctgagagtgctgagagtgctgagacccctgagagccatcaacagagccaagggcctgaagcacgtggtgcagtgcgtgttcgtggccatcagaaccatcggcaacatcgtgatcgtgaccaccctgctgcagttcatgttcgcctgcatcggcgtgcagctgttcaagggcaagctgtacacctgcagcgacagcagcaagcagaccgaggccgagtgcaagggcaactacatcacctacaaggacggcgaggtggaccaccccatcatccagcccagaagctgggagaacagcaagttcgacttcgacaacgtgctggccgccatgatggccctgttcaccgtgagcaccttcgagggctggcccgagctgctgtacagaagcatcgacagccacaccgaggacaagggccccatctacaactacagagtggagatcagcatcttcttcatcatctacatcatcatcatcgccttcttcatgatgaacatcttcgtgggcttcgtgatcgtgaccttccaggagcagggcgagcaggagtacaagaactgcgagctggacaagaaccagagacagtgcgtggagtacgccctgaaggccagacccctgagaagatacatccccaagaaccagcaccagtacaaggtgtggtacgtggtgaacagcacctacttcgagtacctgatgttcgtgctgatcctgctgaacaccatctgcctggccatgcagcactacggccagagctgcctgttcaagatcgccatgaacatcctgaacatgctgttcaccggcctgttcaccgtggagatgatcctgaagctgatcgccttcaagcccaagggctacttcagcgacccctggaacgtgttcgacttcctgatcgtgatcggcagcatcatcgacgtgatcctgagcgagaccaaccccgccgagcacacccagtgcagccccagcatgaacgccgaggagaacagcagaatcagcatcaccttcttcagactgttcagagtgatgagactggtgaagctgctgagcagaggcgagggcatcagaaccctgctgtggaccttcatcaagagcttccaggccctgccctacgtggccctgctgatcgtgatgctgttcttcatctacgccgtgatcggcatgcaggtgttcggcaagatcgccctgaacgacaccaccgagatcaacagaaacaacaacttccagaccttcccccaggccgtgctgctgctgttcagatgcgccaccggcgaggcctggcaggacatcatgctggcctgcatgcccggcaagaagtgcgcccccgagagcgagcccagcaacagcaccgagggcgagaccccctgcggcagcagcttcgccgtgttctacttcatcagcttctacatgctgtgcgccttcctgatcatcaacctgttcgtggccgtgatcatggacaacttcgactacctgaccagagactggagcatcctgggcccccaccacctggacgagttcaagagaatctgggccgagtacgaccccgaggccaagggcagaatcaagcacctggacgtggtgaccctgctgagaagaatccagccccccctgggcttcggcaagctgtgcccccacagagtggcctgcaagagactggtgagcatgaacatgcccctgaacagcgacggcaccgtgatgttcaacgccaccctgttcgccctggtgagaaccgccctgagaatcaagaccgagggcaacctggagcaggccaacgaggagctgagagccatcatcaagaagatctggaagagaaccagcatgaagctgctggaccaggtggtgccccccgccggcgacgacgaggtgaccgtgggcaagttctacgccaccttcctgatccaggagtacttcagaaagttcaagaagagaaaggagcagggcctggtgggcaagcccagccagagaaacgccctgagcctgcaggccggcctgagaaccctgcacgacatcggccccgagatcagaagagccatcagcggcgacctgaccgccgaggaggagctggacaaggccatgaaggaggccgtgagcgccgccagcgaggacgacatcttcagaagagccggcggcctgttcggcaaccacgtgagctactaccagagcgacggcagaagcgccttcccccagaccttcaccacccagagacccctgcacatcaacaaggccggcagcagccagggcgacaccgagagccccagccacgagaagctggtggacagcaccttcacccccagcagctacagcagcaccggcagcaacgccaacatcaacaacgccaacaacaccgccctgggcagactgcccagacccgccggctaccccagcaccgtgagcaccgtggagggccacggcccccccctgagccccgccatcagagtgcaggaggtggcctggaagctgagcagcaacagatgccacagcagagagagccaggccgccatggccggccaggaggagaccagccaggacgagacctacgaggtgaagatgaaccacgacaccgaggcctgcagcgagcccagcctgctgagcaccgagatgctgagctaccaggacgacgagaacagacagctgaccctgcccgaggaggacaagagagacatcagacagagccccaagagaggcttcctgagaagcgccagcctgggcagaagagccagcttccacctggagtgcctgaagagacagaaggacagaggcggcgacatcagccagaagaccgtgctgcccctgcacctggtgcaccaccaggccctggccgtggccggcctgagccccctgctgcagagaagccacagccccgccagcttccccagacccttcgccaccccccccgccacccccggcagcagaggctggcccccccagcccgtgcccaccctgagactggagggcgtggagagcagcgagaagctgaacagcagcttccccagcatccactgcggcagctgggccgagaccacccccggcggcggcggcagcagcgccgccagaagagtgagacccgtgagcctgatggtgcccagccaggccggcgcccccggcagacagttccacggcagcgccagcagcctggtggaggccgtgctgatcagcgagggcctgggccagttcgcccaggaccccaagttcatcgaggtgaccacccaggagctggccgacgcctgcgacatgaccatcgaggagatggagagcgccgccgacaacatcctgagcggcggcgccccccagagccccaacggcgccctgctgcccttcgtgaactgcagagacgccggccaggacagagccggcggcgaggaggacgccggctgcgtgagagccagaggcagacccagcgaggaggagctgcaggacagcagagtgtacgtgagcagcctgtag

SEQ ID NO: 47003 - protein, 2138 aa, Artificial Sequence
  derived and/or modified sequence
MVNENTRMYIPEENHQGSNYGSPRPAHANMNANAAAGLAPEHIPTPGAALSWQAAIDAARQAKLMGSAGNATISTVSSTQRKRQQYGKPKKQGSTTATRPPRALLCLTLKNPIRRACISIVEWKPFEIIILLTIFANCVALAIYIPFPEDDSNATNSNLERVEYLFLIIFTVEAFLKVIAYGLLFHPNAYLRNGWNLLDFIIVVVGLFSAILEQATKADGANALGGKGAGFDVKALRAFRVLRPLRLVSGVPSLQVVLNSIIKAMVPLLHIALLVLFVIIIYAIIGLELFMGKMHKTCYNQEGIADVPAEDDPSPCALETGHGRQCQNGTVCKPGWDGPKHGITNFDNFAFAMLTVFQCITMEGWTDVLYWVNDAVGRDWPWIYFVTLIIIGSFFVLNLVLGVLSGEFSKEREKAKARGDFQKLREKQQLEEDLKGYLDWITQAEDIDPENEDEGMDEEKPRNMSMPTSETESVNTENVAGGDIEGENCGARLAHRISKSKFSRYWRRWNRFCRRKCRAAVKSNVFYWLVIFLVFLNTLTIASEHYNQPNWLTEVQDTANKALLALFTAEMLLKMYSLGLQAYFVSLFNRFDCFVVCGGILETILVETKIMSPLGISVLRCVRLLRIFKITRYWNSLSNLVASLLNSVRSIASLLLLLFLFIIIFSLLGMQLFGGKFNFDEMQTRRSTFDNFPQSLLTVFQILTGEDWNSVMYDGIMAYGGPSFPGMLVCIYFIILFICGNYILLNVFLAIAVDNLADAESLTSAQKEEEEEKERKKLARTASPEKKQELVEKPAVGESKEEKIELKSITADGESPPATKINMDDLQPNENEDKSPYPNPETTGEEDEEEPEMPVGPRPRPLSELHLKEKAVPMPEASAFFIFSSNNRFRLQCHRIVNDTIFTNLILFFILLSSISLAAEDPVQHTSFRNHILGNADYVFTSIFTLEIILKMTAYGAFLHKGSFCRNYFNILDLLVVSVSLISFGIQSSAINVVKILRVLRVLRPLRAINRAKGLKHVVQCVFVAIRTIGNIVIVTTLLQFMFACIGVQLFKGKLYTCSDSSKQTEAECKGNYITYKDGEVDHPIIQPRSWENSKFDFDNVLAAMMALFTVSTFEGWPELLYRSIDSHTEDKGPIYNYRVEISIFFIIYIIIIAFFMMNIFVGFVIVTFQEQGEQEYKNCELDKNQRQCVEYALKARPLRRYIPKNQHQYKVWYVVNSTYFEYLMFVLILLNTICLAMQHYGQSCLFKIAMNILNMLFTGLFTVEMILKLIAFKPKHYFCDAWNTFDALIVVGSIVDIAITEVNPAEHTQCSPSMNAEENSRISITFFRLFRVMRLVKLLSRGEGIRTLLWTFIKSFQALPYVALLIVMLFFIYAVIGMQVFGKIALNDTTEINRNNNFQTFPQAVLLLFRCATGEAWQDIMLACMPGKKCAPESEPSNSTEGETPCGSSFAVFYFISFYMLCAFLIINLFVAVIMDNFDYLTRDWSILGPHHLDEFKRIWAEYDPEAKGRIKHLDVVTLLRRIQPPLGFGKLCPHRVACKRLVSMNMPLNSDGTVMFNATLFALVRTALRIKTEGNLEQANEELRAIIKKIWKRTSMKLLDQVVPPAGDDEVTVGKFYATFLIQEYFRKFKKRKEQGLVGKPSQRNALSLQAGLRTLHDIGPEIRRAISGDLTAEEELDKAMKEAVSAASEDDIFRRAGGLFGNHVSYYQSDGRSAFPQTFTTQRPLHINKAGSSQGDTESPSHEKLVDSTFTPSSYSSTGSNANINNANNTALGRLPRPAGYPSTVSTVEGHGPPLSPAIRVQEVAWKLSSNRCHSRESQAAMAGQEETSQDETYEVKMNHDTEACSEPSLLSTEMLSYQDDENRQLTLPEEDKRDIRQSPKRGFLRSASLGRRASFHLECLKRQKDRGGDISQKTVLPLHLVHHQALAVAGLSPLLQRSHSPASFPRPFATPPATPGSRGWPPQPVPTLRLEGVESSEKLNSSFPSIHCGSWAETTPGGGGSSAARRVRPVSLMVPSQAGAPGRQFHGSASSLVEAVLISEGLGQFAQDPKFIEVTTQELADACDMTIEEMESAADNILSGGAPQSPNGALLPFVNCRDAGQDRAGGEEDAGCVRARGRPSEEELQDSRVYVSSL

SEQ ID NO: 47004 - DNA, 13480 bp, Artificial Sequence
  derived and/or modified sequence
ttattttttcaaatggtgtagccgccggaggtgcggtgctcagttcttggaaggggcccggatgtactgaggatgcgttacagtttcactcgaggaggcagtagtggaaaggagcagtttttggggtttgatgccataatgggaatcaggtaatcgtcggcggggaagaagaaacgctgcagaccacggcttcctcgaatcttgcgcgaaagccgccggcctcggaggagggattaatccagacccgccggggggtgttttcacatttcttcctcttcgtggctgctcctcctattaaaaccatttttggtccatggtcaatgagaatacgaggatgtacattccagaggaaaaccaccaaggttccaactatgggagcccacgccccgcccatgccaacatgaatgccaatgcggcagcggggctggcccctgagcacatccccaccccgggggctgccctgtcgtggcaggcggccatcgacgcagcccggcaggctaagctgatgggcagcgctggcaatgcgaccatctccacagtcagctccacgcagcggaagcggcagcaatatgggaaacccaagaagcagggcagcaccacggccacacgcccgccccgagccctgctctgcctgaccctgaagaaccccatccggagggcctgcatcagcattgtcgaatggaaaccatttgaaataattattttactgactatttttgccaattgtgtggccttagcgatctatattccctttccagaagatgattccaacgccaccaattccaacctggaacgagtggaatatctctttctcataatttttacggtggaagcgtttttaaaagtaatcgcctatggactcctctttcaccccaatgcctacctccgcaacggctggaacctactagattttataattgtggttgtggggctttttagtgcaattttagaacaagcaaccaaagcagatggggcaaacgctctcggagggaaaggggccggatttgatgtgaaggcgctgagggccttccgcgtgctgcgccccctgcggctggtgtccggagtcccaagtctccaggtggtcctgaattccatcatcaaggccatggtccccctgctgcacatcgccctgcttgtgctgtttgtcatcatcatctacgccatcatcggcttggagctcttcatggggaagatgcacaagacctgctacaaccaggagggcatagcagatgttccagcagaagatgacccttccccttgtgcgctggaaacgggccacgggcggcagtgccagaacggcacggtgtgcaagcccggctgggatggtcccaagcacggcatcaccaactttgacaactttgccttcgccatgctcacggtgttccagtgcatcaccatggagggctggacggacgtgctgtactgggtcaatgatgccgtaggaagggactggccctggatctattttgttacactaatcatcatagggtcattttttgtacttaacttggttctcggtgtgcttagcggagagttttccaaagagagggagaaggccaaggcccggggagatttccagaagctgcgggagaagcagcagctagaagaggatctcaaaggctacctggattggatcactcaggccgaagacatcgatcctgagaatgaggacgaaggcatggatgaggagaagccccgaaacatgagcatgcccaccagtgagaccgagtccgtcaacaccgaaaacgtggctggaggtgacatcgagggagaaaactgcggggccaggctggcccaccggatctccaagtcaaagttcagccgctactggcgccggtggaatcggttctgcagaaggaagtgccgcgccgcagtcaagtctaatgtcttctactggctggtgattttcctggtgttcctcaacacgctcaccattgcctctgagcactacaaccagcccaactggctcacagaagtccaagacacggcaaacaaggccctgctggccctgttcacggcagagatgctcctgaagatgtacagcctgggcctgcaggcctacttcgtgtccctcttcaaccgctttgactgcttcgtcgtgtgtggcggcatcctggagaccatcctggtggagaccaagatcatgtccccactgggcatctccgtgctcagatgcgtccggctgctgaggattttcaagatcacgaggtactggaactccttgagcaacctggtggcatccttgctgaactctgtgcgctccatcgcctccctgctccttctcctcttcctcttcatcatcatcttctccctcctggggatgcagctctttggaggaaagttcaactttgatgagatgcagacccggaggagcacattcgataacttcccccagtccctcctcactgtgtttcagatcctgaccggggaggactggaattcggtgatgtatgatgggatcatggcttatggcggcccctcttttccagggatgttagtctgtatttacttcatcatcctcttcatctgtggaaactatatcctactgaatgtgttcttggccattgctgtggacaacctggctgatgctgagagcctcacatctgcccaaaaggaggaggaagaggagaaggagagaaagaagctggccaggactgccagcccagagaagaaacaagagttggtggagaagccggcagtgggggaatccaaggaggagaagattgagctgaaatccatcacggctgacggagagtctccacccgccaccaagatcaacatggatgacctccagcccaatgaaaatgaggataagagcccctaccccaacccagaaactacaggagaagaggatgaggaggagccagagatgcctgtcggccctcgcccacgaccactctctgagcttcaccttaaggaaaaggcagtgcccatgccagaagccagcgcgtttttcatcttcagctctaacaacaggtttcgcctccagtgccaccgcattgtcaatgacacgatcttcaccaacctgatcctcttcttcattctgctcagcagcatttccctggctgctgaggacccggtccagcacacctccttcaggaaccatatcctaggcaatgcagactatgtcttcactagtatctttacattagaaattatccttaagatgactgcttatggggctttcttgcacaagggttctttctgccggaactacttcaacatcctggacctgctggtggtcagcgtgtccctcatctcctttggcatccagtccagtgcaatcaatgtcgtgaagatcttgcgagtcctgcgagtactcaggcccctgagggccatcaacagggccaaggggctaaagcatgtggttcagtgtgtgtttgtcgccatccggaccatcgggaacatcgtgattgtcaccaccctgctgcagttcatgtttgcctgcatcggggtccagctcttcaagggaaagctgtacacctgttcagacagttccaagcagacagaggcggaatgcaagggcaactacatcacgtacaaagacggggaggttgaccaccccatcatccaaccccgcagctgggagaacagcaagtttgactttgacaatgttctggcagccatgatggccctcttcaccgtctccaccttcgaagggtggccagagctgctgtaccgctccatcgactcccacacggaagacaagggccccatctacaactaccgtgtggagatctccatcttcttcatcatctacatcatcatcatcgccttcttcatgatgaacatcttcgtgggcttcgtcatcgtcacctttcaggagcagggggagcaggagtacaagaactgtgagctggacaagaaccagcgacagtgcgtggaatacgccctcaaggcccggcccctgcggaggtacatccccaagaaccagcaccagtacaaagtgtggtacgtggtcaactccacctacttcgagtacctgatgttcgtcctcatcctgctcaacaccatctgcctggccatgcagcactacggccagagctgcctgttcaaaatcgccatgaacatcctcaacatgctcttcactggcctcttcaccgtggagatgatcctgaagctcattgccttcaaacccaagcactatttctgtgatgcatggaatacatttgacgccttgattgttgtgggtagcattgttgatatagcaatcaccgaggtaaacccagctgaacatacccaatgctctccctctatgaacgcagaggaaaactcccgcatctccatcaccttcttccgcctgttccgggtcatgcgtctggtgaagctgctgagccgtggggagggcatccggacgctgctgtggaccttcatcaagtccttccaggccctgccctatgtggccctcctgatcgtgatgctgttcttcatctacgcggtgatcgggatgcaggtgtttgggaaaattgccctgaatgataccacagagatcaaccggaacaacaactttcagaccttcccccaggccgtgctgctcctcttcaggtgtgccaccggggaggcctggcaggacatcatgctggcctgcatgccaggcaagaagtgtgccccagagtccgagcccagcaacagcacggagggtgaaacaccctgtggtagcagctttgctgtcttctacttcatcagcttctacatgctctgtgccttcctgatcatcaacctctttgtagctgtcatcatggacaactttgactacctgacaagggactggtccatccttggtccccaccacctggatgagtttaaaagaatctgggcagagtatgaccctgaagccaagggtcgtatcaaacacctggatgtggtgaccctcctccggcggattcagccgccactaggttttgggaagctgtgccctcaccgcgtggcttgcaaacgcctggtctccatgaacatgcctctgaacagcgacgggacagtcatgttcaatgccaccctgtttgccctggtcaggacggccctgaggatcaaaacagaagggaacctagaacaagccaatgaggagctgcgggcgatcatcaagaagatctggaagcggaccagcatgaagctgctggaccaggtggtgccccctgcaggtgatgatgaggtcaccgttggcaagttctacgccacgttcctgatccaggagtacttccggaagttcaagaagcgcaaagagcagggccttgtgggcaagccctcccagaggaacgcgctgtctctgcaggctggcttgcgcacactgcatgacatcgggcctgagatccgacgggccatctctggagatctcaccgctgaggaggagctggacaaggccatgaaggaggctgtgtccgctgcttctgaagatgacatcttcaggagggccggtggcctgttcggcaaccacgtcagctactaccaaagcgacggccggagcgccttcccccagaccttcaccactcagcgcccgctgcacatcaacaaggcgggcagcagccagggcgacactgagtcgccatcccacgagaagctggtggactccaccttcaccccgagcagctactcgtccaccggctccaacgccaacatcaacaacgccaacaacaccgccctgggtcgcctccctcgccccgccggctaccccagcacggtcagcactgtggagggccacgggccccccttgtcccctgccatccgggtgcaggaggtggcgtggaagctcagctccaacaggtgccactcccgggagagccaggcagccatggcgggtcaggaggagacgtctcaggatgagacctatgaagtgaagatgaaccatgacacggaggcctgcagtgagcccagcctgctctccacagagatgctctcctaccaggatgacgaaaatcggcaactgacgctcccagaggaggacaagagggacatccggcaatctccgaagaggggtttcctccgctctgcctcactaggtcgaagggcctccttccacctggaatgtctgaagcgacagaaggaccgagggggagacatctctcagaagacagtcctgcccttgcatctggttcatcatcaggcattggcagtggcaggcctgagccccctcctccagagaagccattcccctgcctcattccctaggccttttgccaccccaccagccacacctggcagccgaggctggcccccacagcccgtccccaccctgcggcttgagggggtcgagtccagtgagaaactcaacagcagcttcccatccatccactgcggctcctgggctgagaccacccccggtggcgggggcagcagcgccgcccggagagtccggcccgtctccctcatggtgcccagccaggctggggccccagggaggcagttccacggcagtgccagcagcctggtggaagcggtcttgatttcagaaggactggggcagtttgctcaagatcccaagttcatcgaggtcaccacccaggagctggccgacgcctgcgacatgaccatagaggagatggagagcgcggccgacaacatcctcagcgggggcgccccacagagccccaatggcgccctcttaccctttgtgaactgcagggacgcggggcaggaccgagccgggggcgaagaggacgcgggctgtgtgcgcgcgcggggtcgaccgagtgaggaggagctccaggacagcagggtctacgtcagcagcctgtagtgggcgctgccagatgcgggcttttttttatttgtttcaatgttcctaatgggttcgtttcagaagtgcctcactgttctcgtgacctggagttaaccggaacagcgtcttcattcatttctgttgggaccagacgcggagcctgggtgcgcgagccgccctccgggaggaaggcgcccggctgcgtctgcagaggcggggagaggaggcggcgagggtcccggggcgcgaggaaggcgcctgccctctcccagctcgcaggccccgggcccggccgcgcctccgcggggagagcaccccggcttcccgcgcgccctcaccaaaaggaccctacagcaaacgggtgtctttcgactctgcttgtagaaaccatttgcacatattctgtacgagcctcgctgtctccctagagccagggccctgcggatttggagaagggagcggggcaggacttccaggaggaccccaacccggcccggagagggaggaggaggcctccaggggcgcggagctctggggatgggcgtcgggccggcagtggtgcggctcactccgtccctgcccacctgcgacgggatcccccgaccggcacgggccacgccgagctcccggccagccgccggcccgcaggcagcgcgagggaggagctgcgccgccggctccgcccaaccaggtggtgctgagcttccgctgagcgctcttttgttttgtggtttgacacttttcttgacagcatgttgcagtttcttttcggttttggttttttttaaatgttttattttgctttcccagcgggaggggaggaagaagagtgtttacaaagtcctgtagccccctcacctttctgttttcacttttgccaatgtacatcgggtttggttttcttgtattatttaaacggttgtggtttcctttttccacggaggttcaatagaagccgctgcaggagagttttaccaaccattgtgtatgcccaataatttgttatcatttccttaggtagtaacctatttttgttctggtttggttcggttatctaatggaaaggtaactggcaatgcacttgatgtggtcttgcacatgtgggtgatagagttgggttcctttttatgctgggtgtacaggtgggtttgggagagaggagcatgcgcgagagagtctccgagtgtgtgcgacgcgtgtgtgtgtggtgggttgtctgtgtgcatatgtcctgcccgtgtatatgcacccacaccatgtgcccgtgcacaccagtgactacgcagtcccccctttctggtttagctgtgggaagatctgaatctggggccgtttgaaagcaaaaacaaaccactgtctctgcttctgaaacgggaatcagtaactctttgcattttctgtcccacaagatatgcaaaaacaatgcaataatattcatttaaaaatacaattgtgagttgtgttggcattaaaactgtattttaaaaaaagacagaaatttaagggaaaaacacaagaaggcattttgcttcaatatattccgtgtaatgttttattgcattgataatgtttctgttgaagaaaccgttatacttgaattcaggtcagtttcagtatttttcaaatatttttttaaaactgaattgcaattgtgccaagcgaatataatgaattgaattaagttggttttcggattcacttcttgtatattttgctgcatgtaaagtaaatcattttgtatttggagtgtgacaagctttacctttgaactcaagtgcttttctatatgtggttgggggaaagggaacaagttttctttagtttgcacaatgagcaaaggtatcaccagtgtagtcattattctgctctccacaaacaggtttggacattactgttttgcatatcttgtgtttgcttacatttccctcaatttttccaaaatcgtttgctgggtatgtttgtaccgcctcttgctgtgagagaccaggacctattttattccagtcttcactctgtccactctgctctggtcatctgatttggtacttctccaagaacagcccttcactgtgaggtgcagggaggcgttctgatgagccctcagtcactgggccgtcatccgcatcccccatggaagaggtagctggctttcccttcccttccaccacacggaattttctctttggcttccttaggaaagtgtacactaaccgggaggataaaattaaagtcaggctgcttggagggaggggcatcctcacttccggattcttgttgctctacccaacaaggacagcaggggctcgagaaaggaactggtgaaaccctgatccatctgaaagtcaactctgcgtgctcctttctccatcccttcctcactctggagcagcctttccttcaggcttgccctaatgtttgggctgccggggagggggccaggacaagggaagaggcatccggagctcacagtgggggtgggaacagatttttgtgggggcatctctaatgctcacttatatctccctagaacatcactcttttggtgctgtgtccttcaaatgtatgtcaacagtggtggctgaaaagggactgctttggggaaaacaggacccaaccattcacccagaattgacccattaaatctcttccagtcctagtgttccctgagcccctcttggcacatatataagtaagctagaaattacaataagggacagtccattcctctatgacagcttgctggactgattcatgacaaagtggagaaatgtactcaatactccccggttaacacagtctagaaacagagtttctttatggatatccacacccaagtcatccaaactttcttgattccttttcactgccatcaaggtcctctagaaattgagtttaggtatcatcctttgaaaagttcccaagatttctaccaggaggtacacacaggcgttccctgtctagggcaggaggactatcctagcttgaccttctgatccactagaataagactggcgtatgatgcctgtcatcagaacagactggcacaagtagtgacatcaatgaaccacagcacaatcttccaagtgatgtctactctccacctaaaatggaattttccccatgaccttgtaaaacataattgtcacatcttccatacccctcctgacagcccccaagtgtcaggagaaaacagtcaggggctaagggcccaagggacttgaagaaacaacagtttaaggtctgcagtttggtcaacttaattcttgtcctccgaccagccctgcctctttcatttccagaccttggagaatttttcccagctttgattcagaaggtactagttataacccctttccttcttcttaatccaataggcctcactctcactgggaaatccactcaaaggaacaaggcaatgtctctcattctatttcccagttccaaattccaggtgcttgtctggagtgaagctacccgttactttctcccagcttttctccacccagcatgtctcctgcccatgcagctgaagacagtggggcaacctcaggagaagcagacctttccatgcccaagttcatctcctgagcaacagtgacacctagaaaatgaggactttggaagtcacccaaaagatggtggctactttatggagtcctgaagatacacagccaccactcctaaaggcaaagaaagaaaacacgaatgtaggtcagggatagagtggaaccctggtcatcggggtttttagcctcatcgtgggaaaggtggtaaaggaggatgatggcatctccatccctagaggccaagaattgaaatatcattgtcaaggattagaaacaattcagcaaagaggccacaaaaagggcctgctgactcccagaagacctctttaaaccccaggggaggcaaatacttgctgatggagtctgggccgtttccatattttaaagaagacctgcctctggggcaaatgtcagcacagagaggactgggaggagaatggaggcaagaaaagggcatattttgactccctctgtgcctcttcccagttcatggaaggatgtgttcagcttacccacccacagtgaccagtgtggtggagccgctgacatctcaaggatctatttgggaaggtgagaagagtactcattccatctgggggtgttgttccagccacatcagcctacctggtgggatgtgggggtgtctgccaccctgtcccccctctgctgatgtccctcccctcaggctgtccaggtgccacctgacacaggctgctgtgcaaagacaggcggggaagcccaaacctcactcccagggaggccctcagccgccagagtccaggttctccagaggctacgatttgaggaggttgagggggaagacaggagggaaagaaaagtcctacaactgtcaggaatggggcacctttccctgtccctaagcaaagctccctcttcccactgccctccccagccccagctccctgtcctccccaacacctagtgagaaagacggtgcgtggaagggagtcccatgggcagatgcttacacgacctctttgtgaagcctcttctgggtttaacttcattcatcaatttattcttatgtcaaagcaatgaaacttttctttctggagccagataccaatacaacaggtgaacgggtttctgccacatctctacattgacgggggatgcttgaacaacccccctcactacacagacacacaccgttaaggcacaagggctggggttgagctctagatgagggactttcctgctcctgcaagggtgagcactgtatacacagacaaggagggtgcagtagagtgactcccttggatggaagtagtaccatcagaacctactattattatgacataaattctatttacatacattgagagaatactacaatcaacactttttcctgggatgactttaagaggtttgagccacagcacctgaagtggcaaagatccatggtctttgtagggtattagagaactcttccagtcacctctgaaagcactctagatcttgcagctgagtggatgaagtgtaacaaatctgttgcacgctgagaggagtcagaattagcatttttcatgaaagttccccacgtctctactaagaatgaggaagaaaagactaagactaggtaattacacagaggcttgaaatgttacatcaccagagccaagtcctctcccttcagatcagttactggctgctacacagggacacccccaccttttcagggcatcccatgcactccacttctcaggatctaaggaatttgactttgtagggatcccagaaagggcactgtgccacttcccctggtgtgaatcagacatacattgtacattcatttctaaaattcactcatgcacctcaaaccaaggtcattatccaaaaaaaaaaaaaaaaagctctgggtggaagagtttgtaagttttaagagagggtcatttctatgtgaggaaatgcagaaatggacagaatgattcttattcactgtttgggtctggagaattcccattgtggaaatcttagagatctcaagtttattaccaagggaataaggaaaaaaaggtgagcaggcaccaggccaagcagtggctcccttgccaaggaacctgaggctgcaggtttcagggacccccttgaagaaacctctcctggccattggccaggagaaaagagaagtctctcctgtagagtcacaagagaagcaaaagagggtgggtcactgggtcctggacatagcccccaaccccaagacttcccaatatggagaaactacaccaatgtttaaaaggggaaaaggaaagaacttgtacatcaagggaagatgatttgtaaacacacagtcctgtgcagaaagatccccttcaggaggtgtctccagcatcccaaagctgtgcgcaccttctcttttcctgcctcaggccacctatgcatccagctgcagcccatacccacacctgaaatccatctcttgaatcccagccaggttatataccaccccattgccatgtcctgtcctggccagaatgcatgctgttcccccaagcctcgtgggagtgaggccatgggaaacagagatgagcatgtctggacaagtctgtgatggtagtggatgagaataacccatggcaaaacacgcacattcattaagaaatagggcgacagattccccgttggtgaagcactgaaaggtctattactctcataatattgctgttttattttaatccaccagagctaccatgcaaaactttcctcctgtgaaacgctccagataaagctcctctaatctccccttccctcatgtcctccagctcaaacccaccttcatcccccaaaccaatctgtatcatgcctgttatcagagaggcacagaaagatgggcagtgcctccgttgtcaccattccccacacccctacacacccccacaccctcccctccaggctccacgacttcacagtcttactgttgtaaatatcattgtacagtttgtaatcctcaaataatcccattgtcagaggcctcgcctgatgggccttctcaccctcgagaaaggccagggaatctagaaggggcaacccttcaaggagagcttcagggtcatctctgtgtgagacactattgtatattcctgtaagattgcatttttatctaaggaatgatgttatttaaaaaacaaacaaaaaacacaaaaaataagaattgcaaataaatttcttaacaatgtct

SEQ ID NO: 47005 - DNA, 6417 bp, Artificial Sequence
  derived and/or modified sequence
atggtcaacgagaataccaggatgtatatacccgaggagaatcaccaaggctccaactacggttcacctaggcctgctcacgcgaatatgaacgcaaacgccgccgccggactggctcccgagcacatcccaacacccggcgccgctctatcgtggcaggccgctatagacgctgcccggcaagccaaactaatgggctccgcaggaaacgcaactatctcaacagtgagtagtactcaaagaaaaagacagcaatatggcaagcctaagaaacagggatccaccactgccactcgaccgccccgagccttactatgcctgaccttgaagaaccccataaggagggcttgtatctcaattgtggaatggaagccattcgagatcattatcttgttgaccatcttcgcaaactgtgtggctttggctatctacataccatttcctgaggacgacagcaacgcgacgaactcgaatctggagcgagtcgaatatctgtttctgatcatcttcactgtggaggcctttctgaaagttattgcttacgggttgctgttccatccaaacgcatatttacgcaacgggtggaatcttctggactttattatagtggtggtgggcctgttctccgccatactcgagcaggctacaaaagcagatggcgcaaatgctcttggtggtaaaggcgcggggttcgatgttaaggcgttaagggcatttagagtcctgcgtccattgcgcctggtgtccggagtgccaagtctgcaagtggtccttaacagtatcatcaaagccatggtcccattgctgcatattgctctgctggtgctcttcgttatcattatttatgcgattattggcctggaactgttcatgggcaagatgcacaaaacatgctacaaccaggagggcatcgctgatgtcccagcagaagacgatccatccccttgcgctctggagaccggtcacgggagacagtgccagaatgggacagtgtgtaagccaggctgggatggaccgaaacatggaattactaacttcgataatttcgccttcgctatgctgaccgtcttccagtgtattaccatggagggatggacagacgtgctttactgggtgaatgatgccgtgggaagagactggccttggatctatttcgtgacactgattatcataggcagctttttcgtgttgaaccttgttttgggtgtgctctctggcgaattctccaaggagcgggagaaagcaaaggctagaggagacttccagaagcttcgggagaaacagcagctagaggaagacttgaaagggtaccttgactggatcacacaggccgaagatattgacccggagaacgaagatgagggcatggacgaagagaagcctcggaatatgagtatgcctactagtgaaaccgagtccgtaaacacagagaacgtggcgggaggcgatattgaaggtgaaaactgtggggctaggctggcccaccgcatttcaaagagtaagttttctaggtattggagacgctggaatagattttgccgtagaaaatgtcgcgccgccgtgaaatctaacgtgttttactggctagtcatttttttggtcttcctcaatacccttactatcgcatcagaacactacaaccaacctaattggttgacagaagtgcaggatactgccaataaggcacttcttgccctattcacagccgagatgctacttaaaatgtactctctgggcctgcaagcctacttcgtctcactgttcaacaggtttgattgctttgtggtctgtgggggtattcttgagacgattttggtggagactaagataatgagcccattgggcattagcgtgcttcgctgcgtacgattactcaggatattcaagattacacgatactggaacagtctgtccaacctggtggcctcactgctaaattctgtgaggagtatcgcaagtctgctgctgctgttatttctgttcattatcatcttctcgctattaggtatgcagctgttcggtggcaagtttaactttgacgagatgcagactcggagatcaactttcgataacttccctcagtccctgctgacggtctttcagattttgacaggtgaagactggaatagtgtgatgtacgatggtattatggcctacgggggaccttctttccccggaatgcttgtgtgcatttactttattatcttattcatttgcggaaattacatcttgcttaacgtcttcttggctatagccgtggacaatctagcggacgctgagtctctaacttctgctcagaaagaagaggaggaggagaaggaaagaaagaaattagctaggacagcaagccccgagaaaaaacaagagctagtggaaaagccagcagtgggcgaatccaaagaagagaagatcgagctgaagagtattactgctgatggcgagagtcctccagctaccaagatcaacatggatgatctgcagcccaatgaaaatgaggacaagagtccataccctaaccctgaaaccaccggcgaggaggacgaggaggaacccgagatgccagtgggacctaggcctaggccgttgtctgaactgcacctcaaggaaaaggcagtgccgatgccagaagcctccgctttcttcatcttttcctctaacaatcggttccgtctgcaatgccatcgaatcgttaacgatacgatttttacgaacctcatcctgtttttcatcttgttatcatcaatttctcttgccgcggaggacccggtccagcatacttctttcaggaaccatattctgggcaatgccgattacgtgtttacatcaatcttcaccttagagataattctcaagatgacagcctacggagcgttcctgcacaagggatcattctgccggaactactttaacatcttagacctgctagtggtgagtgtttcactcattagttttggcattcagtcttcagcgataaacgtggtcaagatcctgcgtgtccttcgggtgctgcggcctctccgggctattaaccgggctaaagggcttaaacatgttgttcaatgtgtttttgtggccatccgaactattgggaacattgtcatcgtgaccaccctcctccagttcatgttcgcttgtatcggtgtgcaactattcaaagggaaactgtacacttgtagcgactcttcaaagcagaccgaagccgagtgcaaaggtaattatatcacctacaaagacggcgaggtggatcaccctattatacagcccaggtcatgggagaactcgaagttcgactttgacaacgtgctggctgcgatgatggcactatttactgtgtccacctttgaaggttggccagaactcttgtatcggtctatcgatagtcataccgaagacaaagggcccatttataattacagagttgaaatctctatcttttttattatctatattataataattgccttctttatgatgaacatttttgtcgggttcgtgattgttacatttcaggagcagggcgagcaagaatacaagaactgtgagctcgataaaaatcagagacagtgtgtcgagtacgcactgaaagcgcgacctcttagaagatacattcctaagaatcaacaccagtataaggtgtggtacgtcgtgaacagcacctacttcgagtatttgatgtttgtactcatactgctcaacactatttgtcttgcaatgcagcactatggccagtcttgcctgtttaaaatcgcgatgaacattctcaacatgctgtttacaggtctttttaccgtagaaatgatcctgaaattgatcgcatttaagcctaagcattacttctgtgacgcgtggaatacattcgacgccctgattgtagtggggagcatcgtggatattgccatcaccgaggttaacccagcggagcacacccagtgctccccctcgatgaatgccgaggaaaacagtagaatctctataacgtttttccggttgttccgcgtaatgagactagttaaactcctcagtaggggcgagggaatcagaactctgttatggaccttcataaagagctttcaggctctgccttacgttgctctgcttattgtgatgctgtttttcatttatgcggtaatcggtatgcaggtatttgggaaaattgcactgaatgatacaactgagattaaccgcaacaacaatttccaaactttcccccaggccgtgctcttgctgttcagatgcgctactggagaggcgtggcaggatataatgctggcctgcatgcctggcaagaagtgcgcacctgaatcagaacctagcaattctactgagggtgagaccccttgcggtagtagtttcgcagtgttttattttatttctttctatatgttgtgcgcctttttaattattaaccttttcgtagccgtcattatggataattttgactatctgacccgtgattggtccatcctgggcccccaccacctggacgaattcaaaaggatttgggccgagtatgaccctgaagccaaaggtcggataaaacatctggatgtggtaacattgctaagacgtatccaaccacccctcggctttggaaaactgtgtccccaccgtgtcgcgtgtaaacgtcttgttagcatgaacatgcccttgaattccgacgggaccgtgatgtttaacgctaccctctttgcactcgttcgtacagcactgagaatcaaaaccgaggggaatctcgagcaggccaacgaagaactgcgcgccattataaaaaagatctggaaaaggacctccatgaagcttctggaccaggtagtcccaccggctggcgacgatgaggtaacagtgggaaaattttacgcaacctttctgatccaggaatactttaggaagtttaaaaaacgaaaggaacagggactcgtgggcaagccttcccagcgtaatgctctcagcctgcaggcggggctgcgtaccttacacgacattggccctgaaatcaggcgtgcgatcagcggagatttaaccgccgaagaggagctcgacaaggcaatgaaggaggcggtctccgccgcatctgaagacgacatctttagaagggctggggggctttttggcaaccacgtgagctattaccaatcagacgggcgatctgctttcccccagactttcaccacccagagacctctccatataaataaagctgggtcatcacagggagataccgaatctccttctcacgagaagctggtggattccacatttactccttccagctacagttccacaggatcaaacgcaaatatcaacaatgcaaataacaccgccctcggacgactcccacgcccggccggttatccctccactgtgagtaccgtggaaggacatggcccacctctgtctcctgctattcgagtccaggaggtcgcatggaagttatcttctaataggtgtcactcaagggagtcacaggcagcgatggcaggtcaggaggagaccagtcaggacgagacttatgaggtcaaaatgaaccatgataccgaggcgtgcagcgagccctctctactgtccacagaaatgttgtcttaccaagacgacgagaatcggcaactcacactacccgaggaagataagagagatatacgacaaagccctaagcggggattcttgcggagcgcctctttgggacgccgggccagttttcacctggagtgcctaaagcgtcagaaggatcgagggggtgatatttcacaaaagacagtcttacctctgcatctagtccaccaccaagctcttgccgttgctggcttgtcaccgctcctgcaaagaagtcacagccctgccagtttcccccggccctttgctacacccccagcaactccgggctcccgcgggtggcctccacagcctgtgcccaccctcagactggagggtgttgagtcttctgaaaagctgaatagtagtttcccttctatacattgcggaagctgggccgagactacacccggaggcgggggctcttccgcagcccggcgtgtccgacccgtgagtctgatggtgcctagccaagccggagcccctggacgccagtttcatggatctgcatcctcactggtggaggccgtgttaattagcgagggacttgggcagttcgcccaggatcctaaatttatagaggtgacaacacaggaactcgccgacgcctgcgatatgaccattgaagaaatggagagtgctgctgataatatcttgagcgggggcgcaccacagtcccctaatggggccctgctcccctttgtcaattgtcgtgacgctggccaggatagggccgggggcgaggaagatgccggctgcgtgcgcgccagagggcgtccctccgaggaggaattgcaggactctagagtctatgttagttctctgtag

SEQ ID NO: 47006 - DNA, 6417 bp, Artificial Sequence
  derived and/or modified sequence
atggtgaatgaaaacaccaggatgtacatccctgaggagaaccaccagggcagcaactacggcagccccaggcctgcccacgccaacatgaatgccaatgctgctgctggcctggcccctgagcacatccccacccctggggccgccctgtcctggcaggccgccattgatgctgcccggcaggccaagctgatgggcagcgctggaaatgccaccatcagcacagtgagcagcacccagaggaagaggcagcagtatggcaagcccaagaagcagggcagcaccacagccacccggcccccccgggccctgctgtgcctgaccctgaagaaccccatccggcgggcctgcatcagcatcgtggagtggaagccctttgagatcatcatcctgctgaccatctttgccaactgtgtggccctggccatctacatccccttcccagaagatgacagcaatgccaccaacagcaacctggagcgggtggagtacctgttcctgatcatcttcaccgtggaggccttcctgaaggtgattgcctacggcctgctcttccaccccaatgcctacctgagaaatggctggaacctgctggacttcatcatcgtggtggtgggcctcttcagcgccatcctggagcaggccaccaaggcagatggagccaatgccctgggcggcaaaggagctggctttgatgtgaaggccctgcgggccttccgggtgctgcggcccctgcggctggtgtctggagtgcccagcctgcaggtggtgctgaacagcatcatcaaggccatggtgcccctgctgcacatcgccctgctggtgctgtttgtgatcatcatctatgccatcatcggcctggagctgttcatgggcaagatgcacaagacctgctacaaccaggagggcattgctgatgtgcctgcagaagatgaccccagcccctgtgccctggagaccggccacggccggcagtgccagaatggcaccgtgtgcaagccaggctgggatggccccaagcacggcatcaccaactttgacaactttgcctttgccatgctgactgtgttccagtgcatcaccatggagggctggacagatgtgctgtactgggtgaatgatgctgtgggccgggactggccctggatctactttgtgaccctcatcatcatcggcagcttctttgtgctgaacctggtgctgggcgtgctgtctggagagttcagcaaggagcgggagaaggccaaggcccggggggacttccagaagctgcgggagaagcagcagctggaggaggacctgaagggctacctggactggatcacccaggctgaagatattgatcctgaaaatgaagatgagggcatggatgaggagaagcccaggaacatgtccatgcccaccagcgagacagaatctgtgaacacagaaaatgtggccggcggggacatcgagggggagaactgtggggcccggctggcccaccgcatcagcaagagcaagttcagccgctactggaggcgctggaaccgcttctgcaggaggaagtgcagagctgctgtgaagagcaatgtgttctactggctggtgatcttcctggtgttcctgaacaccctgaccatcgccagcgagcactacaaccagcccaactggctgacagaggtgcaggacacagccaacaaggccctgctggccctcttcaccgctgagatgctgctgaagatgtacagcctgggcctgcaggcctactttgtgtccctcttcaacagatttgactgctttgtggtgtgtggcggcatcctggagaccatcctggtggagaccaagatcatgagccccctgggcatctctgtgctgcgctgtgtgcggctgctgcgcatcttcaagatcacccgctactggaacagcctgagcaacctggtggccagcctgctgaacagcgtgcgcagcatcgccagcctgctgctgctgctcttcctgttcatcatcatcttcagcctgctgggcatgcagctgtttggaggcaagttcaactttgatgagatgcagaccaggaggagcacctttgacaacttcccccagagcctgctgaccgtcttccagatcctgaccggggaggactggaacagcgtgatgtatgatggcatcatggcctatggaggccccagcttccctggcatgctggtgtgcatctacttcatcatcctcttcatctgtggcaactacatcctgctgaatgtgttcctggccatcgctgtggacaacctggctgatgctgagagcctgaccagcgcccagaaggaggaggaggaggagaaggagaggaagaagctggccaggacagccagccctgagaagaagcaggagctggtggagaagccagctgtgggggagagcaaggaggagaagattgagctgaagagcatcacagcagatggagagagccccccagccaccaagatcaacatggatgacctgcagcccaatgaaaatgaagacaagagcccctaccccaaccctgagaccactggagaggaggatgaggaggagcctgagatgcctgtgggcccccggccccggcccctgtctgagctgcacctgaaggagaaggctgtgcccatgcctgaggccagcgccttcttcatcttcagcagcaacaaccgcttccggctgcagtgccaccgcatcgtgaatgacaccatcttcaccaacctgatcctcttcttcatcctgctgagcagcatcagcctggccgctgaggaccctgtgcagcacaccagcttcaggaaccacatcctgggcaatgctgactatgtgttcaccagcatcttcaccctggagatcatcctgaagatgacagcctatggagccttcctgcacaagggcagcttctgcaggaactacttcaacatcctggacctgctggtggtgtctgtgtccctcatcagctttggcatccagagcagcgccatcaacgtggtgaagatcctgcgggtgctgcgggtgctgcggcccctgcgggccatcaacagagccaagggcctgaagcacgtggtgcagtgtgtgtttgtggccatccgcaccatcggcaacatcgtcatcgtgaccaccctgctgcagttcatgtttgcctgcatcggcgtgcagctgttcaagggcaagctgtacacctgcagcgacagcagcaagcagacagaagctgagtgcaagggcaactacatcacctacaaggatggagaggtggaccaccccatcatccagcccaggtcctgggagaacagcaagtttgattttgacaacgtgctggccgccatgatggccctcttcaccgtgtccacctttgagggctggccagagctgctgtaccgcagcattgacagccacacagaggacaagggccccatctacaactacagagtggagatcagcatcttcttcatcatctacatcatcatcatcgccttcttcatgatgaacatctttgtgggcttcgtcatcgtgaccttccaggagcagggcgagcaggagtacaagaactgtgagctggacaagaaccagaggcagtgtgtggagtatgccctgaaggcccggcccctgcggcgctacatccccaagaaccagcaccagtacaaggtgtggtacgtggtgaacagcacctactttgagtacctgatgtttgtgctgatcctgctgaacaccatctgcctggccatgcagcactacggccagagctgcctcttcaagatcgccatgaacatcctgaacatgctgttcaccggcctcttcaccgtggagatgatcctgaagctgattgccttcaagcccaagcactacttctgtgatgcctggaacacctttgatgccctgattgtggtgggcagcatcgtggacatcgccatcacagaggtgaacccagctgagcacacccagtgcagccccagcatgaatgctgaggagaacagccgcatcagcatcaccttcttccgcctcttccgggtgatgaggctggtgaagctgctgagcagaggagagggcatccgcaccctgctgtggaccttcatcaagagcttccaggccctgccctacgtggccctgctgattgtgatgctgttcttcatctatgctgtgattggcatgcaggtgtttgggaagatcgccctgaatgacaccacagagatcaacagaaacaacaacttccagaccttcccccaggccgtgctgctgctcttccgctgtgccaccggggaggcctggcaggacatcatgctggcctgcatgcctgggaagaagtgtgcccctgagagcgagcccagcaacagcacagaaggagagaccccctgtggcagcagctttgctgtgttctacttcatctccttctacatgctgtgtgccttcctgatcatcaacctgtttgtggccgtcatcatggacaactttgactacctgacccgggactggagcatcctgggcccccaccacctggatgagttcaagaggatctgggccgagtatgaccctgaggccaagggccgcatcaagcacctggatgtggtgaccctgctgcggcgcatccagccccccctgggctttgggaagctgtgcccccaccgggtggcctgcaagaggctggtgtccatgaacatgcccctgaacagtgatggcaccgtgatgtttaatgccaccctgtttgccctggtgaggacagccctgcgcatcaagacagagggcaacctggagcaggccaatgaggagctgcgggccatcatcaagaagatctggaagaggacctccatgaagctgctggaccaggtggtgcccccagctggagatgatgaggtgacagtgggcaagttctacgccaccttcctgatccaggagtacttcaggaagttcaagaagaggaaggagcagggcctggtgggcaagcccagccagagaaatgccctgagcctgcaggccggcctgcggaccctgcatgacatcggccctgagatccggcgggccatcagcggggacctgacagctgaggaggagctggacaaggccatgaaggaggccgtgtctgctgcctctgaagatgacatcttcagaagagctgggggcctgtttggaaaccacgtgtcctactaccagagtgatggccgcagcgccttcccccagaccttcaccacccagaggcccctgcacatcaacaaggccggcagcagccagggcgacacagagagccccagccatgagaagctggtggacagcaccttcacccccagcagctacagcagcacaggcagcaatgccaacatcaacaatgccaacaacacagccctgggccgcctgcccaggcctgctggctaccccagcacagtgtccacagtggagggccacggcccccccctgagccctgccatccgggtgcaggaggtggcctggaagctgagcagcaaccgctgccacagccgggagagccaggccgccatggccggccaggaggagaccagccaggatgagacctatgaggtgaagatgaaccacgacacagaggcctgcagcgagcccagcctgctgagcacagagatgctgagctaccaggatgatgaaaatcggcagctgaccctgcctgaggaggacaagagggacatccggcagagccccaagaggggcttcctgcggagcgccagcctgggcagaagagccagcttccacctggagtgcctgaagaggcagaaggacagaggaggagacatcagccagaagacagtgctgcccctgcacctggtgcaccaccaggccctggccgtggccggcctgagccccctgctgcagaggagccacagccctgccagcttcccccggccctttgccaccccaccagccaccccaggcagccggggctggccaccccagcctgtgcccaccctgcggctggagggcgtggagagcagcgagaagctgaacagcagcttccccagcatccactgcggctcctgggccgagaccacccctgggggcggcggcagcagcgctgccaggagagtgcggcctgtgtccctgatggtgcccagccaggccggggcccctggccggcagttccacggcagcgccagcagcctggtggaggccgtgctgatcagcgagggcctgggccagtttgcccaggaccccaagttcatcgaggtgaccacccaggagctggctgatgcctgtgacatgaccatcgaggagatggagagcgctgctgacaacatcctgtctggaggagccccccagagccccaatggagccctgctgccctttgtgaactgcagagatgctggccaggaccgggccggcggggaggaggatgctggctgtgtgcgggcccggggccggcccagcgaggaggagctgcaggacagccgggtgtatgtgagcagcctgtag

SEQ ID NO: 47007 - DNA, 6417 bp, Artificial Sequence
  derived and/or modified sequence
atggtgaacgagaacacccggatgtacatccccgaggagaaccaccagggtagcaactatgggagcccgagaccggcacatgcaaacatgaacgctaatgccgctgcaggccttgcgcctgagcatattcccacacccggtgctgcactcagctggcaggccgccattgatgcagcacgccaagctaagctgatgggttccgccggcaacgcaacgatttcgaccgtgtctagcacccaaagaaagcggcaacagtatgggaaacccaaaaaacaagggagcacaacggcaacgcggcccccccgcgccttgctgtgtttgactctgaaaaatcccatcagacgggcctgcatcagcatagtagaatggaaaccattcgagatcattattcttttgacaatctttgccaactgcgtggcattggccatttatattccatttcccgaagatgacagtaacgccactaacagcaacctcgaaagagtagagtacctgtttctgatcatttttaccgtggaggcctttttaaaagtaattgcttatggcttgctcttccacccgaacgcttatctgcgaaacggatggaatctgctggactttattattgttgtggttgggctgttttccgctattctcgagcaggcaactaaagctgatggggcaaatgctcttgggggcaaaggagctggctttgacgtgaaagcgctccgcgcatttcgcgttctccgccccttgcgcctggtctccggagtgccatcgctgcaggtcgttctcaattctattatcaaagctatggtgcccctgctccacattgcattactggtcctattcgttatcattatatacgcaataataggcttagagctattcatgggaaaaatgcataagacttgttacaatcaggaaggaattgcagacgtgccagctgaagacgacccctccccctgtgcactggagacaggccatggcaggcagtgccaaaacggcacagtgtgcaaaccagggtgggacggccctaagcatggaattacgaactttgacaacttcgcctttgccatgctgacagttttccaatgcatcaccatggagggctggacggacgtactgtactgggttaatgatgcggtgggacgagactggccttggatctacttcgtcacccttatcatcatcggatcgttctttgtactcaatttagtgctgggagtgctctccggcgagttttcaaaagagcgggagaaagcaaaagcccgcggcgactttcaaaagcttcgcgaaaaacagcagctcgaagaagatctgaaggggtatttggactggatcactcaggcagaggatatcgatcctgagaatgaagacgaggggatggacgaagagaagccccgcaacatgagcatgcccaccagcgagacagaaagtgtcaacaccgaaaatgttgccggcggcgacatcgagggagagaactgcggggctagattagcccatcgaatctccaagtccaaattctcgaggtactggcggcgttggaaccgtttctgtagacgaaaatgtcgcgcagcagttaaaagtaatgttttttactggctcgtcattttcttagttttcttgaataccctgaccatcgccagcgagcattataatcagcccaactggctgactgaagtacaggacaccgccaataaggcgctactggcccttttcacagccgaaatgcttctgaagatgtacagcctaggccttcaggcgtacttcgtatccctgttcaatcggtttgactgtttcgttgtatgtggcggcatcctggaaaccatcctggtcgaaacgaaaatcatgagccctctcggtataagcgtgcttcgctgtgtcagattgctgcgcatttttaaaatcacaaggtattggaactcattgtctaatctggtggctagcctgcttaactccgttcgatccatagccagtctccttttgctattattcctgttcattatcatattcagtcttctgggcatgcagctatttgggggtaagttcaactttgacgagatgcagactcggagatctacctttgataacttcccacagtctctgctgacagtctttcaaattctgacaggggaggactggaactctgtgatgtacgatggtatcatggcatacggggggccaagtttccctggtatgctcgtgtgcatctattttatcatactctttatttgcggaaactacatcttgctgaacgttttcctggccatagccgtcgacaacttagccgatgcagaatccctcacctccgcccagaaggaagaagaagaagagaaggagaggaaaaagctcgctagaacggctagtccggaaaaaaagcaggagctggtggagaaacctgccgtaggtgaatcaaaggaggaaaaaatagaactgaagtctataaccgccgatggggaatcgccccccgcaaccaaaatcaacatggacgatctgcagccgaatgaaaacgaggacaagagcccatatccaaatccggaaactactggcgaagaggacgaagaagaaccagagatgccggtcgggccccgtccaagacccttgagcgagctgcatctcaaggagaaggcggtgcctatgccagaagcgagcgctttcttcatctttagctcaaataacaggttcagactgcagtgccacaggatagtgaatgacacaatctttaccaatctgatcctgttcttcatactgttgagcagcatatcactcgccgcagaggatcctgtccagcacacttcgtttaggaatcacatactgggtaacgctgattacgtatttacctccatatttaccctggagatcatccttaaaatgacagcttatggtgcgttcttgcacaagggcagcttctgtaggaactactttaacattctagatcttctagtagtctccgtgagcctcatctcctttggaatacaaagctcagccatcaacgtagtgaagatactccgggtgctcagggttttgcgcccactccgagccataaaccgcgccaaaggcctgaagcacgttgttcaatgcgttttcgtggcaatccgcacaattgggaatatcgtgattgtcacaactctgctgcagttcatgtttgcctgcattggtgtgcaactgttcaagggaaaactctatacatgctcagattcatctaagcagaccgaggctgagtgcaagggcaattacattacgtataaagacggtgaagtggatcacccaataattcagccccgatcatgggaaaatagtaagtttgattttgacaatgttctggccgcgatgatggctctgtttacggtgagtactttcgaaggatggcccgaactgctgtaccgcagcattgatagccataccgaggataaaggccccatttacaactaccgggttgagatctccatctttttcataatatacatcatcataattgccttctttatgatgaacatcttcgtgggctttgtgatcgttaccttccaggaacagggggaacaggagtacaagaactgcgagctcgacaaaaaccagcggcaatgcgtggagtatgctctcaaggcccggcccctacgcagatatatcccaaagaatcagcaccagtataaagtttggtacgtggtgaactcaacttactttgagtatcttatgtttgtactgatcttgctgaacactatttgcctcgccatgcaacactacggacagagttgcctcttcaaaattgccatgaatattctgaacatgttgtttacaggcctgttcaccgtggagatgattctgaagttgattgcttttaagcctaaacactacttttgcgatgcttggaatacctttgacgcccttattgtcgtaggcagtattgtcgacattgcgattacagaggtgaacccagccgagcacacccaatgctctccgagtatgaacgccgaagaaaactcacgcatcagcattacattcttcaggctgtttcgagttatgaggctagtgaaactacttagccgtggggaggggatccgaaccctgctgtggacatttattaaaagtttccaagcccttccatacgtggctttgcttattgtcatgctgttctttatttacgcagtcattggtatgcaggtgttcggtaaaattgcacttaacgacacaacagagattaacaggaataacaattttcagactttcccacaggctgtgctgctgctctttcgctgcgccaccggcgaagcctggcaagacatcatgttggcgtgtatgcccggcaagaaatgcgccccagagtccgaacctagtaacagcaccgagggcgaaaccccttgtggcagctcattcgcagtcttctactttatttctttctacatgctttgcgccttcctgatcataaacctgtttgtggctgtcattatggataactttgactacctcaccagagattggtcaattctcggaccccatcatctggatgagtttaaaagaatttgggctgaatacgatcccgaggccaaagggagaataaagcatctcgacgtagtcaccctgcttaggcggatccagccccccctgggcttcgggaaactgtgcccgcaccgcgtagcctgcaaaaggctcgtgtctatgaatatgccgttgaacagcgacgggacagtcatgtttaatgctaccctgtttgcactagtccggactgcactccgtattaagacagaaggcaacctagaacaggccaatgaagagctgcgcgctattataaagaaaatctggaagcgcacatcaatgaagttattggaccaggtcgttccccctgctggcgacgacgaagttacagtcggtaagttctatgccacttttctgatccaagaatactttagaaagtttaagaagcgcaaggagcaagggctggtgggcaagccatcgcagaggaatgccctgtcactccaggctggactcaggaccttacacgacattgggccagaaatcaggcgagcaatttctggcgatctaacagccgaagaagagttggacaaggcgatgaaagaggccgtttccgccgcttcagaggacgatatcttcagaagagccggggggcttttcggaaatcacgtttcatattaccagtctgacggaagatctgcctttccccaaacattcacaacacagagacctctccatataaacaaagcagggtcatctcagggcgacacagaatctccatctcacgaaaaactcgtggatagcacatttacccctagttcctatagtagtacgggcagtaacgccaacatcaacaacgcgaataatacagctctcggtcgcctcccccgacctgctgggtaccctagcacggtctctaccgtggaaggccacgggcctcctctgtcaccagcaatccgggtgcaagaagttgcatggaagctctcctccaatagatgccactctagagagagccaggccgctatggcagggcaggaagagactagtcaggatgagacatacgaagtaaagatgaaccatgacacagaagcctgctccgagccctctcttctttctacagagatgttgtcatatcaagatgacgagaaccgccagctcactcttccagaagaggacaagagagatattcgacagtctccaaagagggggtttctccgcagtgcaagcctaggccggagggcaagtttccacctcgaatgcctgaagaggcagaaagatcggggtggagacatttcacaaaaaactgtgttgcctttgcatctggtgcaccaccaagcgctcgcagtcgcaggcctctcaccactcctgcagaggtctcacagtcccgcaagtttcccaaggccgttcgctaccccacccgctactcccgggagcaggggttggccccctcaacctgtgccaaccctccgccttgagggagtagagtcctcggagaagctgaatagtagcttcccaagtatccattgcgggagttgggccgagacaactcccggcggcggaggcagctctgccgccaggagggtccggcccgtttctctgatggtcccttctcaagctggcgctcccggcagacagttccacggtagcgcttcaagcctggtagaagctgtgctcatcagcgaaggactgggccaattcgcccaagaccccaagttcatcgaagttaccacgcaggaactggcagacgcctgcgatatgactattgaggaaatggagagtgccgccgataatattctgtcaggaggagctccacaatctccgaacggagcactacttcctttcgtgaattgtcgggatgccggacaggatcgcgcaggtggcgaggaggacgcaggttgcgtgagggccagaggcagacccagtgaagaggaacttcaggacagccgcgtttacgtctcatccctttag

SEQ ID NO: 47008 - DNA, 6416 bp, Artificial Sequence
  derived and/or modified sequence
atggttaacgagaacacaagaatgtacatcccggaggagaaccaccaaggctccaactatggaagtccgcgaccagctcacgccaatatgaatgcgaacgcggcagctggtctagcccctgaacacatccctacacccggagccgctctgtcctggcaagctgcgatcgatgctgccagacaagcaaaactcatgggttccgccggaaacgccacaataagtaccgtctcctccactcagagaaaaagacaacagtatggcaagcccaagaagcagggctctactaccgccactcgccctccaagggcactgctgtgcctcaccctgaaaaaccccatcaggcgcgcttgcattagcattgttgagtggaaaccattcgagatcataatcctgttgactatttttgcgaactgcgtcgcgctagcgatatatattccttttcccgaggacgactcaaacgccaccaattctaatctggaaagagtagagtacctgttccttattatttttaccgtggaggcattcctcaaggtgatagcatacggtcttctcttccatccaaacgcttacctccgcaatgggtggaacctgctcgactttatcattgtggttgtcggccttttttcagccatactggagcaggccactaaggccgacggcgctaatgcgctgggcggaaagggcgctggattcgacgtgaaggctcttcgtgcctttcgcgttctgcggccactccgccttgtgtctggcgtcccatccctccaagtcgtgctgaacagcatcattaaggctatggtccctctgttacacattgcactgcttgtgctgtttgtcattatcatctatgccattattggcctggagctgtttatgggcaagatgcataaaacctgttataaccaggagggtattgcggacgtacccgctgaggatgatcctagtccttgtgctcttgagacaggccatgggagacagtgccagaacggcacagtgtgcaagccgggttgggacggacccaaacatgggatcacaaattttgacaatttcgcattcgcgatgctcaccgtcttccaatgtatcaccatggagggctggacagacgtgttatactgggtcaacgatgctgtggggagagactggccatggatttatttcgtaaccctgattataataggatccttcttcgtactgaacctggtgctgggcgtactgtctggtgaattttcaaaggagcgtgaaaaggctaaggctagaggcgatttccaaaaactgcgggagaagcaacagctggaggaggatctcaaggggtacctggactggattactcaggccgaggacatagatccagagaacgaggacgaaggaatggatgaggagaaaccccgaaacatgtccatgccgacaagtgaaaccgagtctgttaacacagaaaacgtggctggcggagacatagagggagagaactgtggtgccaggctggctcacaggatctccaaaagcaagtttagccgctactggcgcagatggaatcgattttgtaggcgaaaatgcagagctgccgtaaaaagcaacgttttctactggctcgttatctttcttgtgttcctcaacacgctgacaatcgcctcggagcactacaaccagcccaattggttgacagaggtgcaagacaccgctaataaagccttgttggccctcttcaccgctgagatgcttcttaagatgtatagcctcggccttcaggcctattttgtatcactctttaaccgcttcgactgtttcgtggtgtgtggcggtattctagagacaattttggtggagacaaagattatgtcccctttgggaatcagcgtgctcaggtgcgtacggctcctgcgcattttcaaaatcacccgttattggaacagcctgtctaatttggtggcctcactgttgaatagtgttcggtcaatcgcctctctgctcttgttactgttcctcttcatcatcatatttagtttgttgggcatgcaactgtttggtggaaagtttaacttcgacgaaatgcagactcgcaggagcacctttgataactttcctcagagtttgttgacagtcttccagatcctgactggcgaggattggaattccgtgatgtatgacggcatcatggcctacggagggcctagctttcccggaatgctggtgtgcatttactttattatactcttcatctgcggcaattatattttgctaaatgttttcctggccattgccgtggacaacttagcggacgccgaatctcttacctctgcgcagaaggaggaggaagaagaaaaagagaggaagaaactggccagaaccgcctctccagagaaaaagcaggagctcgtcgaaaagcccgctgttggggagtcaaaggaggaaaagattgaacttaaatctattacagccgatggcgagtctccacccgcaacaaaaattaacatggatgatctgcagcccaacgagaatgaggataagtcaccatatccgaatccagaaaccaccggggaggaggacgaagaagagccagaaatgcctgtgggccctagaccaagaccactgtctgagctccatttaaaggagaaagcagtgcccatgcccgaggcatccgccttcttcatatttagtagcaataatcggtttagactgcaatgccacaggattgtaaatgacaccatcttcaccaacctgatcctgttctttattctgctgtcttccataagtttagcagctgaggatcccgtccagcacacaagcttccgaaaccatatcctaggcaatgctgactacgtgttcacctcaatatttacactggaaatcatcttaaagatgaccgcatacggagcctttctccacaagggaagtttctgtaggaattacttcaacatcttggatcttcttgtggtctcagtgtctttgatttccttcggcattcaatcctcagctattaatgtggtgaagatccttcgcgtcctacgcgtactgagacctttgcgagcaattaaccgcgcaaagggcctcaaacacgtggttcaatgtgtttttgtggccattagaactatcggtaacatcgtcatcgtcactacgctcctgcagttcatgtttgcatgcattggcgtgcaactttttaagggaaaactttacacctgttccgactcttccaagcagactgaggcggaatgtaaaggcaactatatcacttataaggatggagaggtagatcacccgatcattcagccccgatcttgggaaaattctaaatttgacttcgacaatgtgctggccgctatgatggcgctgttcactgtctcaacctttgagggatggcccgaattgctctaccggtccatcgattcccacaccgaggataagggacccatctacaattatcgcgttgagatttccatattcttcatcatttacatcattattatcgcctttttcatgatgaatatcttcgtcgggttcgtaatcgtgacgttccaggaacagggcgaacaggagtataagaactgtgaactggataagaaccagcggcagtgcgtcgagtacgcgctgaaggcacgccctttgcggcgatacatccctaagaatcagcaccaatataaggtctggtatgttgtgaacagcacttacttcgagtatctgatgttcgtccttatcctgctcaataccatttgcctggctatgcagcactatggccagtcatgtctctttaagatagcaatgaatattctgaatatgcttttcaccggcttgttcacagtggaaatgattctgaagttaattgcctttaagcccaagcattacttttgcgatgcgtggaatacttttgatgccctgatagtagtgggatccattgtcgacattgccataaccgaagtaaaccccgcagagcacacccagtgctccccaagtatgaacgctgaggagaatagccgcatcagcatcacctttttcaggctgttcagggtgatgcgcctggtcaaattgctgagccgcggtgaaggcatcaggaccctgctatggacctttatcaaaagcttccaagctcttccatatgtggctctcttgatagtgatgcttttcttcatctacgccgtgataggtatgcaggtctttggtaagatagcactgaatgacactaccgagataaatcgcaataataacttccaaacttttccccaagctgtgctcctcctgtttagatgtgccactggagaagcgtggcaagacataatgctggcttgcatgcctgggaagaagtgtgccccagagagtgagccttctaatagcactgaaggagagaccccgtgcggttcatctttcgccgtgttctacttcatatctttttacatgctgtgtgcttttctgataattaatctgtttgtcgccgtgataatggataacttcgattatctgacaagggactggagcatattgggcccacatcatctggatgagtttaaacgcatctgggcagagtacgatcctgaggctaagggcagaattaaacatctcgatgtcgttactttgctcaggcgaatccagcccccactgggatttgggaagttatgcccccaccgcgtcgcatgcaagcggttggtaagcatgaacatgccattaaacagcgacgggacggttatgttcaatgccacgcttttcgcacttgtgaggactgcactgagaatcaaaacggagggaaacttagagcaagccaatgaggaactcagggcaatcatcaaaaaaatatggaagcgaacttctatgaagcttctcgatcaagttgtgccccctgccggtgacgatgaagtgactgtcggtaagttctatgctacatttctgatccaggagtacttcagaaagttcaaaaaacgcaaggagcagggccttgtgggcaagcctagccaacgcaacgccctctcgctacaagctgggctgagaactctccacgacattggtcctgagattcggagggcgattagcggggaccttacagctgaggaggagttggacaaggcgatgaaagaggctgtaagtgccgcttctgaggatgacatatttagacgagcaggcggattattcgggaatcatgtatcctattatcaaagtgacgggaggagtgccttccctcagacttttaccactcaaagacctctgcacattaataaggccggatcatcccagggtgacacagagtctccatcccatgagaaattggtggacagtactttcactccatccagctatagtagcaccgggtccaatgccaatatcaataacgctaataatacggcgctgggacggctccctagacccgcagggtacccctctaccgtaagcacggtcgagggacacgggccacctctctctccagccatcagagtgcaggaggtggcgtggaaattgagcagcaacaggtgccacagcagagagtcccaggctgctatggccggacaggaagagacctcccaggacgaaacatatgaggtgaaaatgaaccacgatactgaggcatgcagcgagccgagcctcctgagcacagaaatgctatcctaccaggatgacgagaatcgccagctaacacttcctgaggaggacaagcgtgatatcagacagtcccctaaacggggtttcctgcggtccgcatccctgggaaggagagcctcctttcatctcgagtgtctgaagagacaaaaagataggggtggagatattagtcagaaaacggtgctccctttgcatctggtccaccatcaagccctcgcagtcgcaggattgagccctctgctacagcggagccatagcccggcatctttcccaagaccttttgccacccctcccgcaacgcctggatctcgaggttggccaccacaacctgtgcccacacttagattagagggggttgagagttctgagaagctgaattcatctttcccatcaatccattgtggttcctgggctgaaaccacacccggaggcggaggatcctcagccgctcgaagagtgagaccggttagtttgatggtaccctcccaggccggagcccctggcagacaattccacggctccgccagctcacttgtggaggctgtgttgattagtgaggggctggggcagtttgcccaggaccccaagttcattgaggtcaccacccaggagttggctgatgcctgtgacatgactattgaggaaatggagagtgcagcagataacatcctcagcggcggtgcacctcagagccctaatggagctttactgccctttgttaattgtcgcgatgcaggccaagacagagctggcggagaagaggacgcaggttgcgtgagagctaggggacgcccttctgaggaggagctgcaggatagcagagtgtacgtcagttctttgta

SEQ ID NO: 47009 - DNA, 6511 bp, Artificial Sequence
  derived and/or modified sequence
atggtcaatgagaatacgaggatgtacattccagaggaaaaccaccaaggttccaactatgggagcccacgccccgcccatgccaacatgaatgccaatgcggcagcggggctggcccctgagcacatccccaccccgggggctgccctgtcgtggcaggcggccatcgacgcagcccggcaggctaagctgatgggcagcgctggcaatgcgaccatctccacagtcagctccacgcagcggaagcggcagcaatatgggaaacccaagaagcagggcagcaccacggccacacgcccgccccgagccctgctctgcctgaccctgaagaaccccatccggagggcctgcatcagcattgtcgaatggaaaccatttgaaataattattttactgactatttttgccaattgtgtggccttagcgatctatattccctttccagaagatgattccaacgccaccaattccaacctggaacgagtggaatatctctttctcataatttttacggtggaagcgtttttaaaagtaatcgcctatggactcctctttcaccccaatgcctacctccgcaacggctggaacctactagattttataattgtggttgtggggctttttagtgcaattttagaacaagcaaccaaagcagatggggcaaacgctctcggagggaaaggggccggatttgatgtgaaggcgctgagggccttccgcgtgctgcgccccctgcggctggtgtccggagtcccaagtctccaggtggtcctgaattccatcatcaaggccatggtccccctgctgcacatcgccctgcttgtgctgtttgtcatcatcatctacgccatcatcggcttggagctcttcatggggaagatgcacaagacctgctacaaccaggagggcatagcagatgttccagcagaagatgacccttccccttgtgcgctggaaacgggccacgggcggcagtgccagaacggcacggtgtgcaagcccggctgggatggtcccaagcacggcatcaccaactttgacaactttgccttcgccatgctcacggtgttccagtgcatcaccatggagggctggacggacgtgctgtactgggtcaatgatgccgtaggaagggactggccctggatctattttgttacactaatcatcatagggtcattttttgtacttaacttggttctcggtgtgcttagcggagagttttccaaagagagggagaaggccaaggcccggggagatttccagaagctgcgggagaagcagcagctagaagaggatctcaaaggctacctggattggatcactcaggccgaagacatcgatcctgagaatgaggacgaaggcatggatgaggagaagccccgaaacatgagcatgcccaccagtgagaccgagtccgtcaacaccgaaaacgtggctggaggtgacatcgagggagaaaactgcggggccaggctggcccaccggatctccaagtcaaagttcagccgctactggcgccggtggaatcggttctgcagaaggaagtgccgcgccgcagtcaagtctaatgtcttctactggctggtgattttcctggtgttcctcaacacgctcaccattgcctctgagcactacaaccagcccaactggctcacagaagtccaagacacggcaaacaaggccctgctggccctgttcacggcagagatgctcctgaagatgtacagcctgggcctgcaggcctacttcgtgtccctcttcaaccgctttgactgcttcgtcgtgtgtggcggcatcctggagaccatcctggtggagaccaagatcatgtccccactgggcatctccgtgctcagatgcgtccggctgctgaggattttcaagatcacgaggtactggaactccttgagcaacctggtggcatccttgctgaactctgtgcgctccatcgcctccctgctccttctcctcttcctcttcatcatcatcttctccctcctggggatgcagctctttggaggaaagttcaactttgatgagatgcagacccggaggagcacattcgataacttcccccagtccctcctcactgtgtttcagatcctgaccggggaggactggaattcggtgatgtatgatgggatcatggcttatggcggcccctcttttccagggatgttagtctgtatttacttcatcatcctcttcatctgtggaaactatatcctactgaatgtgttcttggccattgctgtggacaacctggctgatgctgagagcctcacatctgcccaaaaggaggaggaagaggagaaggagagaaagaagctggccaggactgccagcccagagaagaaacaagagttggtggagaagccggcagtgggggaatccaaggaggagaagattgagctgaaatccatcacggctgacggagagtctccacccgccaccaagatcaacatggatgacctccagcccaatgaaaatgaggataagagcccctaccccaacccagaaactacaggagaagaggatgaggaggagccagagatgcctgtcggccctcgcccacgaccactctctgagcttcaccttaaggaaaaggcagtgcccatgccagaagccagcgcgtttttcatcttcagctctaacaacaggtttcgcctccagtgccaccgcattgtcaatgacacgatcttcaccaacctgatcctcttcttcattctgctcagcagcatttccctggctgctgaggacccggtccagcacacctccttcaggaaccatatcctaggcaatgcagactatgtcttcactagtatctttacattagaaattatccttaagatgactgcttatggggctttcttgcacaagggttctttctgccggaactacttcaacatcctggacctgctggtggtcagcgtgtccctcatctcctttggcatccagtccagtgcaatcaatgtcgtgaagatcttgcgagtcctgcgagtactcaggcccctgagggccatcaacagggccaaggggctaaagcatgtggttcagtgtgtgtttgtcgccatccggaccatcgggaacatcgtgattgtcaccaccctgctgcagttcatgtttgcctgcatcggggtccagctcttcaagggaaagctgtacacctgttcagacagttccaagcagacagaggcggaatgcaagggcaactacatcacgtacaaagacggggaggttgaccaccccatcatccaaccccgcagctgggagaacagcaagtttgactttgacaatgttctggcagccatgatggccctcttcaccgtctccaccttcgaagggtggccagagctgctgtaccgctccatcgactcccacacggaagacaagggccccatctacaactaccgtgtggagatctccatcttcttcatcatctacatcatcatcatcgccttcttcatgatgaacatcttcgtgggcttcgtcatcgtcacctttcaggagcagggggagcaggagtacaagaactgtgagctggacaagaaccagcgacagtgcgtggaatacgccctcaaggcccggcccctgcggaggtacatccccaagaaccagcaccagtacaaagtgtggtacgtggtcaactccacctacttcgagtacctgatgttcgtcctcatcctgctcaacaccatctgcctggccatgcagcactacggccagagctgcctgttcaaaatcgccatgaacatcctcaacatgctcttcactggcctcttcaccgtggagatgatcctgaagctcattgccttcaaacccaagcactatttctgtgatgcatggaatacatttgacgccttgattgttgtgggtagcattgttgatatagcaatcaccgaggtaaacccagctgaacatacccaatgctctccctctatgaacgcagaggaaaactcccgcatctccatcaccttcttccgcctgttccgggtcatgcgtctggtgaagctgctgagccgtggggagggcatccggacgctgctgtggaccttcatcaagtccttccaggccctgccctatgtggccctcctgatcgtgatgctgttcttcatctacgcggtgatcgggatgcaggtgtttgggaaaattgccctgaatgataccacagagatcaaccggaacaacaactttcagaccttcccccaggccgtgctgctcctcttcaggtgtgccaccggggaggcctggcaggacatcatgctggcctgcatgccaggcaagaagtgtgccccagagtccgagcccagcaacagcacggagggtgaaacaccctgtggtagcagctttgctgtcttctacttcatcagcttctacatgctctgtgccttcctgatcatcaacctctttgtagctgtcatcatggacaactttgactacctgacaagggactggtccatccttggtccccaccacctggatgagtttaaaagaatctgggcagagtatgaccctgaagccaagggtcgtatcaaacacctggatgtggtgaccctcctccggcggattcagccgccactaggttttgggaagctgtgccctcaccgcgtggcttgcaaacgcctggtctccatgaacatgcctctgaacagcgacgggacagtcatgttcaatgccaccctgtttgccctggtcaggacggccctgaggatcaaaacagaagggaacctagaacaagccaatgaggagctgcgggcgatcatcaagaagatctggaagcggaccagcatgaagctgctggaccaggtggtgccccctgcaggtgatgatgaggtcaccgttggcaagttctacgccacgttcctgatccaggagtacttccggaagttcaagaagcgcaaagagcagggccttgtgggcaagccctcccagaggaacgcgctgtctctgcaggctggcttgcgcacactgcatgacatcgggcctgagatccgacgggccatctctggagatctcaccgctgaggaggagctggacaaggccatgaaggaggctgtgtccgctgcttctgaagatgacatcttcaggagggccggtggcctgttcggcaaccacgtcagctactaccaaagcgacggccggagcgccttcccccagaccttcaccactcagcgcccgctgcacatcaacaaggcgggcagcagccagggcgacactgagtcgccatcccacgagaagctggtggactccaccttcaccccgagcagctactcgtccaccggctccaacgccaacatcaacaacgccaacaacaccgccctgggtcgcctccctcgccccgccggctaccccagcacggtcagcactgtggagggccacgggccccccttgtcccctgccatccgggtgcaggaggtggcgtggaagctcagctccaacaggtgccactcccgggagagccaggcagccatggcgggtcaggaggagacgtctcaggatgagacctatgaagtgaagatgaaccatgacacggaggcctgcagtgagcccagcctgctctccacagagatgctctcctaccaggatgacgaaaatcggcaactgacgctcccagaggaggacaagagggacatccggcaatctccgaagaggggtttcctccgctctgcctcactaggtcgaagggcctccttccacctggaatgtctgaagcgacagaaggaccgagggggagacatctctcagaagacagtcctgcccttgcatctggttcatcatcaggcattggcagtggcaggcctgagccccctcctccagagaagccattcccctgcctcattccctaggccttttgccaccccaccagccacacctggcagccgaggctggcccccacagcccgtccccaccctgcggcttgagggggtcgagtccagtgagaaactcaacagcagcttcccatccatccactgcggctcctgggctgagaccacccccggtggcgggggcagcagcgccgcccggagagtccggcccgtctccctcatggtgcccagccaggctggggccccagggaggcagttccacggcagtgccagcagcctggtggaagcggtcttgatttcagaaggactggggcagtttgctcaagatcccaagttcatcgaggtcaccacccaggagctggccgacgcctgcgacatgaccatagaggagatggagagcgcggccgacaacatcctcagcgggggcgccccacagagccccaatggcgccctcttaccctttgtgaactgcagggacgcggggcaggaccgagccgggggcgaagaggacgcgggctgtgtgcgcgcgcggggtcgaccgagtgaggaggagctccaggacagcagggtctacgtcagcagcctgtagtgggcgctgccagatgcgggcttttttttatttgtttcaatgttcctaatgggttcgtttcagaagtgcctcactgttctcgtgacctggagtt

SEQ ID NO: 47010 - DNA, 6417 bp, Artificial Sequence
  derived and/or modified sequence
atggtgaacgagaacaccagaatgtacatccccgaggagaaccaccagggcagcaactacggcagccccagacccgcccacgccaacatgaacgccaacgccgccgccggcctggcccccgagcacatccccacccccggcgccgccctgagctggcaggccgccatcgacgccgccagacaggccaagctgatgggcagcgccggcaacgccaccatcagcaccgtgagcagcacccagagaaagagacagcagtacggcaagcccaagaagcagggcagcaccaccgccaccagaccccccagagccctgctgtgcctgaccctgaagaaccccatcagaagagcctgcatcagcatcgtggagtggaagcccttcgagatcatcatcctgctgaccatcttcgccaactgcgtggccctggccatctacatccccttccccgaggacgacagcaacgccaccaacagcaacctggagagagtggagtacctgttcctgatcatcttcaccgtggaggccttcctgaaggtgatcgcctacggcctgctgttccaccccaacgcctacctgagaaacggctggaacctgctggacttcatcatcgtggtggtgggcctgttcagcgccatcctggagcaggccaccaaggccgacggcgccaacgccctgggcggcaagggcgccggcttcgacgtgaaggccctgagagccttcagagtgctgagacccctgagactggtgagcggcgtgcccagcctgcaggtggtgctgaacagcatcatcaaggccatggtgcccctgctgcacatcgccctgctggtgctgttcgtgatcatcatctacgccatcatcggcctggagctgttcatgggcaagatgcacaagacctgctacaaccaggagggcatcgccgacgtgcccgccgaggacgaccccagcccctgcgccctggagaccggccacggcagacagtgccagaacggcaccgtgtgcaagcccggctgggacggccccaagcacggcatcaccaacttcgacaacttcgccttcgccatgctgaccgtgttccagtgcatcaccatggagggctggaccgacgtgctgtactgggtgaacgacgccgtgggcagagactggccctggatctacttcgtgaccctgatcatcatcggcagcttcttcgtgctgaacctggtgctgggcgtgctgagcggcgagttcagcaaggagagagagaaggccaaggccagaggcgacttccagaagctgagagagaagcagcagctggaggaggacctgaagggctacctggactggatcacccaggccgaggacatcgaccccgagaacgaggacgagggcatggacgaggagaagcccagaaacatgagcatgcccaccagcgagaccgagagcgtgaacaccgagaacgtggccggcggcgacatcgagggcgagaactgcggcgccagactggcccacagaatcagcaagagcaagttcagcagatactggagaagatggaacagattctgcagaagaaagtgcagagccgccgtgaagagcaacgtgttctactggctggtgatcttcctggtgttcctgaacaccctgaccatcgccagcgagcactacaaccagcccaactggctgaccgaggtgcaggacaccgccaacaaggccctgctggccctgttcaccgccgagatgctgctgaagatgtacagcctgggcctgcaggcctacttcgtgagcctgttcaacagattcgactgcttcgtggtgtgcggcggcatcctggagaccatcctggtggagaccaagatcatgagccccctgggcatcagcgtgctgagatgcgtgagactgctgagaatcttcaagatcaccagatactggaacagcctgagcaacctggtggccagcctgctgaacagcgtgagaagcatcgccagcctgctgctgctgctgttcctgttcatcatcatcttcagcctgctgggcatgcagctgttcggcggcaagttcaacttcgacgagatgcagaccagaagaagcaccttcgacaacttcccccagagcctgctgaccgtgttccagatcctgaccggcgaggactggaacagcgtgatgtacgacggcatcatggcctacggcggccccagcttccccggcatgctggtgtgcatctacttcatcatcctgttcatctgcggcaactacatcctgctgaacgtgttcctggccatcgccgtggacaacctggccgacgccgagagcctgaccagcgcccagaaggaggaggaggaggagaaggagagaaagaagctggccagaaccgccagccccgagaagaagcaggagctggtggagaagcccgccgtgggcgagagcaaggaggagaagatcgagctgaagagcatcaccgccgacggcgagagcccccccgccaccaagatcaacatggacgacctgcagcccaacgagaacgaggacaagagcccctaccccaaccccgagaccaccggcgaggaggacgaggaggagcccgagatgcccgtgggccccagacccagacccctgagcgagctgcacctgaaggagaaggccgtgcccatgcccgaggccagcgccttcttcatcttcagcagcaacaacagattcagactgcagtgccacagaatcgtgaacgacaccatcttcaccaacctgatcctgttcttcatcctgctgagcagcatcagcctggccgccgaggaccccgtgcagcacaccagcttcagaaaccacatcctgggcaacgccgactacgtgttcaccagcatcttcaccctggagatcatcctgaagatgaccgcctacggcgccttcctgcacaagggcagcttctgcagaaactacttcaacatcctggacctgctggtggtgagcgtgagcctgatcagcttcggcatccagagcagcgccatcaacgtggtgaagatcctgagagtgctgagagtgctgagacccctgagagccatcaacagagccaagggcctgaagcacgtggtgcagtgcgtgttcgtggccatcagaaccatcggcaacatcgtgatcgtgaccaccctgctgcagttcatgttcgcctgcatcggcgtgcagctgttcaagggcaagctgtacacctgcagcgacagcagcaagcagaccgaggccgagtgcaagggcaactacatcacctacaaggacggcgaggtggaccaccccatcatccagcccagaagctgggagaacagcaagttcgacttcgacaacgtgctggccgccatgatggccctgttcaccgtgagcaccttcgagggctggcccgagctgctgtacagaagcatcgacagccacaccgaggacaagggccccatctacaactacagagtggagatcagcatcttcttcatcatctacatcatcatcatcgccttcttcatgatgaacatcttcgtgggcttcgtgatcgtgaccttccaggagcagggcgagcaggagtacaagaactgcgagctggacaagaaccagagacagtgcgtggagtacgccctgaaggccagacccctgagaagatacatccccaagaaccagcaccagtacaaggtgtggtacgtggtgaacagcacctacttcgagtacctgatgttcgtgctgatcctgctgaacaccatctgcctggccatgcagcactacggccagagctgcctgttcaagatcgccatgaacatcctgaacatgctgttcaccggcctgttcaccgtggagatgatcctgaagctgatcgccttcaagcccaagcactacttctgcgacgcctggaacaccttcgacgccctgatcgtggtgggcagcatcgtggacatcgccatcaccgaggtgaaccccgccgagcacacccagtgcagccccagcatgaacgccgaggagaacagcagaatcagcatcaccttcttcagactgttcagagtgatgagactggtgaagctgctgagcagaggcgagggcatcagaaccctgctgtggaccttcatcaagagcttccaggccctgccctacgtggccctgctgatcgtgatgctgttcttcatctacgccgtgatcggcatgcaggtgttcggcaagatcgccctgaacgacaccaccgagatcaacagaaacaacaacttccagaccttcccccaggccgtgctgctgctgttcagatgcgccaccggcgaggcctggcaggacatcatgctggcctgcatgcccggcaagaagtgcgcccccgagagcgagcccagcaacagcaccgagggcgagaccccctgcggcagcagcttcgccgtgttctacttcatcagcttctacatgctgtgcgccttcctgatcatcaacctgttcgtggccgtgatcatggacaacttcgactacctgaccagagactggagcatcctgggcccccaccacctggacgagttcaagagaatctgggccgagtacgaccccgaggccaagggcagaatcaagcacctggacgtggtgaccctgctgagaagaatccagccccccctgggcttcggcaagctgtgcccccacagagtggcctgcaagagactggtgagcatgaacatgcccctgaacagcgacggcaccgtgatgttcaacgccaccctgttcgccctggtgagaaccgccctgagaatcaagaccgagggcaacctggagcaggccaacgaggagctgagagccatcatcaagaagatctggaagagaaccagcatgaagctgctggaccaggtggtgccccccgccggcgacgacgaggtgaccgtgggcaagttctacgccaccttcctgatccaggagtacttcagaaagttcaagaagagaaaggagcagggcctggtgggcaagcccagccagagaaacgccctgagcctgcaggccggcctgagaaccctgcacgacatcggccccgagatcagaagagccatcagcggcgacctgaccgccgaggaggagctggacaaggccatgaaggaggccgtgagcgccgccagcgaggacgacatcttcagaagagccggcggcctgttcggcaaccacgtgagctactaccagagcgacggcagaagcgccttcccccagaccttcaccacccagagacccctgcacatcaacaaggccggcagcagccagggcgacaccgagagccccagccacgagaagctggtggacagcaccttcacccccagcagctacagcagcaccggcagcaacgccaacatcaacaacgccaacaacaccgccctgggcagactgcccagacccgccggctaccccagcaccgtgagcaccgtggagggccacggcccccccctgagccccgccatcagagtgcaggaggtggcctggaagctgagcagcaacagatgccacagcagagagagccaggccgccatggccggccaggaggagaccagccaggacgagacctacgaggtgaagatgaaccacgacaccgaggcctgcagcgagcccagcctgctgagcaccgagatgctgagctaccaggacgacgagaacagacagctgaccctgcccgaggaggacaagagagacatcagacagagccccaagagaggcttcctgagaagcgccagcctgggcagaagagccagcttccacctggagtgcctgaagagacagaaggacagaggcggcgacatcagccagaagaccgtgctgcccctgcacctggtgcaccaccaggccctggccgtggccggcctgagccccctgctgcagagaagccacagccccgccagcttccccagacccttcgccaccccccccgccacccccggcagcagaggctggcccccccagcccgtgcccaccctgagactggagggcgtggagagcagcgagaagctgaacagcagcttccccagcatccactgcggcagctgggccgagaccacccccggcggcggcggcagcagcgccgccagaagagtgagacccgtgagcctgatggtgcccagccaggccggcgcccccggcagacagttccacggcagcgccagcagcctggtggaggccgtgctgatcagcgagggcctgggccagttcgcccaggaccccaagttcatcgaggtgaccacccaggagctggccgacgcctgcgacatgaccatcgaggagatggagagcgccgccgacaacatcctgagcggcggcgccccccagagccccaacggcgccctgctgcccttcgtgaactgcagagacgccggccaggacagagccggcggcgaggaggacgccggctgcgtgagagccagaggcagacccagcgaggaggagctgcaggacagcagagtgtacgtgagcagcctgtag

SEQ ID NO: 47011 - DNA, 13471 bp, Artificial Sequence
  derived and/or modified sequence
ttattttttcaaatggtgtagccgccggaggtgcggtgctcagttcttggaaggggcccggatgtactgaggatgcgttacagtttcactcgaggaggcagtagtggaaaggagcagtttttggggtttgatgccataatgggaatcaggtaatcgtcggcggggaagaagaaacgctgcagaccacggcttcctcgaatcttgcgcgaaagccgccggcctcggaggagggattaatccagacccgccggggggtgttttcacatttcttcctcttcgtggctgctcctcctattaaaaccatttttggtccatggtcaatgagaatacgaggatgtacattccagaggaaaaccaccaaggttccaactatgggagcccacgccccgcccatgccaacatgaatgccaatgcggcagcggggctggcccctgagcacatccccaccccgggggctgccctgtcgtggcaggcggccatcgacgcagcccggcaggctaagctgatgggcagcgctggcaatgcgaccatctccacagtcagctccacgcagcggaagcggcagcaatatgggaaacccaagaagcagggcagcaccacggccacacgcccgccccgagccctgctctgcctgaccctgaagaaccccatccggagggcctgcatcagcattgtcgaatggaaaccatttgaaataattattttactgactatttttgccaattgtgtggccttagcgatctatattccctttccagaagatgattccaacgccaccaattccaacctggaacgagtggaatatctctttctcataatttttacggtggaagcgtttttaaaagtaatcgcctatggactcctctttcaccccaatgcctacctccgcaacggctggaacctactagattttataattgtggttgtggggctttttagtgcaattttagaacaagcaaccaaagcagatggggcaaacgctctcggagggaaaggggccggatttgatgtgaaggcgctgagggccttccgcgtgctgcgccccctgcggctggtgtccggagtcccaagtctccaggtggtcctgaattccatcatcaaggccatggtccccctgctgcacatcgccctgcttgtgctgtttgtcatcatcatctacgccatcatcggcttggagctcttcatggggaagatgcacaagacctgctacaaccaggagggcatagcagcagaagatgacccttccccttgtgcgctggaaacgggccacgggcggcagtgccagaacggcacggtgtgcaagcccggctgggatggtcccaagcacggcatcaccaactttgacaactttgccttcgccatgctcacggtgttccagtgcatcaccatggagggctggacggacgtgctgtactgggtcaatgatgccgtaggaagggactggccctggatctattttgttacactaatcatcatagggtcattttttgtacttaacttggttctcggtgtgcttagcggagagttttccaaagagagggagaaggccaaggcccggggagatttccagaagctgcgggagaagcagcagctagaagaggatctcaaaggctacctggattggatcactcaggccgaagacatcgatcctgagaatgaggacgaaggcatggatgaggagaagccccgaaacatgagcatgcccaccagtgagaccgagtccgtcaacaccgaaaacgtggctggaggtgacatcgagggagaaaactgcggggccaggctggcccaccggatctccaagtcaaagttcagccgctactggcgccggtggaatcggttctgcagaaggaagtgccgcgccgcagtcaagtctaatgtcttctactggctggtgattttcctggtgttcctcaacacgctcaccattgcctctgagcactacaaccagcccaactggctcacagaagtccaagacacggcaaacaaggccctgctggccctgttcacggcagagatgctcctgaagatgtacagcctgggcctgcaggcctacttcgtgtccctcttcaaccgctttgactgcttcgtcgtgtgtggcggcatcctggagaccatcctggtggagaccaagatcatgtccccactgggcatctccgtgctcagatgcgtccggctgctgaggattttcaagatcacgaggtactggaactccttgagcaacctggtggcatccttgctgaactctgtgcgctccatcgcctccctgctccttctcctcttcctcttcatcatcatcttctccctcctggggatgcagctctttggaggaaagttcaactttgatgagatgcagacccggaggagcacattcgataacttcccccagtccctcctcactgtgtttcagatcctgaccggggaggactggaattcggtgatgtatgatgggatcatggcttatggcggcccctcttttccagggatgttagtctgtatttacttcatcatcctcttcatctgtggaaactatatcctactgaatgtgttcttggccattgctgtggacaacctggctgatgctgagagcctcacatctgcccaaaaggaggaggaagaggagaaggagagaaagaagctggccaggactgccagcccagagaagaaacaagagttggtggagaagccggcagtgggggaatccaaggaggagaagattgagctgaaatccatcacggctgacggagagtctccacccgccaccaagatcaacatggatgacctccagcccaatgaaaatgaggataagagcccctaccccaacccagaaactacaggagaagaggatgaggaggagccagagatgcctgtcggccctcgcccacgaccactctctgagcttcaccttaaggaaaaggcagtgcccatgccagaagccagcgcgtttttcatcttcagctctaacaacaggtttcgcctccagtgccaccgcattgtcaatgacacgatcttcaccaacctgatcctcttcttcattctgctcagcagcatttccctggctgctgaggacccggtccagcacacctccttcaggaaccatattctgttttattttgatattgtttttaccaccattttcaccattgaaattgctctgaagatgactgcttatggggctttcttgcacaagggttctttctgccggaactacttcaacatcctggacctgctggtggtcagcgtgtccctcatctcctttggcatccagtccagtgcaatcaatgtcgtgaagatcttgcgagtcctgcgagtactcaggcccctgagggccatcaacagggccaaggggctaaagcatgtggttcagtgtgtgtttgtcgccatccggaccatcgggaacatcgtgattgtcaccaccctgctgcagttcatgtttgcctgcatcggggtccagctcttcaagggaaagctgtacacctgttcagacagttccaagcagacagaggcggaatgcaagggcaactacatcacgtacaaagacggggaggttgaccaccccatcatccaaccccgcagctgggagaacagcaagtttgactttgacaatgttctggcagccatgatggccctcttcaccgtctccaccttcgaagggtggccagagctgctgtaccgctccatcgactcccacacggaagacaagggccccatctacaactaccgtgtggagatctccatcttcttcatcatctacatcatcatcatcgccttcttcatgatgaacatcttcgtgggcttcgtcatcgtcacctttcaggagcagggggagcaggagtacaagaactgtgagctggacaagaaccagcgacagtgcgtggaatacgccctcaaggcccggcccctgcggaggtacatccccaagaaccagcaccagtacaaagtgtggtacgtggtcaactccacctacttcgagtacctgatgttcgtcctcatcctgctcaacaccatctgcctggccatgcagcactacggccagagctgcctgttcaaaatcgccatgaacatcctcaacatgctcttcactggcctcttcaccgtggagatgatcctgaagctcattgccttcaaacccaagggttactttagtgatccctggaatgtttttgacttcctcatcgtaattggcagcataattgacgtcattctcagtgagactaatccagctgaacatacccaatgctctccctctatgaacgcagaggaaaactcccgcatctccatcaccttcttccgcctgttccgggtcatgcgtctggtgaagctgctgagccgtggggagggcatccggacgctgctgtggaccttcatcaagtccttccaggccctgccctatgtggccctcctgatcgtgatgctgttcttcatctacgcggtgatcgggatgcaggtgtttgggaaaattgccctgaatgataccacagagatcaaccggaacaacaactttcagaccttcccccaggccgtgctgctcctcttcaggtgtgccaccggggaggcctggcaggacatcatgctggcctgcatgccaggcaagaagtgtgccccagagtccgagcccagcaacagcacggagggtgaaacaccctgtggtagcagctttgctgtcttctacttcatcagcttctacatgctctgtgccttcctgatcatcaacctctttgtagctgtcatcatggacaactttgactacctgacaagggactggtccatccttggtccccaccacctggatgagtttaaaagaatctgggcagagtatgaccctgaagccaagggtcgtatcaaacacctggatgtggtgaccctcctccggcggattcagccgccactaggttttgggaagctgtgccctcaccgcgtggcttgcaaacgcctggtctccatgaacatgcctctgaacagcgacgggacagtcatgttcaatgccaccctgtttgccctggtcaggacggccctgaggatcaaaacagaagggaacctagaacaagccaatgaggagctgcgggcgatcatcaagaagatctggaagcggaccagcatgaagctgctggaccaggtggtgccccctgcaggtgatgatgaggtcaccgttggcaagttctacgccacgttcctgatccaggagtacttccggaagttcaagaagcgcaaagagcagggccttgtgggcaagccctcccagaggaacgcgctgtctctgcaggctggcttgcgcacactgcatgacatcgggcctgagatccgacgggccatctctggagatctcaccgctgaggaggagctggacaaggccatgaaggaggctgtgtccgctgcttctgaagatgacatcttcaggagggccggtggcctgttcggcaaccacgtcagctactaccaaagcgacggccggagcgccttcccccagaccttcaccactcagcgcccgctgcacatcaacaaggcgggcagcagccagggcgacactgagtcgccatcccacgagaagctggtggactccaccttcaccccgagcagctactcgtccaccggctccaacgccaacatcaacaacgccaacaacaccgccctgggtcgcctccctcgccccgccggctaccccagcacggtcagcactgtggagggccacgggccccccttgtcccctgccatccgggtgcaggaggtggcgtggaagctcagctccaacaggtgccactcccgggagagccaggcagccatggcgggtcaggaggagacgtctcaggatgagacctatgaagtgaagatgaaccatgacacggaggcctgcagtgagcccagcctgctctccacagagatgctctcctaccaggatgacgaaaatcggcaactgacgctcccagaggaggacaagagggacatccggcaatctccgaagaggggtttcctccgctctgcctcactaggtcgaagggcctccttccacctggaatgtctgaagcgacagaaggaccgagggggagacatctctcagaagacagtcctgcccttgcatctggttcatcatcaggcattggcagtggcaggcctgagccccctcctccagagaagccattcccctgcctcattccctaggccttttgccaccccaccagccacacctggcagccgaggctggcccccacagcccgtccccaccctgcggcttgagggggtcgagtccagtgagaaactcaacagcagcttcccatccatccactgcggctcctgggctgagaccacccccggtggcgggggcagcagcgccgcccggagagtccggcccgtctccctcatggtgcccagccaggctggggccccagggaggcagttccacggcagtgccagcagcctggtggaagcggtcttgatttcagaaggactggggcagtttgctcaagatcccaagttcatcgaggtcaccacccaggagctggccgacgcctgcgacatgaccatagaggagatggagagcgcggccgacaacatcctcagcgggggcgccccacagagccccaatggcgccctcttaccctttgtgaactgcagggacgcggggcaggaccgagccgggggcgaagaggacgcgggctgtgtgcgcgcgcggggtcgaccgagtgaggaggagctccaggacagcagggtctacgtcagcagcctgtagtgggcgctgccagatgcgggcttttttttatttgtttcaatgttcctaatgggttcgtttcagaagtgcctcactgttctcgtgacctggagttaaccggaacagcgtcttcattcatttctgttgggaccagacgcggagcctgggtgcgcgagccgccctccgggaggaaggcgcccggctgcgtctgcagaggcggggagaggaggcggcgagggtcccggggcgcgaggaaggcgcctgccctctcccagctcgcaggccccgggcccggccgcgcctccgcggggagagcaccccggcttcccgcgcgccctcaccaaaaggaccctacagcaaacgggtgtctttcgactctgcttgtagaaaccatttgcacatattctgtacgagcctcgctgtctccctagagccagggccctgcggatttggagaagggagcggggcaggacttccaggaggaccccaacccggcccggagagggaggaggaggcctccaggggcgcggagctctggggatgggcgtcgggccggcagtggtgcggctcactccgtccctgcccacctgcgacgggatcccccgaccggcacgggccacgccgagctcccggccagccgccggcccgcaggcagcgcgagggaggagctgcgccgccggctccgcccaaccaggtggtgctgagcttccgctgagcgctcttttgttttgtggtttgacacttttcttgacagcatgttgcagtttcttttcggttttggttttttttaaatgttttattttgctttcccagcgggaggggaggaagaagagtgtttacaaagtcctgtagccccctcacctttctgttttcacttttgccaatgtacatcgggtttggttttcttgtattatttaaacggttgtggtttcctttttccacggaggttcaatagaagccgctgcaggagagttttaccaaccattgtgtatgcccaataatttgttatcatttccttaggtagtaacctatttttgttctggtttggttcggttatctaatggaaaggtaactggcaatgcacttgatgtggtcttgcacatgtgggtgatagagttgggttcctttttatgctgggtgtacaggtgggtttgggagagaggagcatgcgcgagagagtctccgagtgtgtgcgacgcgtgtgtgtgtggtgggttgtctgtgtgcatatgtcctgcccgtgtatatgcacccacaccatgtgcccgtgcacaccagtgactacgcagtcccccctttctggtttagctgtgggaagatctgaatctggggccgtttgaaagcaaaaacaaaccactgtctctgcttctgaaacgggaatcagtaactctttgcattttctgtcccacaagatatgcaaaaacaatgcaataatattcatttaaaaatacaattgtgagttgtgttggcattaaaactgtattttaaaaaaagacagaaatttaagggaaaaacacaagaaggcattttgcttcaatatattccgtgtaatgttttattgcattgataatgtttctgttgaagaaaccgttatacttgaattcaggtcagtttcagtatttttcaaatatttttttaaaactgaattgcaattgtgccaagcgaatataatgaattgaattaagttggttttcggattcacttcttgtatattttgctgcatgtaaagtaaatcattttgtatttggagtgtgacaagctttacctttgaactcaagtgcttttctatatgtggttgggggaaagggaacaagttttctttagtttgcacaatgagcaaaggtatcaccagtgtagtcattattctgctctccacaaacaggtttggacattactgttttgcatatcttgtgtttgcttacatttccctcaatttttccaaaatcgtttgctgggtatgtttgtaccgcctcttgctgtgagagaccaggacctattttattccagtcttcactctgtccactctgctctggtcatctgatttggtacttctccaagaacagcccttcactgtgaggtgcagggaggcgttctgatgagccctcagtcactgggccgtcatccgcatcccccatggaagaggtagctggctttcccttcccttccaccacacggaattttctctttggcttccttaggaaagtgtacactaaccgggaggataaaattaaagtcaggctgcttggagggaggggcatcctcacttccggattcttgttgctctacccaacaaggacagcaggggctcgagaaaggaactggtgaaaccctgatccatctgaaagtcaactctgcgtgctcctttctccatcccttcctcactctggagcagcctttccttcaggcttgccctaatgtttgggctgccggggagggggccaggacaagggaagaggcatccggagctcacagtgggggtgggaacagatttttgtgggggcatctctaatgctcacttatatctccctagaacatcactcttttggtgctgtgtccttcaaatgtatgtcaacagtggtggctgaaaagggactgctttggggaaaacaggacccaaccattcacccagaattgacccattaaatctcttccagtcctagtgttccctgagcccctcttggcacatatataagtaagctagaaattacaataagggacagtccattcctctatgacagcttgctggactgattcatgacaaagtggagaaatgtactcaatactccccggttaacacagtctagaaacagagtttctttatggatatccacacccaagtcatccaaactttcttgattccttttcactgccatcaaggtcctctagaaattgagtttaggtatcatcctttgaaaagttcccaagatttctaccaggaggtacacacaggcgttccctgtctagggcaggaggactatcctagcttgaccttctgatccactagaataagactggcgtatgatgcctgtcatcagaacagactggcacaagtagtgacatcaatgaaccacagcacaatcttccaagtgatgtctactctccacctaaaatggaattttccccatgaccttgtaaaacataattgtcacatcttccatacccctcctgacagcccccaagtgtcaggagaaaacagtcaggggctaagggcccaagggacttgaagaaacaacagtttaaggtctgcagtttggtcaacttaattcttgtcctccgaccagccctgcctctttcatttccagaccttggagaatttttcccagctttgattcagaaggtactagttataacccctttccttcttcttaatccaataggcctcactctcactgggaaatccactcaaaggaacaaggcaatgtctctcattctatttcccagttccaaattccaggtgcttgtctggagtgaagctacccgttactttctcccagcttttctccacccagcatgtctcctgcccatgcagctgaagacagtggggcaacctcaggagaagcagacctttccatgcccaagttcatctcctgagcaacagtgacacctagaaaatgaggactttggaagtcacccaaaagatggtggctactttatggagtcctgaagatacacagccaccactcctaaaggcaaagaaagaaaacacgaatgtaggtcagggatagagtggaaccctggtcatcggggtttttagcctcatcgtgggaaaggtggtaaaggaggatgatggcatctccatccctagaggccaagaattgaaatatcattgtcaaggattagaaacaattcagcaaagaggccacaaaaagggcctgctgactcccagaagacctctttaaaccccaggggaggcaaatacttgctgatggagtctgggccgtttccatattttaaagaagacctgcctctggggcaaatgtcagcacagagaggactgggaggagaatggaggcaagaaaagggcatattttgactccctctgtgcctcttcccagttcatggaaggatgtgttcagcttacccacccacagtgaccagtgtggtggagccgctgacatctcaaggatctatttgggaaggtgagaagagtactcattccatctgggggtgttgttccagccacatcagcctacctggtgggatgtgggggtgtctgccaccctgtcccccctctgctgatgtccctcccctcaggctgtccaggtgccacctgacacaggctgctgtgcaaagacaggcggggaagcccaaacctcactcccagggaggccctcagccgccagagtccaggttctccagaggctacgatttgaggaggttgagggggaagacaggagggaaagaaaagtcctacaactgtcaggaatggggcacctttccctgtccctaagcaaagctccctcttcccactgccctccccagccccagctccctgtcctccccaacacctagtgagaaagacggtgcgtggaagggagtcccatgggcagatgcttacacgacctctttgtgaagcctcttctgggtttaacttcattcatcaatttattcttatgtcaaagcaatgaaacttttctttctggagccagataccaatacaacaggtgaacgggtttctgccacatctctacattgacgggggatgcttgaacaacccccctcactacacagacacacaccgttaaggcacaagggctggggttgagctctagatgagggactttcctgctcctgcaagggtgagcactgtatacacagacaaggagggtgcagtagagtgactcccttggatggaagtagtaccatcagaacctactattattatgacataaattctatttacatacattgagagaatactacaatcaacactttttcctgggatgactttaagaggtttgagccacagcacctgaagtggcaaagatccatggtctttgtagggtattagagaactcttccagtcacctctgaaagcactctagatcttgcagctgagtggatgaagtgtaacaaatctgttgcacgctgagaggagtcagaattagcatttttcatgaaagttccccacgtctctactaagaatgaggaagaaaagactaagactaggtaattacacagaggcttgaaatgttacatcaccagagccaagtcctctcccttcagatcagttactggctgctacacagggacacccccaccttttcagggcatcccatgcactccacttctcaggatctaaggaatttgactttgtagggatcccagaaagggcactgtgccacttcccctggtgtgaatcagacatacattgtacattcatttctaaaattcactcatgcacctcaaaccaaggtcattatccaaaaaaaaaaaaaaaaagctctgggtggaagagtttgtaagttttaagagagggtcatttctatgtgaggaaatgcagaaatggacagaatgattcttattcactgtttgggtctggagaattcccattgtggaaatcttagagatctcaagtttattaccaagggaataaggaaaaaaaggtgagcaggcaccaggccaagcagtggctcccttgccaaggaacctgaggctgcaggtttcagggacccccttgaagaaacctctcctggccattggccaggagaaaagagaagtctctcctgtagagtcacaagagaagcaaaagagggtgggtcactgggtcctggacatagcccccaaccccaagacttcccaatatggagaaactacaccaatgtttaaaaggggaaaaggaaagaacttgtacatcaagggaagatgatttgtaaacacacagtcctgtgcagaaagatccccttcaggaggtgtctccagcatcccaaagctgtgcgcaccttctcttttcctgcctcaggccacctatgcatccagctgcagcccatacccacacctgaaatccatctcttgaatcccagccaggttatataccaccccattgccatgtcctgtcctggccagaatgcatgctgttcccccaagcctcgtgggagtgaggccatgggaaacagagatgagcatgtctggacaagtctgtgatggtagtggatgagaataacccatggcaaaacacgcacattcattaagaaatagggcgacagattccccgttggtgaagcactgaaaggtctattactctcataatattgctgttttattttaatccaccagagctaccatgcaaaactttcctcctgtgaaacgctccagataaagctcctctaatctccccttccctcatgtcctccagctcaaacccaccttcatcccccaaaccaatctgtatcatgcctgttatcagagaggcacagaaagatgggcagtgcctccgttgtcaccattccccacacccctacacacccccacaccctcccctccaggctccacgacttcacagtcttactgttgtaaatatcattgtacagtttgtaatcctcaaataatcccattgtcagaggcctcgcctgatgggccttctcaccctcgagaaaggccagggaatctagaaggggcaacccttcaaggagagcttcagggtcatctctgtgtgagacactattgtatattcctgtaagattgcatttttatctaaggaatgatgttatttaaaaaacaaacaaaaaacacaaaaaataagaattgcaaataaatttcttaacaatgtct

SEQ ID NO: 47012 - DNA, 13447 bp, Artificial Sequence
  derived and/or modified sequence
ttattttttcaaatggtgtagccgccggaggtgcggtgctcagttcttggaaggggcccggatgtactgaggatgcgttacagtttcactcgaggaggcagtagtggaaaggagcagtttttggggtttgatgccataatgggaatcaggtaatcgtcggcggggaagaagaaacgctgcagaccacggcttcctcgaatcttgcgcgaaagccgccggcctcggaggagggattaatccagacccgccggggggtgttttcacatttcttcctcttcgtggctgctcctcctattaaaaccatttttggtccatggtcaatgagaatacgaggatgtacattccagaggaaaaccaccaaggttccaactatgggagcccacgccccgcccatgccaacatgaatgccaatgcggcagcggggctggcccctgagcacatccccaccccgggggctgccctgtcgtggcaggcggccatcgacgcagcccggcaggctaagctgatgggcagcgctggcaatgcgaccatctccacagtcagctccacgcagcggaagcggcagcaatatgggaaacccaagaagcagggcagcaccacggccacacgcccgccccgagccctgctctgcctgaccctgaagaaccccatccggagggcctgcatcagcattgtcgaatggaaaccatttgaaataattattttactgactatttttgccaattgtgtggccttagcgatctatattccctttccagaagatgattccaacgccaccaattccaacctggaacgagtggaatatctctttctcataatttttacggtggaagcgtttttaaaagtaatcgcctatggactcctctttcaccccaatgcctacctccgcaacggctggaacctactagattttataattgtggttgtggggctttttagtgcaattttagaacaagcaaccaaagcagatggggcaaacgctctcggagggaaaggggccggatttgatgtgaaggcgctgagggccttccgcgtgctgcgccccctgcggctggtgtccggagtcccaagtctccaggtggtcctgaattccatcatcaaggccatggtccccctgctgcacatcgccctgcttgtgctgtttgtcatcatcatctacgccatcatcggcttggagctcttcatggggaagatgcacaagacctgctacaaccaggagggcatagcagatgttccagcagaagatgacccttccccttgtgcgctggaaacgggccacgggcggcagtgccagaacggcacggtgtgcaagcccggctgggatggtcccaagcacggcatcaccaactttgacaactttgccttcgccatgctcacggtgttccagtgcatcaccatggagggctggacggacgtgctgtactgggtcaatgatgccgtaggaagggactggccctggatctattttgttacactaatcatcatagggtcattttttgtacttaacttggttctcggtgtgcttagcggagagttttccaaagagagggagaaggccaaggcccggggagatttccagaagctgcgggagaagcagcagctagaagaggatctcaaaggctacctggattggatcactcaggccgaagacatcgatcctgagaatgaggacgaaggcatggatgaggagaagccccgaaacatgagcatgcccaccagtgagaccgagtccgtcaacaccgaaaacgtggctggaggtgacatcgagggagaaaactgcggggccaggctggcccaccggatctccaagtcaaagttcagccgctactggcgccggtggaatcggttctgcagaaggaagtgccgcgccgcagtcaagtctaatgtcttctactggctggtgattttcctggtgttcctcaacacgctcaccattgcctctgagcactacaaccagcccaactggctcacagaagtccaagacacggcaaacaaggccctgctggccctgttcacggcagagatgctcctgaagatgtacagcctgggcctgcaggcctacttcgtgtccctcttcaaccgctttgactgcttcgtcgtgtgtggcggcatcctggagaccatcctggtggagaccaagatcatgtccccactgggcatctccgtgctcagatgcgtccggctgctgaggattttcaagatcacgaggtactggaactccttgagcaacctggtggcatccttgctgaactctgtgcgctccatcgcctccctgctccttctcctcttcctcttcatcatcatcttctccctcctggggatgcagctctttggaggaaagttcaactttgatgagatgcagacccggaggagcacattcgataacttcccccagtccctcctcactgtgtttcagatcctgaccggggaggactggaattcggtgatgtatgatgggatcatggcttatggcggcccctcttttccagggatgttagtctgtatttacttcatcatcctcttcatctgtggaaactatatcctactgaatgtgttcttggccattgctgtggacaacctggctgatgctgagagcctcacatctgcccaaaaggaggaggaagaggagaaggagagaaagaagctggccaggactgccagcccagagaagaaacaagagttggtggagaagccggcagtgggggaatccaaggaggagaagattgagctgaaatccatcacggctgacggagagtctccacccgccaccaagatcaacatggatgacctccagcccaatgaaaatgaggataagagcccctaccccaacccagaaactacaggagaagaggatgaggaggagccagagatgcctgtcggccctcgcccacgaccactctctgagcttcaccttaaggaaaaggcagtgcccatgccagaagccagcgcgtttttcatcttcagctctaacaacaggtttcgcctccagtgccaccgcattgtcaatgacacgatcttcaccaacctgatcctcttcttcattctgctcagcagcatttccctggctgctgaggacccggtccagcacacctccttcaggaaccatatcctaggcaatgcagactatgtcttcactagtatctttacattagaaattatccttaagatgactgcttatggggctttcttgcacaagggttctttctgccggaactacttcaacatcctggacctgctggtggtcagcgtgtccctcatctcctttggcatccagtccagtgcaatcaatgtcgtgaagatcttgcgagtcctgcgagtactcaggcccctgagggccatcaacagggccaaggggctaaagcatgtggttcagtgtgtgtttgtcgccatccggaccatcgggaacatcgtgattgtcaccaccctgctgcagttcatgtttgcctgcatcggggtccagctcttcaagggaaagctgtacacctgttcagacagttccaagcagacagaggcggaatgcaagggcaactacatcacgtacaaagacggggaggttgaccaccccatcatccaaccccgcagctgggagaacagcaagtttgactttgacaatgttctggcagccatgatggccctcttcaccgtctccaccttcgaagggtggccagagctgctgtaccgctccatcgactcccacacggaagacaagggccccatctacaactaccgtgtggagatctccatcttcttcatcatctacatcatcatcatcgccttcttcatgatgaacatcttcgtgggcttcgtcatcgtcacctttcaggagcagggggagcaggagtacaagaactgtgagctggacaagaaccagcgacagtgcgtggaatacgccctcaaggcccggcccctgcggaggtacatccccaagaaccagcaccagtacaaagtgtggtacgtggtcaactccacctacttcgagtacctgatgttcgtcctcatcctgctcaacaccatctgcctggccatgcagcactacggccagagctgcctgttcaaaatcgccatgaacatcctcaacatgctcttcactggcctcttcaccgtggagatgatcctgaagctcattgccttcaaacccaagcactatttctgtgatgcatggaatacatttgacgccttgattgttgtgggtagcattgttgatatagcaatcaccgaggtaaacaacgcagaggaaaactcccgcatctccatcaccttcttccgcctgttccgggtcatgcgtctggtgaagctgctgagccgtggggagggcatccggacgctgctgtggaccttcatcaagtccttccaggccctgccctatgtggccctcctgatcgtgatgctgttcttcatctacgcggtgatcgggatgcaggtgtttgggaaaattgccctgaatgataccacagagatcaaccggaacaacaactttcagaccttcccccaggccgtgctgctcctcttcaggtgtgccaccggggaggcctggcaggacatcatgctggcctgcatgccaggcaagaagtgtgccccagagtccgagcccagcaacagcacggagggtgaaacaccctgtggtagcagctttgctgtcttctacttcatcagcttctacatgctctgtgccttcctgatcatcaacctctttgtagctgtcatcatggacaactttgactacctgacaagggactggtccatccttggtccccaccacctggatgagtttaaaagaatctgggcagagtatgaccctgaagccaagggtcgtatcaaacacctggatgtggtgaccctcctccggcggattcagccgccactaggttttgggaagctgtgccctcaccgcgtggcttgcaaacgcctggtctccatgaacatgcctctgaacagcgacgggacagtcatgttcaatgccaccctgtttgccctggtcaggacggccctgaggatcaaaacagaagggaacctagaacaagccaatgaggagctgcgggcgatcatcaagaagatctggaagcggaccagcatgaagctgctggaccaggtggtgccccctgcaggtgatgatgaggtcaccgttggcaagttctacgccacgttcctgatccaggagtacttccggaagttcaagaagcgcaaagagcagggccttgtgggcaagccctcccagaggaacgcgctgtctctgcaggctggcttgcgcacactgcatgacatcgggcctgagatccgacgggccatctctggagatctcaccgctgaggaggagctggacaaggccatgaaggaggctgtgtccgctgcttctgaagatgacatcttcaggagggccggtggcctgttcggcaaccacgtcagctactaccaaagcgacggccggagcgccttcccccagaccttcaccactcagcgcccgctgcacatcaacaaggcgggcagcagccagggcgacactgagtcgccatcccacgagaagctggtggactccaccttcaccccgagcagctactcgtccaccggctccaacgccaacatcaacaacgccaacaacaccgccctgggtcgcctccctcgccccgccggctaccccagcacggtcagcactgtggagggccacgggccccccttgtcccctgccatccgggtgcaggaggtggcgtggaagctcagctccaacaggtgccactcccgggagagccaggcagccatggcgggtcaggaggagacgtctcaggatgagacctatgaagtgaagatgaaccatgacacggaggcctgcagtgagcccagcctgctctccacagagatgctctcctaccaggatgacgaaaatcggcaactgacgctcccagaggaggacaagagggacatccggcaatctccgaagaggggtttcctccgctctgcctcactaggtcgaagggcctccttccacctggaatgtctgaagcgacagaaggaccgagggggagacatctctcagaagacagtcctgcccttgcatctggttcatcatcaggcattggcagtggcaggcctgagccccctcctccagagaagccattcccctgcctcattccctaggccttttgccaccccaccagccacacctggcagccgaggctggcccccacagcccgtccccaccctgcggcttgagggggtcgagtccagtgagaaactcaacagcagcttcccatccatccactgcggctcctgggctgagaccacccccggtggcgggggcagcagcgccgcccggagagtccggcccgtctccctcatggtgcccagccaggctggggccccagggaggcagttccacggcagtgccagcagcctggtggaagcggtcttgatttcagaaggactggggcagtttgctcaagatcccaagttcatcgaggtcaccacccaggagctggccgacgcctgcgacatgaccatagaggagatggagagcgcggccgacaacatcctcagcgggggcgccccacagagccccaatggcgccctcttaccctttgtgaactgcagggacgcggggcaggaccgagccgggggcgaagaggacgcgggctgtgtgcgcgcgcggggtcgaccgagtgaggaggagctccaggacagcagggtctacgtcagcagcctgtagtgggcgctgccagatgcgggcttttttttatttgtttcaatgttcctaatgggttcgtttcagaagtgcctcactgttctcgtgacctggagttaaccggaacagcgtcttcattcatttctgttgggaccagacgcggagcctgggtgcgcgagccgccctccgggaggaaggcgcccggctgcgtctgcagaggcggggagaggaggcggcgagggtcccggggcgcgaggaaggcgcctgccctctcccagctcgcaggccccgggcccggccgcgcctccgcggggagagcaccccggcttcccgcgcgccctcaccaaaaggaccctacagcaaacgggtgtctttcgactctgcttgtagaaaccatttgcacatattctgtacgagcctcgctgtctccctagagccagggccctgcggatttggagaagggagcggggcaggacttccaggaggaccccaacccggcccggagagggaggaggaggcctccaggggcgcggagctctggggatgggcgtcgggccggcagtggtgcggctcactccgtccctgcccacctgcgacgggatcccccgaccggcacgggccacgccgagctcccggccagccgccggcccgcaggcagcgcgagggaggagctgcgccgccggctccgcccaaccaggtggtgctgagcttccgctgagcgctcttttgttttgtggtttgacacttttcttgacagcatgttgcagtttcttttcggttttggttttttttaaatgttttattttgctttcccagcgggaggggaggaagaagagtgtttacaaagtcctgtagccccctcacctttctgttttcacttttgccaatgtacatcgggtttggttttcttgtattatttaaacggttgtggtttcctttttccacggaggttcaatagaagccgctgcaggagagttttaccaaccattgtgtatgcccaataatttgttatcatttccttaggtagtaacctatttttgttctggtttggttcggttatctaatggaaaggtaactggcaatgcacttgatgtggtcttgcacatgtgggtgatagagttgggttcctttttatgctgggtgtacaggtgggtttgggagagaggagcatgcgcgagagagtctccgagtgtgtgcgacgcgtgtgtgtgtggtgggttgtctgtgtgcatatgtcctgcccgtgtatatgcacccacaccatgtgcccgtgcacaccagtgactacgcagtcccccctttctggtttagctgtgggaagatctgaatctggggccgtttgaaagcaaaaacaaaccactgtctctgcttctgaaacgggaatcagtaactctttgcattttctgtcccacaagatatgcaaaaacaatgcaataatattcatttaaaaatacaattgtgagttgtgttggcattaaaactgtattttaaaaaaagacagaaatttaagggaaaaacacaagaaggcattttgcttcaatatattccgtgtaatgttttattgcattgataatgtttctgttgaagaaaccgttatacttgaattcaggtcagtttcagtatttttcaaatatttttttaaaactgaattgcaattgtgccaagcgaatataatgaattgaattaagttggttttcggattcacttcttgtatattttgctgcatgtaaagtaaatcattttgtatttggagtgtgacaagctttacctttgaactcaagtgcttttctatatgtggttgggggaaagggaacaagttttctttagtttgcacaatgagcaaaggtatcaccagtgtagtcattattctgctctccacaaacaggtttggacattactgttttgcatatcttgtgtttgcttacatttccctcaatttttccaaaatcgtttgctgggtatgtttgtaccgcctcttgctgtgagagaccaggacctattttattccagtcttcactctgtccactctgctctggtcatctgatttggtacttctccaagaacagcccttcactgtgaggtgcagggaggcgttctgatgagccctcagtcactgggccgtcatccgcatcccccatggaagaggtagctggctttcccttcccttccaccacacggaattttctctttggcttccttaggaaagtgtacactaaccgggaggataaaattaaagtcaggctgcttggagggaggggcatcctcacttccggattcttgttgctctacccaacaaggacagcaggggctcgagaaaggaactggtgaaaccctgatccatctgaaagtcaactctgcgtgctcctttctccatcccttcctcactctggagcagcctttccttcaggcttgccctaatgtttgggctgccggggagggggccaggacaagggaagaggcatccggagctcacagtgggggtgggaacagatttttgtgggggcatctctaatgctcacttatatctccctagaacatcactcttttggtgctgtgtccttcaaatgtatgtcaacagtggtggctgaaaagggactgctttggggaaaacaggacccaaccattcacccagaattgacccattaaatctcttccagtcctagtgttccctgagcccctcttggcacatatataagtaagctagaaattacaataagggacagtccattcctctatgacagcttgctggactgattcatgacaaagtggagaaatgtactcaatactccccggttaacacagtctagaaacagagtttctttatggatatccacacccaagtcatccaaactttcttgattccttttcactgccatcaaggtcctctagaaattgagtttaggtatcatcctttgaaaagttcccaagatttctaccaggaggtacacacaggcgttccctgtctagggcaggaggactatcctagcttgaccttctgatccactagaataagactggcgtatgatgcctgtcatcagaacagactggcacaagtagtgacatcaatgaaccacagcacaatcttccaagtgatgtctactctccacctaaaatggaattttccccatgaccttgtaaaacataattgtcacatcttccatacccctcctgacagcccccaagtgtcaggagaaaacagtcaggggctaagggcccaagggacttgaagaaacaacagtttaaggtctgcagtttggtcaacttaattcttgtcctccgaccagccctgcctctttcatttccagaccttggagaatttttcccagctttgattcagaaggtactagttataacccctttccttcttcttaatccaataggcctcactctcactgggaaatccactcaaaggaacaaggcaatgtctctcattctatttcccagttccaaattccaggtgcttgtctggagtgaagctacccgttactttctcccagcttttctccacccagcatgtctcctgcccatgcagctgaagacagtggggcaacctcaggagaagcagacctttccatgcccaagttcatctcctgagcaacagtgacacctagaaaatgaggactttggaagtcacccaaaagatggtggctactttatggagtcctgaagatacacagccaccactcctaaaggcaaagaaagaaaacacgaatgtaggtcagggatagagtggaaccctggtcatcggggtttttagcctcatcgtgggaaaggtggtaaaggaggatgatggcatctccatccctagaggccaagaattgaaatatcattgtcaaggattagaaacaattcagcaaagaggccacaaaaagggcctgctgactcccagaagacctctttaaaccccaggggaggcaaatacttgctgatggagtctgggccgtttccatattttaaagaagacctgcctctggggcaaatgtcagcacagagaggactgggaggagaatggaggcaagaaaagggcatattttgactccctctgtgcctcttcccagttcatggaaggatgtgttcagcttacccacccacagtgaccagtgtggtggagccgctgacatctcaaggatctatttgggaaggtgagaagagtactcattccatctgggggtgttgttccagccacatcagcctacctggtgggatgtgggggtgtctgccaccctgtcccccctctgctgatgtccctcccctcaggctgtccaggtgccacctgacacaggctgctgtgcaaagacaggcggggaagcccaaacctcactcccagggaggccctcagccgccagagtccaggttctccagaggctacgatttgaggaggttgagggggaagacaggagggaaagaaaagtcctacaactgtcaggaatggggcacctttccctgtccctaagcaaagctccctcttcccactgccctccccagccccagctccctgtcctccccaacacctagtgagaaagacggtgcgtggaagggagtcccatgggcagatgcttacacgacctctttgtgaagcctcttctgggtttaacttcattcatcaatttattcttatgtcaaagcaatgaaacttttctttctggagccagataccaatacaacaggtgaacgggtttctgccacatctctacattgacgggggatgcttgaacaacccccctcactacacagacacacaccgttaaggcacaagggctggggttgagctctagatgagggactttcctgctcctgcaagggtgagcactgtatacacagacaaggagggtgcagtagagtgactcccttggatggaagtagtaccatcagaacctactattattatgacataaattctatttacatacattgagagaatactacaatcaacactttttcctgggatgactttaagaggtttgagccacagcacctgaagtggcaaagatccatggtctttgtagggtattagagaactcttccagtcacctctgaaagcactctagatcttgcagctgagtggatgaagtgtaacaaatctgttgcacgctgagaggagtcagaattagcatttttcatgaaagttccccacgtctctactaagaatgaggaagaaaagactaagactaggtaattacacagaggcttgaaatgttacatcaccagagccaagtcctctcccttcagatcagttactggctgctacacagggacacccccaccttttcagggcatcccatgcactccacttctcaggatctaaggaatttgactttgtagggatcccagaaagggcactgtgccacttcccctggtgtgaatcagacatacattgtacattcatttctaaaattcactcatgcacctcaaaccaaggtcattatccaaaaaaaaaaaaaaaaagctctgggtggaagagtttgtaagttttaagagagggtcatttctatgtgaggaaatgcagaaatggacagaatgattcttattcactgtttgggtctggagaattcccattgtggaaatcttagagatctcaagtttattaccaagggaataaggaaaaaaaggtgagcaggcaccaggccaagcagtggctcccttgccaaggaacctgaggctgcaggtttcagggacccccttgaagaaacctctcctggccattggccaggagaaaagagaagtctctcctgtagagtcacaagagaagcaaaagagggtgggtcactgggtcctggacatagcccccaaccccaagacttcccaatatggagaaactacaccaatgtttaaaaggggaaaaggaaagaacttgtacatcaagggaagatgatttgtaaacacacagtcctgtgcagaaagatccccttcaggaggtgtctccagcatcccaaagctgtgcgcaccttctcttttcctgcctcaggccacctatgcatccagctgcagcccatacccacacctgaaatccatctcttgaatcccagccaggttatataccaccccattgccatgtcctgtcctggccagaatgcatgctgttcccccaagcctcgtgggagtgaggccatgggaaacagagatgagcatgtctggacaagtctgtgatggtagtggatgagaataacccatggcaaaacacgcacattcattaagaaatagggcgacagattccccgttggtgaagcactgaaaggtctattactctcataatattgctgttttattttaatccaccagagctaccatgcaaaactttcctcctgtgaaacgctccagataaagctcctctaatctccccttccctcatgtcctccagctcaaacccaccttcatcccccaaaccaatctgtatcatgcctgttatcagagaggcacagaaagatgggcagtgcctccgttgtcaccattccccacacccctacacacccccacaccctcccctccaggctccacgacttcacagtcttactgttgtaaatatcattgtacagtttgtaatcctcaaataatcccattgtcagaggcctcgcctgatgggccttctcaccctcgagaaaggccagggaatctagaaggggcaacccttcaaggagagcttcagggtcatctctgtgtgagacactattgtatattcctgtaagattgcatttttatctaaggaatgatgttatttaaaaaacaaacaaaaaacacaaaaaataagaattgcaaataaatttcttaacaatgtct

SEQ ID NO: 47013 - protein, 568 aa, Artificial Sequence
  derived and/or modified sequence
MLLLPSAADGRGTAITHALTSASTLCQVEPVGRWFEAFVKRRNRNASASFQELEDKKELSEESEDEELQLEEFPMLKTLDPKDWKNQDHYAVLGLGHVRYKATQRQIKAAHKAMVLKHHPDKRKAAGEPIKEGDNDYFTCITKAYEMLSDPVKRRAFNSVDPTFDNSVPSKSEAKDNFFEVFTPVFERNSRWSNKKNVPKLGDMNSSFEDVDIFYSFWYNFDSWREFSYLDEEEKEKAECRDERRWIEKQNRATRAQRKKEEMNRIRTLVDNAYSCDPRIKKFKEEEKAKKEAEKKAKAEAKRKEQEAKEKQRQAELEAARLAKEKEEEEVRQQALLAKKEKDIQKKAIKKERQKLRNSCKIEEINEQIRKEKEEAEARMRQASKNTEKSTGGGGNGSKNWSEDDLQLLIKAVNLFPAGTNSRWEVIANYMNIHSSSGVKRTAKDVIGKAKSLQKLDPHQKDDINKKAFDKFKKEHGVVPQADNATPSERFEGPYTDFTPWTTEEQKLLEQALKTYPVNTPERWEKIAEAVPGRTKKDCMKRYKELVEMVKAKKAAQEQVLNASRAKK

SEQ ID NO: 47014 - DNA, 1707 bp, Artificial Sequence
  derived and/or modified sequence
atgttgctgttgccttcagctgcggacggtaggggcaccgcaattacccatgctcttacatccgcctctactctttgtcaggtggaaccagtcggtcgttggttcgaagcctttgtaaagcgccgcaacagaaacgccagtgcctcctttcaggaactggaggacaagaaggaactgtccgaggagagcgaagatgaagagctgcagcttgaagagttcccaatgctaaaaaccttagatccaaaagactggaaaaaccaggatcactacgctgtgttgggactaggccacgttaggtacaaagcgacccagaggcaaatcaaagccgcccacaaagcaatggtcctgaaacaccatcctgacaaaagaaaagctgccggtgaacctattaaggagggcgacaatgactatttcacctgcataactaaagcctacgagatgctgagtgaccctgtgaagcgccgggccttcaactcagtcgacccaaccttcgacaacagcgtcccatctaaaagtgaagccaaagacaatttctttgaggttttcacccccgtctttgaaagaaacagccggtggagcaataagaaaaatgttcccaagctcggtgacatgaatagtagctttgaagacgtggatattttttatagcttttggtataacttcgacagctggcgcgaattttcttacctggacgaggaggagaaagaaaaagctgagtgcagggacgaaaggcgatggattgagaagcaaaacagagccaccagagctcagagaaagaaggaggagatgaacagaatccggacattggtggacaatgcttattcttgcgatccccggatcaaaaaatttaaggaagaagagaaagccaagaaagaggcagaaaaaaaggcgaaggctgaggccaagcgcaaagaacaggaagctaaggaaaagcaacgacaagcggaactcgaagcagcacggctggccaaagagaaggaggaggaggaagttcgacaacaggccctgttagcaaagaaagaaaaggatatccagaaaaaggctatcaaaaaggagcggcaaaaactgcggaattcctgcaaaatcgaggaaataaatgaacagattagaaaagagaaggaggaggccgaggcccgcatgaggcaagccagtaaaaacacagaaaaaagcacgggtggagggggcaatggcagcaagaattggtcagaagatgatctccaactgttaatcaaagcagtgaatctgtttcctgccgggaccaactctcgttgggaagtgatagctaactatatgaacatccattccagctccggcgtgaagaggacagccaaggatgtcattggcaaggcaaagtctttgcaaaagttggacccccaccagaaggacgatatcaataaaaaggcctttgacaaattcaaaaaggaacatggagttgtcccacaggcagacaacgcgaccccatctgaacgtttcgagggtccctacacagactttacaccctggaccacagaagaacaaaagctgcttgaacaagcactgaagacctaccctgtaaacactcctgaacgctgggagaaaatcgccgaagctgttcccggacgtaccaagaaggactgcatgaaaagatataaagaactggtggagatggtcaaggctaagaaagccgcccaagagcaagtacttaacgccagtagggcgaagaagtag

SEQ ID NO: 47015 - DNA, 1866 bp, Artificial Sequence
  derived and/or modified sequence
atgttgctgttacccagtgccgctgacggacgcggcacagcgattacgcatgccctgactagcgctagtactctatgccaggtagagcccgttggccggtggtttgaagccttcgtgaaacgaagaaataggaatgcttctgctagtttccaggagctggaggacaagaaggaattgtccgaagagagcgaggatgaggagctgcagctggaagaattccctatgctgaaaaccctcgatcctaaagactggaaaaatcaggaccactatgcggttctaggcctgggtcatgttaggtataaagccactcagcgtcaaattaaggccgctcataaggccatggtcctgaagcatcatccagacaagcgcaaagccgcgggagagccaattaaggagggcgacaacgactacttcacctgcatcactaaggcgtacgagatgcttagcgaccctgtgaagcgtcgtgcctttaactctgttgatcccacattcgataattccgtcccatccaaatccgaagctaaagacaatttcttcgaagtgttcacccctgtcttcgaaagaaactcaagatggtctaacaagaagaacgtccccaaactgggagatatgaacagtagctttgaggacgtggatatcttctattcattctggtacaattttgactcatggcgggaattttcgtaccttgatgaggaggagaaagagaaggccgaatgccgcgatgagcgccgctggattgaaaagcagaatcgggctactcgtgcccagagaaaaaaagaagaaatgaatcgaattaggactctggttgataatgcttatagttgcgatccaaggattaaaaagtttaaggaggaggaaaaggccaagaaagaagccgaaaaaaaagcaaaggccgaggctaaacgcaaggagcaggaggccaaagagaaacagaggcaggccgagctcgaggcggcaagactggctaaggagaaggaagaggaggaagtgagacagcaagctctcctcgcaaagaaggagaaagacatacaaaaaaaagctatcaaaaaagagaggcagaagctaaggaactcatgtaagacctggaatcacttttccgacaacgaggctgagagagtgaagatgatggaagaggtagagaagctctgcgacaggctcgaacttgcatcgctgcagtgtctgaatgaaacgctcactagttgcaccaaagaggtgggcaaggcagccctggagaaacagatcgaggagattaatgaacaaattagaaaggaaaaagaggaggccgaagctcgaatgcggcaggcatctaaaaacaccgagaagtccactgggggaggcgggaacggctcgaagaactggtctgaagatgacctgcaacttctgatcaaggctgttaatctgttccccgccggaactaactcgcgatgggaggtgatagctaactacatgaatatccactcctccagtggtgtgaagagaaccgccaaagacgtcataggcaaggccaagtctcttcagaagctggacccccaccagaaggacgacataaataagaaagctttcgacaagttcaagaaagaacatggtgtcgtcccacaggccgacaacgccacaccatcagagcggttcgaaggcccctacacagactttaccccatggacgaccgaggaacagaagctgcttgagcaagccctcaaaacttaccccgtcaacactccagaacgctgggaaaagattgcagaagccgtccctgggcgcacgaagaaggattgcatgaagagatataaggagctggtagagatggtcaaggctaagaaagcggcccaggaacaggtgttgaacgcttcgagggccaagaagtag

SEQ ID NO: 47016 - DNA, 609 bp, Artificial Sequence
  derived and/or modified sequence
atgctactgctgccctcagcagctgatggccgggggaccgccattacacacgccttgacgtccgcaagcacgctgtgtcaagtggagccagtcggcaggtggttcgaggctttcgtgaaacgccgcaacaggaatgcctccgcttcttttcaggaactggaagataagaaggaactgagtgaagagtctgaggatgaggaactccagctggaagagttccccatgctcaaaacactcgaccctaaagattggaaaaaccaggatcactacgccgtgttaggcctgggccatgtgcggtataaggcaacccagcgtcagatcaaggccgctcataaagccatggtgcttaagcatcatccagataaaagaaaggcagccggcgagcctataaaggagggggacaacgattacttcacctgcatcactaaggcctacgaaatgttaagcgatccagtcaaaaggagagcattcaactccgtggaccctactttcgacaactccgttccctcaaaaagtgaagcaaaggacaatttcttcgaggttttcacgcccgtgtttgagaggaactcaagagtttccatcagtaaaaagaagaagaagaaaagatag

SEQ ID NO: 47017 - DNA, 1707 bp, Artificial Sequence
  derived and/or modified sequence
atgctgctgctgcccagcgctgctgatggccggggcacagccatcacccacgccctgaccagcgccagcaccctgtgccaggtggagcctgtgggccgctggtttgaggcctttgtgaagagaagaaacagaaatgccagcgccagcttccaggagctggaggacaagaaggagctgtctgaggagagtgaagatgaggagctgcagctggaggagttccccatgctgaagaccctggaccccaaggactggaagaaccaggaccactatgctgtgctgggcctgggccacgtgcgctacaaggccacccagaggcagatcaaggccgcccacaaggccatggtgctgaagcaccacccagacaagaggaaggccgccggggagcccatcaaggagggggacaatgactacttcacctgcatcaccaaggcctatgagatgctgagtgaccctgtgaagaggcgggccttcaacagcgtggaccccacctttgacaacagcgtgcccagcaagtctgaggccaaggacaacttctttgaggtgttcacccctgtgtttgagaggaacagccgctggagcaacaagaagaatgtgcccaagctgggggacatgaacagcagctttgaagatgtggacatcttctacagcttctggtacaactttgacagctggagggagttctcctacctggatgaggaggagaaggagaaggcagaatgtagagatgagcggcgctggattgagaagcagaacagagccacccgggcccagaggaagaaggaggagatgaaccgcatccgcaccctggtggacaatgcctacagctgtgacccccgcatcaagaagttcaaggaggaggagaaggccaagaaggaggccgagaagaaggccaaggccgaggccaagaggaaggagcaggaggccaaggagaagcagaggcaggccgagctggaggccgcccggctggccaaggagaaggaggaggaggaggtgcggcagcaggccctgctggccaagaaggagaaggacatccagaagaaggccatcaagaaggagcggcagaagctgaggaacagctgcaagattgaggagatcaatgagcagatcaggaaggagaaggaggaggccgaggccaggatgaggcaggccagcaagaacacagagaagagcactggaggcggcggcaatggcagcaagaactggagcgaagatgacctgcagctgctgatcaaggctgtgaacctcttccctgctggcaccaacagccgctgggaggtgattgccaactacatgaacatccacagcagcagtggagtgaagaggacagccaaggatgtgattggcaaggccaagagcctgcagaagctggacccccaccagaaggatgacatcaacaagaaggcctttgacaagttcaagaaggagcacggcgtggtgccccaggccgacaatgccacccccagcgagagatttgagggcccctacacagacttcaccccctggaccacagaggagcagaagctgctggagcaggccctgaagacctaccctgtgaacaccccagagcgctgggagaagattgctgaggccgtgcccggccgcaccaagaaggactgcatgaagcgctacaaggagctggtggagatggtgaaggccaagaaggccgcccaggagcaggtgctgaatgccagccgggccaagaagtag

SEQ ID NO: 47018 - DNA, 1866 bp, Artificial Sequence
  derived and/or modified sequence
atgctgctgctgcccagcgctgctgatggccggggcacagccatcacccacgccctgaccagcgccagcaccctgtgccaggtggagcctgtgggccgctggtttgaggcctttgtgaagagaagaaacagaaatgccagcgccagcttccaggagctggaggacaagaaggagctgtctgaggagagtgaagatgaggagctgcagctggaggagttccccatgctgaagaccctggaccccaaggactggaagaaccaggaccactatgctgtgctgggcctgggccacgtgcgctacaaggccacccagaggcagatcaaggccgcccacaaggccatggtgctgaagcaccacccagacaagaggaaggccgccggggagcccatcaaggagggggacaatgactacttcacctgcatcaccaaggcctatgagatgctgagtgaccctgtgaagaggcgggccttcaacagcgtggaccccacctttgacaacagcgtgcccagcaagtctgaggccaaggacaacttctttgaggtgttcacccctgtgtttgagaggaacagccgctggagcaacaagaagaatgtgcccaagctgggggacatgaacagcagctttgaagatgtggacatcttctacagcttctggtacaactttgacagctggagggagttctcctacctggatgaggaggagaaggagaaggcagaatgtagagatgagcggcgctggattgagaagcagaacagagccacccgggcccagaggaagaaggaggagatgaaccgcatccgcaccctggtggacaatgcctacagctgtgacccccgcatcaagaagttcaaggaggaggagaaggccaagaaggaggccgagaagaaggccaaggccgaggccaagaggaaggagcaggaggccaaggagaagcagaggcaggccgagctggaggccgcccggctggccaaggagaaggaggaggaggaggtgcggcagcaggccctgctggccaagaaggagaaggacatccagaagaaggccatcaagaaggagcggcagaagctgaggaacagctgcaagacctggaaccacttcagtgacaatgaagctgagcgggtgaagatgatggaggaggtggagaagctgtgtgaccggctggagctggccagcctgcagtgcctgaatgagaccctgaccagctgcaccaaggaggtgggcaaggccgccctggagaagcagatcgaggagatcaatgagcagatcaggaaggagaaggaggaggccgaggccaggatgaggcaggccagcaagaacacagagaagagcactggaggcggcggcaatggcagcaagaactggagcgaagatgacctgcagctgctgatcaaggctgtgaacctcttccctgctggcaccaacagccgctgggaggtgattgccaactacatgaacatccacagcagcagcggcgtgaagaggacagccaaggatgtgattggcaaggccaagagcctgcagaagctggacccccaccagaaggatgacatcaacaagaaggcctttgacaagttcaagaaggagcacggcgtggtgccccaggccgacaatgccaccccatctgaaagatttgagggcccctacacagacttcaccccctggaccacagaggagcagaagctgctggagcaggccctgaagacctaccctgtgaacaccccagagcgctgggagaagattgctgaggccgtgcccggccgcaccaagaaggactgcatgaagcgctacaaggagctggtggagatggtgaaggccaagaaggccgcccaggagcaggtgctgaatgccagccgggccaagaagtag

SEQ ID NO: 47019 - DNA, 609 bp, Artificial Sequence
  derived and/or modified sequence
atgctgctgctgcccagcgctgctgatggccggggcacagccatcacccacgccctgaccagcgccagcaccctgtgccaggtggagcctgtgggccgctggtttgaggcctttgtgaagagaagaaacagaaatgccagcgccagcttccaggagctggaggacaagaaggagctgtctgaggagagtgaagatgaggagctgcagctggaggagttccccatgctgaagaccctggaccccaaggactggaagaaccaggaccactatgctgtgctgggcctgggccacgtgcgctacaaggccacccagaggcagatcaaggccgcccacaaggccatggtgctgaagcaccacccagacaagaggaaggccgccggggagcccatcaaggagggggacaatgactacttcacctgcatcaccaaggcctatgagatgctgagtgaccctgtgaagaggcgggccttcaacagcgtggaccccacctttgacaacagcgtgcccagcaagtctgaggccaaggacaacttctttgaggtgttcacccctgtgtttgagaggaacagccgggtgtccatcagcaagaagaagaagaagaagaggtag

SEQ ID NO: 47020 - DNA, 1707 bp, Artificial Sequence
  derived and/or modified sequence
atgctgctgctgcccagcgccgccgacggccggggcaccgccatcacgcacgcactgactagcgccagcactctctgtcaggttgaacccgtgggcagatggtttgaggctttcgtaaaacgccgtaacaggaatgctagcgcctcctttcaggaactggaggataagaaggagctgagtgaagagtccgaggatgaggaacttcagctagaggagttcccaatgcttaagactctggatccgaaggattggaaaaaccaggaccactatgcggtgctcggactaggccatgttcgatataaggctacccagagacaaatcaaggcagcccataaagctatggtcctgaaacaccatcccgacaaaagaaaggcagctggtgagcccattaaagagggcgacaatgactattttacttgtataaccaaggcatacgaaatgttgtctgatcctgtgaagaggagagcatttaactctgtggaccctaccttcgacaattcagtgccaagcaaaagcgaggcaaaggacaatttcttcgaggtgtttacacccgtgttcgaacgcaattctagatggagcaacaagaagaacgttcccaagctgggcgacatgaacagcagtttcgaggacgtagacatcttctattcattttggtataacttcgactcatggcgggaattctcctacctggacgaagaggaaaaagagaaagcggagtgtcgggatgagcggagatggattgagaagcaaaatcgcgctacccgggcccagagaaaaaaggaggaaatgaatagaattaggaccctggtcgataatgcgtatagttgtgatcctcgcatcaagaaatttaaggaagaagagaaggctaagaaagaagccgagaagaaagccaaagccgaggccaaaagaaaggaacaggaagctaaagagaagcagcgccaggcagagctggaagcagccaggcttgccaaagaaaaagaggaagaggaagtgaggcaacaggcgctgttagctaagaaagagaaggacattcagaaaaaagctatcaagaaagagcgccagaaacttagaaattcgtgtaagatcgaggaaattaatgaacaaataaggaaagagaaggaagaagccgaggcgagaatgaggcaagcatctaagaatactgagaaatctactggcggcggtggtaacgggagtaagaactggtcagaggacgacctccagctgttgatcaaggctgtcaatctcttccccgctggcactaactccagatgggaggtaattgctaattacatgaatattcattcctccagtggtgtgaagagaacagcaaaggacgtgatcggcaaggccaagagcctgcagaagctagaccctcaccagaaagacgacattaataagaaagcattcgataaatttaagaaagagcacggagtggtgccccaagccgataatgccacaccaagcgagagattcgaagggccttacactgacttcacgccctggaccaccgaagagcagaaactactggagcaggctcttaagacatacccagttaatacccccgagagatgggagaagatagctgaagctgtcccaggccggacaaagaaagactgcatgaaaagatataaagagcttgtcgaaatggtcaaggctaaaaaagctgcacaggagcaggtgctcaacgcatcacgggcaaaaaaatag

SEQ ID NO: 47021 - DNA, 1866 bp, Artificial Sequence
  derived and/or modified sequence
atgctgctgctgcccagcgccgccgacggccggggcaccgccatcacccacgccctcacatcagctagcaccctttgtcaggtggaacctgtggggcgttggtttgaggccttcgtcaagaggaggaacagaaacgccagtgcttccttccaggaactggaggataagaaggagctctctgaagagtcagaggacgaggagctgcagctggaggagttcccaatgctgaagaccctggacccaaaagactggaaaaatcaggaccactacgccgtgctcggcctcggtcacgtgaggtacaaagctactcagaggcagatcaaggccgcacataaggccatggttcttaagcaccacccagataagcggaaagctgcaggcgaaccgataaaggaaggtgacaatgattacttcacgtgtatcaccaaagcttatgagatgctgagcgaccccgtgaagcgtcgggccttcaatagcgttgaccctacattcgataatagcgtacctagcaagagcgaggctaaggataatttcttcgaggtgttcacaccagtgtttgagagaaattccagatggagtaataagaaaaacgtgccgaagcttggggatatgaatagttctttcgaagatgtggatatattttatagcttctggtataatttcgattcttggcgtgagttctcatatctcgatgaggaggagaaggaaaaggccgaatgccgcgatgaacgtcgctggatcgaaaagcagaatcgggctacacgcgctcagcgcaaaaaagaagagatgaacagaatacgaactcttgtagataatgcctatagctgcgatcctaggatcaaaaaatttaaagaggaggagaaggctaaaaaggaagctgagaaaaaggcaaaggcagaagccaagcggaaggaacaggaagcaaaggagaaacagagacaggccgagctagaggcagctcgcctggctaaggagaaggaggaggaagaggtgaggcagcaagctctcttggcaaagaaggaaaaggacatccaaaagaaagccataaaaaaagaacggcagaaattgaggaactcttgtaagacgtggaatcacttctccgataatgaggctgaacgagtgaagatgatggaggaagtcgagaagctttgcgatcgcctggaactggccagccttcaatgtcttaatgagactcttacatcttgcactaaggaggtgggtaaggctgcacttgagaaacagattgaggaaattaatgagcagatacgcaaggagaaggaagaagctgaagcccggatgcgccaggcatctaagaataccgaaaaatcaacaggcggcggtgggaatgggtccaaaaattggtccgaggacgacttgcagctgctaatcaaagccgtgaatctgtttcccgccggaacaaattctagatgggaggttattgcaaattacatgaacattcactcgagttcaggtgttaaacggacagcaaaggatgtgatcggaaaggccaaatcacttcaaaagctggatcctcaccagaaagacgatataaacaagaaagccttcgataaattcaagaaagagcacggtgttgtacctcaagccgacaacgctactccttctgaacgcttcgaggggccatacacggacttcacaccttggaccacggaggagcagaaacttttggagcaggctcttaaaacctatcccgtcaacacaccagagcgatgggagaaaatcgcagaggccgtgcccggcaggactaaaaaagattgtatgaagcggtacaaggaacttgtggaaatggttaaagcaaaaaaagctgcacaagagcaggtgctgaacgcctctagagcgaaaaagtag

SEQ ID NO: 47022 - DNA, 609 bp, Artificial Sequence
  derived and/or modified sequence
atgctgctgctgcccagcgccgccgacggccggggcaccgccatcacccatgcgctgaccagcgcaagtacgctgtgccaggtggagcctgtcggaaggtggttcgaggctttcgtgaagcggcgaaaccgcaacgccagtgcatctttccaagagctggaagacaaaaaggaactgagcgaggagagcgaggacgaggaactgcagttggaggaattccccatgctaaaaaccctagaccctaaagactggaagaaccaggatcattacgcagtattggggctaggtcacgtgcgctacaaggccacacagcgccagattaaggccgcacacaaggccatggttctcaagcaccatcctgataaacgtaaggcagccggcgagcccatcaaggagggcgataatgattattttacatgcataaccaaggcatatgaaatgctgtccgatcccgttaagcggagagcgttcaattctgtggatcccaccttcgacaattccgtgcccagcaagagtgaggccaaggataacttcttcgaagtgttcacgcctgtgtttgagcggaattctagggtttccatttctaaaaaaaagaagaaaaagagatag

SEQ ID NO: 47023 - DNA, 1707 bp, Artificial Sequence
  derived and/or modified sequence
atgcttctgctccccagcgcagccgacggacggggaacagccatcacacatgcactgacctcagcatccacgttgtgccaggtggagccagtcgggagatggtttgaagctttcgtcaaaaggcgcaatcggaatgccagtgcttcctttcaggagctcgaggataagaaagaattgtcagaggagtccgaggatgaagaactgcagttggaagagtttcctatgctgaaaacactcgaccccaaggactggaaaaaccaagatcactatgccgtgcttgggttggggcatgtgagatataaggcaacccagcgacagatcaaagccgctcacaaggcaatggtactgaagcatcatccagataaacgtaaggccgcaggggaacccattaaagagggggataatgattactttacctgtatcaccaaggcctacgagatgttgagtgacccagtgaaaaggcgtgcattcaattccgtcgaccctacattcgacaactctgtgcccagtaagtccgaagctaaggacaatttttttgaggtttttactccagtttttgagaggaacagccgctggtccaacaagaaaaatgtccctaagctgggtgatatgaatagtagcttcgaggacgtggatatcttctacagtttctggtacaatttcgacagctggcgggaattttcatacctggatgaggaggaaaaggaaaaggcggagtgcagggatgagcggagatggattgagaagcagaacagggccactcgcgctcaacgcaagaaagaggagatgaacaggattcgaacactggtagataatgcatattcttgcgatcccaggatcaagaagttcaaggaggaagagaaagcaaagaaagaagcggagaagaaggccaaggccgaagcaaagagaaaagaacaggaggccaaggaaaaacaacgccaggcagaactggaggcagcgagattagccaaggagaaagaggaggaagaagtccggcagcaggctctgctcgctaagaaggaaaaagacatccaaaagaaagctatcaagaaggaacggcagaaactgaggaattcatgcaaaatagaggaaataaacgagcagatacggaaagaaaaggaagaagccgaagcacgcatgagacaggcttccaaaaacacagagaaatctaccggaggcggagggaatggctccaagaattggagtgaagatgatctccaactgttaatcaaggccgtgaatctcttcccggcaggtaccaactctaggtgggaggtaatagccaattatatgaacattcatagttctagtggagtgaaacgcactgccaaggacgtcatcggcaaggccaaaagccttcagaaactggaccctcatcagaaggatgatatcaataagaaagctttcgacaagtttaagaaagaacacggtgtagtgccccaagcggataatgccactccgtctgaacggtttgagggcccttatactgatttcacgccttggactacagaagagcagaaacttctggagcaagcactgaaaacgtatcccgtgaacacacccgaaaggtgggagaaaatcgccgaagccgtcccaggcaggaccaagaaggactgcatgaagagatacaaagagctggtggaaatggtgaaggccaaaaaagcagcgcaggaacaggttttgaatgcaagccgtgcaaagaaatag

SEQ ID NO: 47024 - DNA, 1866 bp, Artificial Sequence
  derived and/or modified sequence
atgttattgcttccttctgccgctgacggcagaggaacagcaattacacatgctctgacctcagctagcactctttgtcaagtagagcccgtgggccgatggtttgaagctttcgtgaagcgcaggaatagaaatgcatctgcctccttccaggaacttgaggacaagaaggaattgtcagaagagtctgaggatgaggaactgcagctggaggagttcccaatgttgaaaaccctggatcctaaggattggaaaaatcaggatcattacgccgttttgggtctgggacatgtacgctataaagcgacccagcgccagattaaggctgcccataaagccatggtgctaaagcatcacccagacaagcggaaggctgccggagagcccatcaaagaaggtgataatgattactttacatgcatcaccaaagcctatgaaatgctttctgacccagtgaagaggagggcctttaacagcgtggaccctaccttcgacaactccgttcccagtaagtcggaggcgaaggataatttttttgaggtgttcaccccagtgtttgagagaaactcccggtggtctaacaagaaaaatgtgcctaagctaggcgatatgaatagctccttcgaggacgtggatattttttattccttctggtataacttcgattcgtggagggaattctcctatcttgatgaggaggagaaagagaaggctgagtgtcgcgacgaacgtaggtggatcgagaagcagaatcgagccactagagcgcaaagaaaaaaggaggagatgaataggatccggacgttggtcgataacgcatattcatgtgatcccagaatcaaaaagttcaaagaggaagagaaagctaaaaaagaggctgagaaaaaggccaaggccgaggctaagagaaaggaacaggaggcgaaagaaaagcagaggcaggccgagctggaggctgccagactcgcgaaggagaaggaggaggaggaggttagacagcaagcattgctggctaagaaggaaaaagatatccagaagaaagctataaaaaaggaaaggcaaaaactccgtaattcatgtaaaacctggaaccacttctccgataacgaggcagaaagagtaaagatgatggaagaggtcgagaaactgtgtgacagactggagctagcaagcttacaatgtctgaacgagaccctcacaagttgcactaaagaggtagggaaggcagccttggagaagcagatcgaggaaatcaatgaacaaatccgcaaagagaaggaggaggcggaggctaggatgaggcaagcctctaagaacaccgagaagtccactgggggagggggtaatggaagcaaaaactggagcgaggatgatcttcagctgctgatcaaagccgtcaacttgttccctgcagggactaattcacgatgggaagtgatagccaattatatgaacattcactccagtagcggcgtgaaacgaaccgcaaaagatgttatcggaaaagctaagtctctgcaaaaactggatcctcaccaaaaagatgatattaacaagaaggcgttcgataaatttaagaaagagcacggcgtggtccctcaggcagacaatgcaacaccaagcgagcggttcgaaggcccttatactgattttaccccttggaccactgaggaacagaaattgctggaacaggctctgaagacgtaccctgttaacacccctgaaaggtgggagaagattgccgaagccgttccgggacggactaagaaagactgtatgaaacgttataaggagctggtggaaatggtcaaagctaagaaagccgctcaggagcaggtgcttaacgccagtcgtgccaagaagtag

SEQ ID NO: 47025 - DNA, 609 bp, Artificial Sequence
  derived and/or modified sequence
atgctcctgttgccaagcgcggctgacggccgaggaacggcgatcacccatgctctgacgtccgcctccaccttgtgccaggtggaaccggttgggcgatggttcgaggccttcgtcaagcgccgaaacaggaatgcatcagccagctttcaagagttggaggacaagaaggagctgtccgaggaaagcgaagacgaggaattgcagctggaagagtttccgatgttaaagacccttgaccctaaggactggaagaaccaagaccactacgccgtgctgggacttgggcacgttcgatataaggccacccagagacagattaaggcagctcacaaggccatggtgttaaagcatcatcctgacaagagaaaggccgctggcgagccaatcaaggaaggggataatgattatttcacctgcatcaccaaagcctacgagatgttgagtgacccggtgaaacggcgtgcctttaattctgtcgaccccacgtttgacaattccgtcccctcgaaatccgaggcaaaggacaacttttttgaagtgtttactcccgtgttcgaacgaaactcacgtgtgagcatctcaaagaagaagaagaaaaagcggtag

SEQ ID NO: 47026 - DNA, 1707 bp, Artificial Sequence
  derived and/or modified sequence
atgctgctgctgcccagcgccgccgacggcagaggcaccgccatcacccacgccctgaccagcgccagcaccctgtgccaggtggagcccgtgggcagatggttcgaggccttcgtgaagagaagaaacagaaacgccagcgccagcttccaggagctggaggacaagaaggagctgagcgaggagagcgaggacgaggagctgcagctggaggagttccccatgctgaagaccctggaccccaaggactggaagaaccaggaccactacgccgtgctgggcctgggccacgtgagatacaaggccacccagagacagatcaaggccgcccacaaggccatggtgctgaagcaccaccccgacaagagaaaggccgccggcgagcccatcaaggagggcgacaacgactacttcacctgcatcaccaaggcctacgagatgctgagcgaccccgtgaagagaagagccttcaacagcgtggaccccaccttcgacaacagcgtgcccagcaagagcgaggccaaggacaacttcttcgaggtgttcacccccgtgttcgagagaaacagcagatggagcaacaagaagaacgtgcccaagctgggcgacatgaacagcagcttcgaggacgtggacatcttctacagcttctggtacaacttcgacagctggagagagttcagctacctggacgaggaggagaaggagaaggccgagtgcagagacgagagaagatggatcgagaagcagaacagagccaccagagcccagagaaagaaggaggagatgaacagaatcagaaccctggtggacaacgcctacagctgcgaccccagaatcaagaagttcaaggaggaggagaaggccaagaaggaggccgagaagaaggccaaggccgaggccaagagaaaggagcaggaggccaaggagaagcagagacaggccgagctggaggccgccagactggccaaggagaaggaggaggaggaggtgagacagcaggccctgctggccaagaaggagaaggacatccagaagaaggccatcaagaaggagagacagaagctgagaaacagctgcaagatcgaggagatcaacgagcagatcagaaaggagaaggaggaggccgaggccagaatgagacaggccagcaagaacaccgagaagagcaccggcggcggcggcaacggcagcaagaactggagcgaggacgacctgcagctgctgatcaaggccgtgaacctgttccccgccggcaccaacagcagatgggaggtgatcgccaactacatgaacatccacagcagcagcggcgtgaagagaaccgccaaggacgtgatcggcaaggccaagagcctgcagaagctggacccccaccagaaggacgacatcaacaagaaggccttcgacaagttcaagaaggagcacggcgtggtgccccaggccgacaacgccacccccagcgagagattcgagggcccctacaccgacttcaccccctggaccaccgaggagcagaagctgctggagcaggccctgaagacctaccccgtgaacacccccgagagatgggagaagatcgccgaggccgtgcccggcagaaccaagaaggactgcatgaagagatacaaggagctggtggagatggtgaaggccaagaaggccgcccaggagcaggtgctgaacgccagcagagccaagaagtag

SEQ ID NO: 47027 - DNA, 1866 bp, Artificial Sequence
  derived and/or modified sequence
atgctgctgctgcccagcgccgccgacggcagaggcaccgccatcacccacgccctgaccagcgccagcaccctgtgccaggtggagcccgtgggcagatggttcgaggccttcgtgaagagaagaaacagaaacgccagcgccagcttccaggagctggaggacaagaaggagctgagcgaggagagcgaggacgaggagctgcagctggaggagttccccatgctgaagaccctggaccccaaggactggaagaaccaggaccactacgccgtgctgggcctgggccacgtgagatacaaggccacccagagacagatcaaggccgcccacaaggccatggtgctgaagcaccaccccgacaagagaaaggccgccggcgagcccatcaaggagggcgacaacgactacttcacctgcatcaccaaggcctacgagatgctgagcgaccccgtgaagagaagagccttcaacagcgtggaccccaccttcgacaacagcgtgcccagcaagagcgaggccaaggacaacttcttcgaggtgttcacccccgtgttcgagagaaacagcagatggagcaacaagaagaacgtgcccaagctgggcgacatgaacagcagcttcgaggacgtggacatcttctacagcttctggtacaacttcgacagctggagagagttcagctacctggacgaggaggagaaggagaaggccgagtgcagagacgagagaagatggatcgagaagcagaacagagccaccagagcccagagaaagaaggaggagatgaacagaatcagaaccctggtggacaacgcctacagctgcgaccccagaatcaagaagttcaaggaggaggagaaggccaagaaggaggccgagaagaaggccaaggccgaggccaagagaaaggagcaggaggccaaggagaagcagagacaggccgagctggaggccgccagactggccaaggagaaggaggaggaggaggtgagacagcaggccctgctggccaagaaggagaaggacatccagaagaaggccatcaagaaggagagacagaagctgagaaacagctgcaagacctggaaccacttcagcgacaacgaggccgagagagtgaagatgatggaggaggtggagaagctgtgcgacagactggagctggccagcctgcagtgcctgaacgagaccctgaccagctgcaccaaggaggtgggcaaggccgccctggagaagcagatcgaggagatcaacgagcagatcagaaaggagaaggaggaggccgaggccagaatgagacaggccagcaagaacaccgagaagagcaccggcggcggcggcaacggcagcaagaactggagcgaggacgacctgcagctgctgatcaaggccgtgaacctgttccccgccggcaccaacagcagatgggaggtgatcgccaactacatgaacatccacagcagcagcggcgtgaagagaaccgccaaggacgtgatcggcaaggccaagagcctgcagaagctggacccccaccagaaggacgacatcaacaagaaggccttcgacaagttcaagaaggagcacggcgtggtgccccaggccgacaacgccacccccagcgagagattcgagggcccctacaccgacttcaccccctggaccaccgaggagcagaagctgctggagcaggccctgaagacctaccccgtgaacacccccgagagatgggagaagatcgccgaggccgtgcccggcagaaccaagaaggactgcatgaagagatacaaggagctggtggagatggtgaaggccaagaaggccgcccaggagcaggtgctgaacgccagcagagccaagaagtag

SEQ ID NO: 47028 - DNA, 609 bp, Artificial Sequence
  derived and/or modified sequence
atgctgctgctgcccagcgccgccgacggcagaggcaccgccatcacccacgccctgaccagcgccagcaccctgtgccaggtggagcccgtgggcagatggttcgaggccttcgtgaagagaagaaacagaaacgccagcgccagcttccaggagctggaggacaagaaggagctgagcgaggagagcgaggacgaggagctgcagctggaggagttccccatgctgaagaccctggaccccaaggactggaagaaccaggaccactacgccgtgctgggcctgggccacgtgagatacaaggccacccagagacagatcaaggccgcccacaaggccatggtgctgaagcaccaccccgacaagagaaaggccgccggcgagcccatcaaggagggcgacaacgactacttcacctgcatcaccaaggcctacgagatgctgagcgaccccgtgaagagaagagccttcaacagcgtggaccccaccttcgacaacagcgtgcccagcaagagcgaggccaaggacaacttcttcgaggtgttcacccccgtgttcgagagaaacagcagagtgagcatcagcaagaagaagaagaagaagagatag

SEQ ID NO: 47029 - DNA, 1846 bp, Artificial Sequence
  derived and/or modified sequence
gggacgtgagccgctgcgcccaccgggctagacccggcgccatcatgctgcttctgccaagcgccgcggacggccggggcaccgccatcacccacgctctgacctctgcctctacactctgtcaagttgaacctgtgggaagatggtttgaagcttttgttaagaggagaaacagaaatgcttctgcctcttttcaggaactggaggataagaaagagttatccgaggaatcagaagatgaagaattgcagttggaagagtttcccatgctgaaaacacttgatcccaaagactggaagaaccaagatcattatgcagttcttggacttggccatgtgagatacaaggctacacagagacagatcaaagcagctcataaagcaatggttttaaaacatcacccagacaaacggaaagcagctggtgaaccaataaaagaaggagataatgactacttcacttgcataactaaagcttatgaaatgttatctgatccagtgaaaagacgagcatttaacagtgtagatcctacttttgataactcagttccttctaaaagtgaagcaaaggataatttcttcgaagtgtttaccccagtgtttgaaaggaattccagatggtcaaataaaaaaaatgttcctaaacttggtgatatgaattcatcatttgaagatgtagatatattttattctttctggtataattttgattcttggagagaattttcttatttagatgaagaagaaaaagaaaaagcagaatgtcgtgatgagaggagatggattgaaaagcagaacagagcaacaagagcacaaagaaaaaaagaagaaatgaacagaataagaacattagttgacaatgcatacagctgtgatccaaggataaaaaagttcaaggaagaagaaaaagccaagaaagaagcagaaaagaaagcaaaagcagaagctaaacggaaggagcaagaagctaaagaaaaacaaagacaagctgaattagaagctgctcggttagctaaggagaaagaagaggaggaagtcagacagcaagcattgctggcaaagaaggaaaaagatatccagaaaaaagccattaagaaggaaaggcaaaaacttcgaaactcatgcaagatagaagaaataaatgagcaaatcagaaaagagaaagaggaagctgaggctcgtatgcgacaagcatctaagaacacagagaaatcaactggtggaggtggaaatggaagtaaaaattggtcagaagatgatctacaattactaattaaagctgtgaatctgttccctgctggaacaaattcaagatgggaagttattgctaattacatgaacatacattcttcctctggagtcaaaagaactgccaaagatgttattggcaaagcaaagagtctccaaaaacttgaccctcatcaaaaagatgacataaataaaaaggcatttgataagttcaaaaaagaacatggagtggtacctcaagcagacaacgcaacgccttcagaacgatttgaaggtccatatacagacttcaccccttggacaacagaagaacagaagcttttggaacaagctttgaaaacatacccagtaaatacacctgaaagatgggaaaaaatagcagaagcggtgcctggcaggacaaagaaggactgcatgaaacgatacaaggaacttgtcgagatggtaaaagcaaagaaagctgctcaagaacaagtgctgaatgcaagtagagccaagaaatgacaatctttgttgtgtgtgcatttttataataaaactgaaaatactgtaaacattttcattcttaaaattatactcatggtaataatttgaaagta

SEQ ID NO: 47030 - DNA, 2167 bp, Artificial Sequence
  derived and/or modified sequence
agccggatctcagtcagtatagaactaggttaccgcacacgttggcgggggtgggagggtgtgagactggcctccacaccacgaaagatccatcccggaagtgcttactggtcgtctccatgcgccggttcctgggcgtcttagagccaaggcgcgaggctcggagtgagaggtagagctggaggggaccctaagcgccctccgcccgggacgtgagccgctgcgcccaccgggctagacccggcgccatcatgctgcttctgccaagcgccgcggacggccggggcaccgccatcacccacgctctgacctctgcctctacactctgtcaagttgaacctgtgggaagatggtttgaagcttttgttaagaggagaaacagaaatgcttctgcctcttttcaggaactggaggataagaaagagttatccgaggaatcagaagatgaagaattgcagttggaagagtttcccatgctgaaaacacttgatcccaaagactggaagaaccaagatcattatgcagttcttggacttggccatgtgagatacaaggctacacagagacagatcaaagcagctcataaagcaatggttttaaaacatcacccagacaaacggaaagcagctggtgaaccaataaaagaaggagataatgactacttcacttgcataactaaagcttatgaaatgttatctgatccagtgaaaagacgagcatttaacagtgtagatcctacttttgataactcagttccttctaaaagtgaagcaaaggataatttcttcgaagtgtttaccccagtgtttgaaaggaattccagatggtcaaataaaaaaaatgttcctaaacttggtgatatgaattcatcatttgaagatgtagatatattttattctttctggtataattttgattcttggagagaattttcttatttagatgaagaagaaaaagaaaaagcagaatgtcgtgatgagaggagatggattgaaaagcagaacagagcaacaagagcacaaagaaaaaaagaagaaatgaacagaataagaacattagttgacaatgcatacagctgtgatccaaggataaaaaagttcaaggaagaagaaaaagccaagaaagaagcagaaaagaaagcaaaagcagaagctaaacggaaggagcaagaagctaaagaaaaacaaagacaagctgaattagaagctgctcggttagctaaggagaaagaagaggaggaagtcagacagcaagcattgctggcaaagaaggaaaaagatatccagaaaaaagccattaagaaggaaaggcaaaaacttcgaaactcatgcaagacctggaatcatttttctgataatgaggcagagcgggttaaaatgatggaagaagtggaaaaactttgtgatcggcttgaactggcaagcttacagtgcttgaatgaaacactcacatcatgcacaaaagaagtaggaaaggctgctttggaaaaacagatagaagaaataaatgagcaaatcagaaaagagaaagaggaagctgaggctcgtatgcgacaagcatctaagaacacagagaaatcaactggtggaggtggaaatggaagtaaaaattggtcagaagatgatctacaattactaattaaagctgtgaatctgttccctgctggaacaaattcaagatgggaagttattgctaattacatgaacatacattcttcctctggagtcaaaagaactgccaaagatgttattggcaaagcaaagagtctccaaaaacttgaccctcatcaaaaagatgacataaataaaaaggcatttgataagttcaaaaaagaacatggagtggtacctcaagcagacaacgcaacgccttcagaacgatttgaaggtccatatacagacttcaccccttggacaacagaagaacagaagcttttggaacaagctttgaaaacatacccagtaaatacacctgaaagatgggaaaaaatagcagaagcggtgcctggcaggacaaagaaggactgcatgaaacgatacaaggaacttgtcgagatggtaaaagcaaagaaagctgctcaagaacaagtgctgaatgcaagtagagccaagaaatgacaatctttgttgtgtgtgcatttttataataaaactgaaaatactgtaaa

SEQ ID NO: 47031 - DNA, 857 bp, Artificial Sequence
  derived and/or modified sequence
agccggatctcagtcagtatagaactaggttaccgcacacgttggcgggggtgggagggtgtgagactggcctccacaccacgaaagatccatcccggaagtgcttactggtcgtctccatgcgccggttcctgggcgtcttagagccaaggcgcgaggctcggagtgagaggtagagctggaggggaccctaagcgccctccgcccgggacgtgagccgctgcgcccaccgggctagacccggcgccatcatgctgcttctgccaagcgccgcggacggccggggcaccgccatcacccacgctctgacctctgcctctacactctgtcaagttgaacctgtgggaagatggtttgaagcttttgttaagaggagaaacagaaatgcttctgcctcttttcaggaactggaggataagaaagagttatccgaggaatcagaagatgaagaattgcagttggaagagtttcccatgctgaaaacacttgatcccaaagactggaagaaccaagatcattatgcagttcttggacttggccatgtgagatacaaggctacacagagacagatcaaagcagctcataaagcaatggttttaaaacatcacccagacaaacggaaagcagctggtgaaccaataaaagaaggagataatgactacttcacttgcataactaaagcttatgaaatgttatctgatccagtgaaaagacgagcatttaacagtgtagatcctacttttgataactcagttccttctaaaagtgaagcaaaggataatttcttcgaagtgtttaccccagtgtttgaaaggaattccagagtctccatctcaaaaaaaaaaaaaaaaaaaaga

SEQ ID NO: 47032 - protein, 84 aa, Artificial Sequence
  derived and/or modified sequence
VLHSFTDAIFDEWMKRFNPPADAWPQELAPIGHNRMYNMVPFFPPVTNEELFLTSDQLGYSYAIDLPDFQANFICSYLVSVHQE

SEQ ID NO: 47033 - protein, 552 aa, Artificial Sequence
  derived and/or modified sequence
MSPLWWGFLLSCLGCKILPGAQGQFPRVCMTVDSLVNKECCPRLGAESANVCGSQQGRGQCTEVRADTRPWSGPYILRNQDDRELWPRKFFHRTCKCTGNFAGYNCGDCKFGWTGPNCERKKPPVIRQNIHSLSPQEREQFLGALDLAKKRVHPDYVITTQHWLGLLGPNGTQPQFANCSVYDFFVWLHYYSVRDTLLGPGRPYRAIDFSHQGPAFVTWHRYHLLCLERDLQRLIGNESFALPYWNFATGRNECDVCTDQLFGAARPDDPTLISRNSRFSSWETVCDSLDDYNHLVTLCNGTYEGLLRRNQMGRNSMKLPTLKDIRDCLSLQKFDNPPFFQNSTFSFRNALEGFDKADGTLDSQVMSLHNLVHSFLNGTNALPHSAANDPIFVVISNRLLYNATTNILEHVRKEKATKELPSLHVLVLHSFTDAIFDEWMKRFNPPADAWPQELAPIGHNRMYNMVPFFPPVTNEELFLTSDQLGYSYAIDLPVSVEETPGWPTTLLVVMGTLVALVGLFVLLAFLQYRRLRKGYTPLMETHLSSKRYTEEA

SEQ ID NO: 47034 - DNA, 1659 bp, Artificial Sequence
  derived and/or modified sequence
atgagccccctgtggtggggcttcctgctgagctgcctgggctgcaagatcctgcccggcgcccagggccagttccccagagtgtgcatgaccgtggacagcctggtgaacaaggagtgctgccccagactgggcgccgagagcgccaacgtgtgcggcagccagcagggcagaggccagtgcaccgaggtgagagccgacaccagaccctggagcggcccctacatcctgagaaaccaggacgacagagagctgtggcccagaaagttcttccacagaacctgcaagtgcaccggcaacttcgccggctacaactgcggcgactgcaagttcggctggaccggccccaactgcgagagaaagaagccccccgtgatcagacagaacatccacagcctgagcccccaggagagagagcagttcctgggcgccctggacctggccaagaagagagtgcaccccgactacgtgatcaccacccagcactggctgggcctgctgggccccaacggcacccagccccagttcgccaactgcagcgtgtacgacttcttcgtgtggctgcactactacagcgtgagagacaccctgctgggccccggcagaccctacagagccatcgacttcagccaccagggccccgccttcgtgacctggcacagataccacctgctgtgcctggagagagacctgcagagactgatcggcaacgagagcttcgccctgccctactggaacttcgccaccggcagaaacgagtgcgacgtgtgcaccgaccagctgttcggcgccgccagacccgacgaccccaccctgatcagcagaaacagcagattcagcagctgggagaccgtgtgcgacagcctggacgactacaaccacctggtgaccctgtgcaacggcacctacgagggcctgctgagaagaaaccagatgggcagaaacagcatgaagctgcccaccctgaaggacatcagagactgcctgagcctgcagaagttcgacaacccccccttcttccagaacagcaccttcagcttcagaaacgccctggagggcttcgacaaggccgacggcaccctggacagccaggtgatgagcctgcacaacctggtgcacagcttcctgaacggcaccaacgccctgccccacagcgccgccaacgaccccatcttcgtggtgatcagcaacagactgctgtacaacgccaccaccaacatcctggagcacgtgagaaaggagaaggccaccaaggagctgcccagcctgcacgtgctggtgctgcacagcttcaccgacgccatcttcgacgagtggatgaagagattcaacccccccgccgacgcctggccccaggagctggcccccatcggccacaacagaatgtacaacatggtgcccttcttcccccccgtgaccaacgaggagctgttcctgaccagcgaccagctgggctacagctacgccatcgacctgcccgtgagcgtggaggagacccccggctggcccaccaccctgctggtggtgatgggcaccctggtggccctggtgggcctgttcgtgctgctggccttcctgcagtacagaagactgagaaagggctacacccccctgatggagacccacctgagcagcaagagatacaccgaggaggcctag

SEQ ID NO: 47035 - DNA, 1659 bp, Artificial Sequence
  derived and/or modified sequence
atgagccctctgtggtgggggttcctgctgagctgcctcggatgtaagattcttccaggtgcacagggccagttccccagagtatgtatgacagtcgacagcttggtcaacaaggagtgctgcccccgactgggtgccgagtctgcaaatgtgtgcggctctcagcagggaagaggccagtgcacggaggtacgggccgatacacgcccctggagcgggccctatattctccggaaccaggatgatagagaattgtggccccggaagttctttcacagaacctgcaagtgtaccggcaactttgctgggtataactgcggtgactgtaagttcggttggactggacccaattgtgagcggaaaaaaccccctgtcatccgtcaaaacatccacagcctttctcctcaagagagagaacagtttctgggtgcattggatctagcaaagaaacgggtacaccccgactacgtgatcacaacccaacactggctcggcttgctggggccgaacggaacccagccgcaattcgctaattgcagcgtgtatgactttttcgtctggctgcactattattctgtacgcgacactctgctcggccccggccgcccatatcgcgcgattgacttctctcaccaggggcctgcctttgtcacatggcatagataccacctgctgtgcctcgagagggacttacaacgcctgattggaaatgaaagcttcgccctaccatattggaacttcgccacggggaggaacgaatgtgatgtatgcacagaccagctttttggtgcagcccggccagacgaccctaccttaatctcgcgtaattcgcggttcagctcttgggaaaccgtgtgcgactcgttggatgactataaccatcttgtcactctgtgcaacggcacctatgagggactcctgagacgcaaccagatggggcggaattccatgaaacttccaaccctcaaggatatcagagactgcctgagcctgcagaaatttgacaaccccccattctttcagaactcaaccttttcatttcggaacgcccttgaaggctttgacaaggcagacgggaccttggatagtcaggtcatgagtcttcacaatctggtgcattcctttctgaacggtacaaatgctttaccacactccgccgctaatgaccctatattcgtagtgatttccaaccgcctcctttataacgcaactaccaatatcctcgaacatgtgcggaaagaaaaagccacaaaggagctcccttcattgcacgtgctggtgctccattccttcactgacgctatatttgatgaatggatgaagaggttcaaccctcccgccgatgcctggccccaagaactcgcaccgattgggcacaaccgtatgtacaatatggtgcctttcttccccccggttacaaatgaagagctgttcctcactagcgaccaattgggatattcttacgctatcgatctacccgtaagcgtggaagaaacacctggctggcctacaacacttttggtggtaatggggaccctggtcgccctggtggggctgttcgtgttattggctttcctccagtatagacgcttgcgtaagggatacaccccactgatggaaacccacttgagttcgaaacgctataccgaagaggcctag

SEQ ID NO: 47036 - DNA, 1659 bp, Artificial Sequence
  derived and/or modified sequence
atgagccccctgtggtggggcttcctgctgagctgcctgggctgcaagatcctgcccggggcccagggccagttcccccgggtgtgcatgacagtggacagcctggtgaacaaggagtgctgcccccggctgggcgctgagagcgccaacgtgtgtggcagccagcagggccggggccagtgcacagaggtgcgggctgacacccggccctggagcggcccctacatcctgaggaaccaggatgaccgggagctgtggcccaggaagttcttccacaggacctgcaagtgcaccggcaactttgctggctacaactgtggggactgcaagtttggctggacaggccccaactgtgagaggaagaagccccctgtgatccggcagaacatccacagcctgagcccccaggagcgggagcagttcctgggcgccctggacctggccaagaagagggtgcacccagactatgtgatcaccacccagcactggctgggcctgctgggccccaacggcacccagccccagtttgccaactgcagcgtgtatgacttctttgtgtggctgcactactacagcgtgcgggacaccctgctgggccctggccggccctaccgggccatcgacttcagccaccagggccctgcctttgtgacctggcaccgctaccacctgctgtgcctggagcgggacctgcagaggctgattggaaatgaaagctttgccctgccctactggaactttgccactggaagaaatgaatgtgatgtgtgcacagaccagctgtttggagctgcccggccagatgaccccaccctcatcagcaggaacagccgcttcagctcctgggagaccgtgtgtgacagcctggatgactacaaccacctggtgaccctgtgcaatggcacctatgagggcctgctgcggaggaaccagatgggcaggaacagcatgaagctgcccaccctgaaggacatccgggactgcctgagcctgcagaagtttgacaacccccccttcttccagaacagcaccttctccttcagaaatgccctggagggctttgacaaggcagatggcaccctggacagccaggtgatgagcctgcacaacctggtgcacagcttcctgaatggcaccaatgccctgccccacagcgctgccaatgaccccatctttgtggtgatcagcaaccggctgctgtacaatgccaccaccaacatcctggagcacgtgaggaaggagaaggccaccaaggagctgcccagcctgcacgtgctggtgctgcacagcttcacagatgccatctttgatgagtggatgaagcgcttcaaccccccagcagatgcctggccccaggagctggcccccatcggccacaacaggatgtacaacatggtgcccttcttcccccctgtgaccaatgaggagctgttcctgaccagtgaccagctgggctacagctatgccatcgacctgcctgtgtctgtggaggagaccccaggctggcccaccaccctgctggtggtgatgggcaccctggtggccctggtgggcctgtttgtgctgctggccttcctgcagtacagaaggctgaggaagggctacacccccctgatggagacccacctgagcagcaagcgctacacagaggaggcctag

SEQ ID NO: 47037 - DNA, 1659 bp, Artificial Sequence
  derived and/or modified sequence
atgagccccctgtggtggggcttcctgctgagctgcctgggctgcaaaatcctcccgggagcgcagggacagtttcctagggtctgcatgacggttgactccctcgttaataaggagtgctgccctcggttgggtgctgagagcgctaatgtgtgcgggagtcagcaaggccgcgggcagtgtactgaggtacgcgcggacactcgcccctggtccggtccatatattcttcgcaaccaagacgaccgcgagctgtggcctaggaaattctttcacagaacttgcaagtgtactggtaactttgcaggctacaactgcggagactgtaagttcggctggactggcccaaactgtgaacggaaaaagcccccagttataagacagaatattcattccttgagccctcaagaacgggaacagtttctcggagcccttgacctggccaaaaagagggtgcatcctgactacgtcattactacacagcactggctgggccttttgggcccaaacggtactcagcctcagtttgcaaactgtagtgtgtacgatttcttcgtgtggctgcattactattcagtgcgcgatacactcctgggaccaggacgcccctaccgggcaattgatttcagccatcagggccctgctttcgtgacctggcaccgctaccacctgctgtgccttgaaagagaccttcagcgactaattggtaatgagagtttcgccctcccatattggaacttcgctacaggaaggaacgaatgcgatgtctgcacagatcagttgttcggtgcagctaggccagacgatcccactctgatttcaaggaacagtaggttctcatcctgggagaccgtgtgtgatagtcttgacgattataatcatctggtcactctgtgtaatggaacatatgaggggctgctgcggaggaatcaaatgggcaggaacagtatgaaactgcccacattgaaagatatcagagactgtctgtcattacagaagtttgacaaccctccatttttccagaattcaactttttccttccgaaatgctttggagggatttgacaaagctgacggcacgctggatagccaggtaatgtctcttcacaatctggtgcacagcttcctcaacggtacaaacgccctgcctcactccgcagcgaatgaccccatcttcgtggtcatctccaataggctcctgtataacgcaaccacaaatatcctggagcacgttcgcaaagagaaggcaaccaaagaactgcccagtttacacgtgctcgtgctgcactcgtttactgatgcgatcttcgatgagtggatgaagaggttcaatccgcccgctgacgcctggccgcaggagctggctcctattggccacaaccggatgtacaacatggtcccgttttttcctccagtaacgaacgaagagctgtttttgacatcggatcagctcgggtattcatatgcaatcgacctcccagtttcagtggaggagaccccgggctggccgaccacacttctggtcgtgatgggtaccttggtggcactggtgggcctctttgtgctgttagcatttctacagtataggagactgcgcaagggctatacccctttaatggagacgcacctatccagcaagcggtacaccgaagaggcatag

SEQ ID NO: 47038 - DNA, 1659 bp, Artificial Sequence
  derived and/or modified sequence
atgagccccctgtggtggggcttcttgctttcttgcctgggctgcaaaatcctacctggtgcgcagggacagtttcctcgagtgtgcatgaccgtggacagtctggtcaataaggagtgctgtcctcggctcggcgctgagagtgccaacgtctgcggcagtcaacagggtcgcggacagtgcacagaagttcgggctgatacaaggccttggtccggaccttacattttgcgtaatcaagacgatcgggagctttggcctaggaagttcttccatcgtacctgtaagtgtactgggaacttcgcgggttataactgtggcgactgtaagtttggatggacggggccaaactgcgagagaaagaagcctcccgtcattcgccagaacatccactctctctcacctcaggagagagagcaatttttaggggctctggacctcgccaaaaaaagggttcaccccgattacgtaatcacaacccagcactggcttgggttgctggggccaaatggcacccagcctcagtttgccaactgcagtgtatatgattttttcgtttggctgcattattattctgtgagggatacattactcggcccaggcagaccgtaccgagcaatcgattttagtcatcaagggcctgctttcgtgacttggcatcgctatcatctgctgtgtctcgagcgggaccttcagcgcctcatcggcaacgaatccttcgctctcccgtactggaatttcgcaaccgggagaaatgagtgcgacgtttgcacggaccagctttttggagccgctaggcccgacgatccaacgttgattagtcgcaattctcgattctcatcttgggagaccgtttgcgactcgctggatgattacaaccatctagtcaccctctgtaacgggacttatgaaggcctgctgcgcaggaaccagatgggcagaaattccatgaagcttcctactcttaaagatattcgggattgtcttagcctgcagaaatttgataacccgccatttttccagaattccaccttctccttccgcaacgccctagaggggtttgacaaggcagacggcacccttgactcccaggtcatgagcctgcacaatctcgtccatagtttcctcaacggtacaaacgcgctacctcatagtgccgctaacgaccccatttttgttgtgatctctaaccgcctgctctataatgctaccacaaacattctggaacatgtccgtaaagaaaaggcgacaaaggagttgcccagcctccatgtgctggtgctgcactctttcacagacgctatcttcgacgaatggatgaaacgcttcaaccctccagctgatgcttggcctcaggaactagcccctatagggcacaaccggatgtataacatggtgccgttcttccctcctgttaccaacgaggaactgtttttgacaagtgatcagcttggatactcctacgcgatcgatctccccgtgagcgtggaagagacccccggatggcccacaactctgcttgtagtgatgggaactttggttgcactcgtagggctgttcgtgctgctcgcctttctgcagtaccggagattgaggaagggctatacccccttgatggagactcacctgtcctccaagcggtacactgaggaagcatag

SEQ ID NO: 47039 - DNA, 2395 bp, Artificial Sequence
  derived and/or modified sequence
aactgagttcaaggcaattaaagtcaagagctaaggagggagggagagggtttagaaataccagcataataagtagtatgactgggtgctctgtaaattaactcaattagacaaagcctgacttaacgggggaagatggtgagaagcgctaccctcattaaatttggttgttagaggcgcttctaaggaaattaagtctgttagttgtttgaatcacataaaattgtgtgtgcacgttcatgtacacatgtgcacacatgtaacctctgtgattcttgtgggtatttttttaagaagaaaggaatagaaagcaaagaaaaataaaaaatactgaaaagaaaagactgaaagagtagaagataaggagaaaagtacgacagagacaaggaaagtaagagagagagagagctctcccaattataaagccatgagccccctttggtgggggtttctgctcagttgcttgggctgcaaaatcctgccaggagcccagggtcagttcccccgagtctgcatgacggtggacagcctagtgaacaaggagtgctgcccacgcctgggtgcagagtcggccaatgtctgtggctctcagcaaggccgggggcagtgcacagaggtgcgagccgacacaaggccctggagtggtccctacatcctacgaaaccaggatgaccgtgagctgtggccaagaaaattcttccaccggacctgcaagtgcacaggaaactttgccggctataattgtggagactgcaagtttggctggaccggtcccaactgcgagcggaagaaaccaccagtgattcggcagaacatccattccttgagtcctcaggaaagagagcagttcttgggcgccttagatctcgcgaagaagagagtacaccccgactacgtgatcaccacacaacactggctgggcctgcttgggcccaatggaacccagccgcagtttgccaactgcagtgtttatgatttttttgtgtggctccattattattctgttagagatacattattaggaccaggacgcccctacagggccatagatttctcacatcaaggacctgcatttgttacctggcaccggtaccatttgttgtgtctggaaagagatctccagcgactcattggcaatgagtcttttgctttgccctactggaactttgccactgggaggaacgagtgtgatgtgtgtacagaccagctgtttggggcagcgagaccagacgatccgactctgattagtcggaactcaagattctccagctgggaaactgtctgtgatagcttggatgactacaaccacctggtcaccttgtgcaatggaacctatgaaggtttgctgagaagaaatcaaatgggaagaaacagcatgaaattgccaaccttaaaagacatacgagattgcctgtctctccagaagtttgacaatcctcccttcttccagaactctaccttcagtttcaggaatgctttggaagggtttgataaagcagatgggactctggattctcaagtgatgagccttcataatttggttcattccttcctgaacgggacaaacgctttgccacattcagccgccaatgatcccatttttgtggtgatttctaatcgtttgctttacaatgctacaacaaacatccttgaacatgtaagaaaagagaaagcgaccaaggaactcccttccctgcatgtgctggttcttcattcctttactgatgccatctttgatgagtggatgaaaagatttaatcctcctgcagatgcctggcctcaggagctggcccctattggtcacaatcggatgtacaacatggttcctttcttccctccagtgactaatgaagaactctttttaacctcagaccaacttggctacagctatgccatcgatctgccagtttcagttgaagaaactccaggttggcccacaactctcttagtagtcatgggaacactggtggctttggttggtctttttgtgctgttggcttttcttcaatatagaagacttcgaaaaggatatacacccctaatggagacacatttaagcagcaagagatacacagaagaagcctagggtgctcatgccttacctaagagaagaggctggccaagccacagttctgacgctgacaataaaggaactaatcctcactgttccttcttgagttgaagatctttgacataggttcttctatagtgatgatgatctcattcagaagatgcttagctgtagtttccgctttgcttgcttgtttaacaaacccaactaaagtgcttgaggctacctctaccttcaaataaagatagacctgacaatttgtgatatctaataataaccccccccccaatattgattaagcctcctccttttctgaaagcattt

SEQ ID NO: 47040 - protein, 191 aa, Artificial Sequence
  derived and/or modified sequence
MTERLLIKALSGGKNTKIITLNGKKMTKMPSALGKLPGLKTLVLQNNLIPKVCPELCNLTQFQDLKLREFYCEGNPLFLQQPVISTQQENVWSLQEITSRFVMNQLAENNPFLMDDIERYPQVRSMISQGKTCAICGQYFITVWLECVRFVPPPKDWKISKNLKLVPLQVLICSYKCFTQRDPNLFGIAQV

SEQ ID NO: 47041 - protein, 50 aa, Artificial Sequence
  derived and/or modified sequence
MTERLLIKALSGGKNTKIITLNGKKMTKMPSALGKLPGLKTLVLQNNLIP

SEQ ID NO: 47042 - protein, 347 aa, Artificial Sequence
  derived and/or modified sequence
MTERLLIKALSGGKNTKIITLNGKKMTKMPSALGKLPGLKTLVLQNNLIPKVCPELCNLTQLTTLNLGNNLLEEVPEEMKYLTSLKNLHLSGNRICRFAPGACDGLQNLILLNLNNNHLTQLPQEVSRLKSLTYMSINYNQLASIPRELCFLENLVELQLNYNQLICIPEEIKFLKKLQKLLLARNNIGVLPEELCDLKKLRILDIAGNIIQIFPSGFQDLKLREFYCEGNPLFLQQPVISTQQENVWSLQEITSRFVMNQLAENNPFLMDDIERYPQVRSMISQGKTCAICGQYFITVWLECVRFVPPPKDWKISKNLKLVPLQVLICSYKCFTQRDPNLFGIAQV

SEQ ID NO: 47043 - DNA, 576 bp, Artificial Sequence
  derived and/or modified sequence
atgaccgagagactgctgatcaaggccctgagcggcggcaagaacaccaagatcatcaccctgaacggcaagaagatgaccaagatgcccagcgccctgggcaagctgcccggcctgaagaccctggtgctgcagaacaacctgatccccaaggtgtgccccgagctgtgcaacctgacccagttccaggacctgaagctgagagagttctactgcgagggcaaccccctgttcctgcagcagcccgtgatcagcacccagcaggagaacgtgtggagcctgcaggagatcaccagcagattcgtgatgaaccagctggccgagaacaaccccttcctgatggacgacatcgagagatacccccaggtgagaagcatgatcagccagggcaagacctgcgccatctgcggccagtacttcatcaccgtgtggctggagtgcgtgagattcgtgcccccccccaaggactggaagatcagcaagaacctgaagctggtgcccctgcaggtgctgatctgcagctacaagtgcttcacccagagagaccccaacctgttcggcatcgcccaggtgtag

SEQ ID NO: 47044 - DNA, 153 bp, Artificial Sequence
  derived and/or modified sequence
atgaccgagagactgctgatcaaggccctgagcggcggcaagaacaccaagatcatcaccctgaacggcaagaagatgaccaagatgcccagcgccctgggcaagctgcccggcctgaagaccctggtgctgcagaacaacctgatcccctag

SEQ ID NO: 47045 - DNA, 1044 bp, Artificial Sequence
  derived and/or modified sequence
atgaccgagagactgctgatcaaggccctgagcggcggcaagaacaccaagatcatcaccctgaacggcaagaagatgaccaagatgcccagcgccctgggcaagctgcccggcctgaagaccctggtgctgcagaacaacctgatccccaaggtgtgccccgagctgtgcaacctgacccagctgaccaccctgaacctgggcaacaacctgctggaggaggtgcccgaggagatgaagtacctgaccagcctgaagaacctgcacctgagcggcaacagaatctgcagattcgcccccggcgcctgcgacggcctgcagaacctgatcctgctgaacctgaacaacaaccacctgacccagctgccccaggaggtgagcagactgaagagcctgacctacatgagcatcaactacaaccagctggccagcatccccagagagctgtgcttcctggagaacctggtggagctgcagctgaactacaaccagctgatctgcatccccgaggagatcaagttcctgaagaagctgcagaagctgctgctggccagaaacaacatcggcgtgctgcccgaggagctgtgcgacctgaagaagctgagaatcctggacatcgccggcaacatcatccagatcttccccagcggcttccaggacctgaagctgagagagttctactgcgagggcaaccccctgttcctgcagcagcccgtgatcagcacccagcaggagaacgtgtggagcctgcaggagatcaccagcagattcgtgatgaaccagctggccgagaacaaccccttcctgatggacgacatcgagagatacccccaggtgagaagcatgatcagccagggcaagacctgcgccatctgcggccagtacttcatcaccgtgtggctggagtgcgtgagattcgtgcccccccccaaggactggaagatcagcaagaacctgaagctggtgcccctgcaggtgctgatctgcagctacaagtgcttcacccagagagaccccaacctgttcggcatcgcccaggtgtag

SEQ ID NO: 47046 - DNA, 576 bp, Artificial Sequence
  derived and/or modified sequence
atgaccgagagactcctgataaaggcactatcaggcggaaaaaacacgaaaatcatcaccctgaacggcaagaagatgacaaagatgccctccgcactgggtaagcttccaggccttaagacgctagtgttacaaaataacctcatccctaaggtctgcccagagctgtgtaatctgacccagttccaagacctaaaattacgagagttttactgcgaaggaaaccctttgttcctgcagcagcccgtgattagtacacagcaggagaatgtctggagcctccaagagatcacttctaggttcgttatgaatcagctggctgagaataacccttttcttatggacgatatagaacgctatcctcaggtaagatcaatgatttcccagggcaaaacctgcgcgatatgtgggcaatatttcatcacggtgtggctggaatgtgtgagatttgtacccccaccgaaggactggaaaataagtaaaaacttaaagctcgtgccgctgcaggtgctgatctgtagttacaagtgtttcactcagagggaccctaacctgttcggcatagcgcaggtctag

SEQ ID NO: 47047 - DNA, 153 bp, Artificial Sequence
  derived and/or modified sequence
atgacagagcgcttactcatcaaggccctcagcggtggcaagaacaccaaaataattacattgaatgggaagaaaatgacgaagatgccatcggcacttgggaaattaccaggtctgaaaaccctggtattgcagaacaacctcattccttag

SEQ ID NO: 47048 - DNA, 1044 bp, Artificial Sequence
  derived and/or modified sequence
atgaccgagcgcctgctcattaaggccctctccggcggtaagaatactaaaataattactcttaacggcaagaaaatgaccaaaatgcccagcgccctgggtaagctgccgggcctcaagactttggtgttacagaacaatttgatccctaaggtctgtcccgaactgtgcaatcttacgcagttaactacactgaacttaggtaataatctgcttgaggaggtccccgaggaaatgaaatatttgacatcattgaagaacctccatttgagcggaaataggatatgtcgctttgccccgggtgcttgtgacggcctccaaaatctaatcctgttaaatctcaacaacaatcatctaacccagttgccacaggaggtgtccagacttaaatcgctgacatatatgtccatcaactacaatcagttggcgtctattcccagggagctctgttttttggaaaatctcgtggagctgcagctcaactacaaccagttaatttgcatccccgaagaaattaagtttttgaagaagctgcagaagcttcttctagcaagaaacaacattggagtcctccctgaagaactctgcgatctgaagaagctgagaatactggacattgcaggcaacatcattcagattttcccctctggattccaagacctgaagctgcgggagttttattgtgagggtaatcccctctttcttcaacagccggttattagtactcagcaggagaacgtttggtccctgcaggagatcacatctcgtttcgtgatgaaccagctggcagagaacaatcccttcttaatggacgacatcgaacgataccctcaggtaagatcaatgatttcacaaggcaagacctgtgctatctgtggtcagtactttattacggtctggcttgagtgtgtacgctttgtgcctcctccaaaagattggaagattagcaagaatttaaagctggtgcctctgcaggttctgatctgcagttacaaatgcttcacccagagggacccaaatctctttggaatcgcccaagtctag

SEQ ID NO: 47049 - DNA, 576 bp, Artificial Sequence
  derived and/or modified sequence
atgacagagcggctgctgatcaaggccctgagcggcggcaagaacaccaagatcatcaccctgaatggcaagaagatgaccaagatgcccagcgccctgggcaagctgcccggcctgaagaccctggtgctgcagaacaacctgatccccaaggtgtgcccagagctgtgcaacctgacccagttccaggacctgaagctgcgggagttctactgtgagggcaaccccctcttcctgcagcagcccgtcatcagcacccagcaggagaatgtgtggagcctgcaggagatcaccagcagatttgtgatgaaccagctggccgagaacaaccccttcctgatggatgacatcgagcgctacccccaggtgcgctccatgatcagccagggcaagacctgtgccatctgtggccagtacttcatcaccgtgtggctggagtgtgtgcgctttgtgcccccacccaaggactggaagatcagcaagaacctgaagctggtgcccctgcaggtgctgatctgcagctacaagtgcttcacccagagggaccccaacctgtttggcatcgcccaggtgtag

SEQ ID NO: 47050 - DNA, 153 bp, Artificial Sequence
  derived and/or modified sequence
atgacagagcggctgctgatcaaggccctgagcggcggcaagaacaccaagatcatcaccctgaatggcaagaagatgaccaagatgcccagcgccctgggcaagctgcccggcctgaagaccctggtgctgcagaacaacctgatcccctag

SEQ ID NO: 47051 - DNA, 1044 bp, Artificial Sequence
  derived and/or modified sequence
atgacagagcggctgctgatcaaggccctgagcggcggcaagaacaccaagatcatcaccctgaatggcaagaagatgaccaagatgcccagcgccctgggcaagctgcccggcctgaagaccctggtgctgcagaacaacctgatccccaaggtgtgcccagagctgtgcaacctgacccagctgaccaccctgaacctgggcaacaacctgctggaggaggtgcctgaggagatgaagtacctgaccagcctgaagaacctgcacctgagcggcaaccgcatctgccgctttgcccctggggcctgtgatggcctgcagaacctgatcctgctgaacctgaacaacaaccacctgacccagctgccccaggaggtgtcccggctgaagagcctgacctacatgagcatcaactacaaccagctggccagcatcccccgggagctgtgcttcctggagaacctggtggagctgcagctgaactacaaccagctgatctgcatccctgaggagatcaagttcctgaagaagctgcagaagctgctgctggccaggaacaacatcggcgtgctgcctgaggagctgtgtgacctgaagaagctgcgcatcctggacattgctggcaacatcatccagatcttccccagcggcttccaggacctgaagctgcgggagttctactgtgagggcaaccccctcttcctgcagcagcccgtcatcagcacccagcaggagaatgtgtggagcctgcaggagatcaccagcagatttgtgatgaaccagctggccgagaacaaccccttcctgatggatgacatcgagcgctacccccaggtgcgctccatgatcagccagggcaagacctgtgccatctgtggccagtacttcatcaccgtgtggctggagtgtgtgcgctttgtgcccccacccaaggactggaagatcagcaagaacctgaagctggtgcccctgcaggtgctgatctgcagctacaagtgcttcacccagagggaccccaacctgtttggcatcgcccaggtgtag

SEQ ID NO: 47052 - DNA, 720 bp, Artificial Sequence
  derived and/or modified sequence
acttcttttccaagatcatgactgagagattgttaataaaagcattgagtggtggtaaaaatacgaagatcattactttgaatgggaagaagatgacaaagatgccctcagcattaggaaaactgcctggcctgaagactctagtccttcagaataacctaatccccaaagtgtgtccagagttatgcaacttgacccagtttcaggatctgaagctgagggaattctactgtgagggaaacccactgttcctgcagcagccagtgatttctacacagcaggagaacgtctggagtctacaggaaataacatcaagatttgtaatgaatcagctagcagaaaataaccctttcctaatggatgacatagaacggtacccacaagtcaggagcatgatctctcagggaaaaacatgtgcaatatgtggacagtactttataaccgtatggctggaatgtgttcgatttgttcctccaccaaaggactggaagataagcaagaatctgaagctggtgcctctccaagtattaatttgttcttacaaatgttttactcaacgtgaccctaacctctttggaattgctcaggtgtagaacaggtgaggtgctcattcatagcctcactccacttgccctgtcagctctgcatacacagattatgccctacttaagataccatgcctgttctctttgtcaacacattaaataaaggaagaaaaat

SEQ ID NO: 47053 - DNA, 571 bp, Artificial Sequence
  derived and/or modified sequence
tcagatttaatttttggacaggaacatttcataggtggtgctgctgtgtactttttaattcattacttcataaggcttataatgtgattgtctcaattttattgatgctaaaatgattagtgggttattaacctgatcacttgattataaagttcctcatcaacctttcatctaatactttcagtctccaattatgatttttgcatagctccattattttattagaatttgcaaaaattgtgattattctagttattttgtctttctcatttattagtttcaattcttgtgaataagaactttattaactattaagttatatttaagtgcagtttgtactggaaaagcagaataaatgcttatattttttcctttatcaattttcagactgagttggtgcgctagtaattcccaggatcatgactgagagattgttaataaaagcattgagtggtggtaaaaatacgaagatcattactttgaatgggaagaagatgacaaagatgccctcagcattaggaaaactgcctggcctgaagactctagtccttcagaataacctaatccccaa

SEQ ID NO: 47054 - DNA, 1044 bp, Artificial Sequence
  derived and/or modified sequence
atgactgagagattgttaataaaagcattgagtggtggtaaaaatacgaagatcattactttgaatgggaagaagatgacaaagatgccctcagcattaggaaaactgcctggcctgaagactctagtccttcagaataacctaatccccaaagtgtgtccagagttatgcaacttgacccagttgacaacactaaatctgggaaacaaccttttagaagaagttccggaagagatgaaatatcttacatctctgaagaatctccatttatctggaaataggatctgtagatttgcacctggagcctgtgatggcttacaaaatttaatcctgcttaatctgaacaacaatcatcttacgcagcttcctcaagaagtcagcagattaaaaagtcttacttatatgagtataaattataaccaactagccagcattcctagagaactttgttttcttgagaatcttgttgaacttcaacttaactacaatcagctgatatgcatacctgaagagattaaattcttgaagaagcttcagaagcttttgctagccagaaacaacattggagttttgccggaggaactttgtgatcttaaaaaactaagaatcctagacatagctggaaatattattcagatatttccatcaggatttcaggatctgaagctgagggaattctactgtgagggaaacccactgttcctgcagcagccagtgatttctacacagcaggagaacgtctggagtctacaggaaataacatcaagatttgtaatgaatcagctagcagaaaataaccctttcctaatggatgacatagaacggtacccacaagtcaggagcatgatctctcagggaaaaacatgtgcaatatgtggacagtactttataaccgtatggctggaatgtgttcgatttgttcctccaccaaaggactggaagataagcaagaatctgaagctggtgcctctccaagtattaatttgttcttacaaatgttttactcaacgtgaccctaacctctttggaattgctcaggtgtag

SEQ ID NO: 47055 - DNA, 576 bp, Artificial Sequence
  derived and/or modified sequence
atgaccgagcggctgctgatcaaggccctgagcggcggcaagaacacgaagattatcacattgaacggcaagaaaatgacaaagatgccgtcggctctgggcaagctgcccgggttaaagaccctggttctgcagaacaacttgatccccaaagtttgtcctgagctgtgtaacctgactcagttccaggatctcaagctgcgcgagttctattgcgaaggcaatcccctgttcctgcagcaaccagtgatttccactcagcaggagaacgtttggagcctccaggagatcacaagccgattcgtaatgaatcagctggctgagaataacccattcttgatggatgacattgaaagataccctcaggtccggagcatgatttctcagggtaagacttgcgctatttgtgggcagtattttatcactgtgtggctagagtgtgtcaggttcgttccccctccaaaagactggaagatttccaagaacctcaagctggtgccactgcaggtactaatttgctcctacaaatgtttcacccagcgagaccctaacctctttggtatagcgcaggtctag

SEQ ID NO: 47056 - DNA, 153 bp, Artificial Sequence
  derived and/or modified sequence
atgaccgagcggctgctgatcaaggccctgagcggcggcaagaacaccaaaatcatcacactcaacgggaaaaaaatgacgaaaatgccatcagcattgggcaaactgccaggactgaaaactctggtgttgcaaaataacctcataccttag

SEQ ID NO: 47057 - DNA, 1044 bp, Artificial Sequence
  derived and/or modified sequence
atgaccgagcggctgctgatcaaggccctgagcggcggcaagaacacgaaaattatcacgttgaatggtaaaaaaatgaccaagatgcctagcgcgctggggaaattgcctggtctgaaaacactggtgctccagaacaacctgatccccaaggtctgtcctgaattgtgcaatctcacccaactaaccacattgaatctgggcaataacctgttggaggaggtgccagaagagatgaaatatttgacaagcctgaagaatctccacctttccggtaatagaatctgccgctttgctccaggcgcatgcgatggcctccaaaacctgatcctgctcaatctgaataataaccacctaacccaattgccgcaggaggtgtcccgcctcaagtcccttacctatatgagcattaactacaatcagctggcttccatccccagggaactctgtttcctggagaatcttgtcgagctgcagttgaactataatcagctaatttgcattcccgaggaaattaagtttctaaagaagcttcaaaaattgctgcttgcgcggaacaacatcggcgtgcttcccgaggagctatgtgatctgaaaaagctcaggattctcgacatagcaggaaacatcattcagatctttccgtcggggtttcaagatttaaaactccgcgagttctactgtgaagggaaccctttgtttttacaacagcctgtgatcagtacgcagcaagagaacgtgtggagcctccaggagattacgtcccgcttcgtcatgaaccaactcgctgaaaataacccttttttgatggacgatatcgagagatatccccaggtgcggagtatgatctcccagggaaaaacatgcgctatttgtggtcagtactttatcaccgtgtggttggaatgcgtgcgattcgttcctcccccgaaggactggaagattagcaagaatctcaaactcgtgcctctgcaagtgttgatttgtagctacaagtgtttcactcagcgggatccaaatctctttggtatcgcccaagtgtag

SEQ ID NO: 47058 - DNA, 576 bp, Artificial Sequence
  derived and/or modified sequence
atgaccgagcggctgctgattaaagccctgtcaggtggcaaaaacacaaagatcattacactgaatgggaaaaaaatgaccaagatgccttccgctttggggaagttgcccggtttaaagaccctggtcctccagaataatcttatccccaaagtctgccccgaactgtgtaatctcacgcagttccaagacttaaagctgagagagttctattgcgaaggaaacccactcttccttcagcagcctgtgatctccacccaacaagagaatgtatggtcactccaagagatcacctcgcgctttgtaatgaatcaactggcagagaataacccatttctgatggacgatatcgagcgctacccacaggtcagaagcatgatctcacagggaaaaacatgtgcgatttgcggccaatacttcataaccgtttggctggagtgcgttaggttcgttccaccccctaaagattggaagatatctaaaaatcttaaactagtgcctctacaggtcctgatttgcagttataagtgcttcacacaaagagaccccaacttgtttggcatcgcccaggtctag

SEQ ID NO: 47059 - DNA, 153 bp, Artificial Sequence
  derived and/or modified sequence
atgaccgagcgcctcctaatcaaggcattatccggaggaaagaacaccaaaattataactctgaatggtaaaaagatgaccaagatgcctagcgctttgggaaagctgcctgggttaaagacgctggtgttacagaacaatctaattccatag

SEQ ID NO: 47060 - DNA, 1044 bp, Artificial Sequence
  derived and/or modified sequence
atgacagaaagattgctgattaaagccctgtcaggcggaaaaaacacaaaaattataacgctaaatggcaagaaaatgactaagatgccaagcgccttggggaagcttcccggactcaagacactggttctgcagaacaacctgatcccgaaagtgtgtcctgagctctgtaacctgactcagctcacaactctgaacctgggcaacaatctactggaagaggtaccggaggaaatgaagtatctcacatccctaaagaatttacacctgagtggcaatcggatctgtaggttcgccccaggggcttgcgatggcttgcagaatctgattctgctcaatttaaacaacaaccacctgacccagcttcctcaggaggtctcccggctcaagagcctgacctatatgagcataaattataatcagttggcctccatccctcgggagctgtgtttccttgagaacttggtggaactgcagctgaactacaaccaattaatctgtatacccgaggaaatcaagtttctcaagaaattacagaagcttttactcgctcgcaacaacatcggcgtgctccctgaggagctgtgcgatctcaagaagctccgcattttggatattgcaggaaatatcatccagatcttcccatctggatttcaggatctgaagctgagagagttctactgcgagggcaatcctctgttcttgcagcaacccgtaatcagtactcaacaggagaatgtgtggtcattacaggagattacgagcagatttgtcatgaaccagctggcggagaataatccattccttatggatgacattgagcgttacccgcaggtccgcagcatgatctcacaggggaagacttgtgccatatgtggccagtacttcataacagtatggctagaatgtgtgcggttcgtccccccaccgaaagattggaaaatcagtaagaatctcaaactggtacccctccaggtgttaatctgcagttacaagtgcttcactcagcgcgatcctaatctttttgggatcgcccaggtgtag

SEQ ID NO: 47061 - protein, 535 aa, Artificial Sequence
  derived and/or modified sequence
MAQQNMKVRPVLLKRNSLESVEFVKQPHHRRSKSQQVRFKEDGTTKNPTGLAEVDVQTPEDPAVMGKTQATRHHLPPTYSLSFPRSQKAGGFRNIAIQTSPSLRKHFPVFKRKRLTASKSLVEMPTASQSAIQVNGNLSEQDIVSSDLAYLRLAQHLEDGPRRVKVSHAFLPRVPKVQSNGPVSICLEAGTWRSLEKATAAIQVPDDIYHSPSWEARESALSPDRSAEVSNSIHPLDDTRPGDGRRVTPLDSEKSTSCLNATSVASHTPGTEELKPELLLPKDNSDDKDLGSLSSQSKETCVPSSPRTHSSPSQGSHSQPAHPGRASDCPSSSNNHQNLVSLKTNSASKSAPGCQEQTANNPTESDTLEFPNCPGSNHLPSSLSRSETKLQSNREISDINQIHLARGELCDLQGRLQSVEESLHSNQEKIKVLLNVIQDLEKARALTEGRNFYRTGQDLNNCSTCQNTACIIYSVEYDFRQQEGRFHEVLQSLEEAEPVEEASPPPKSPAEPPAPEKQDLRRKTKKVKKKCFWWI

SEQ ID NO: 47062 - DNA, 1608 bp, Artificial Sequence
  derived and/or modified sequence
atggcccagcagaacatgaaggtgagacccgtgctgctgaagagaaacagcctggagagcgtggagttcgtgaagcagccccaccacagaagaagcaagagccagcaggtgagattcaaggaggacggcaccaccaagaaccccaccggcctggccgaggtggacgtgcagacccccgaggaccccgccgtgatgggcaagacccaggccaccagacaccacctgccccccacctacagcctgagcttccccagaagccagaaggccggcggcttcagaaacatcgccatccagaccagccccagcctgagaaagcacttccccgtgttcaagagaaagagactgaccgccagcaagagcctggtggagatgcccaccgccagccagagcgccatccaggtgaacggcaacctgagcgagcaggacatcgtgagcagcgacctggcctacctgagactggcccagcacctggaggacggccccagaagagtgaaggtgagccacgccttcctgcccagagtgcccaaggtgcagagcaacggccccgtgagcatctgcctggaggccggcacctggagaagcctggagaaggccaccgccgccatccaggtgcccgacgacatctaccacagccccagctgggaggccagagagagcgccctgagccccgacagaagcgccgaggtgagcaacagcatccaccccctggacgacaccagacccggcgacggcagaagagtgacccccctggacagcgagaagagcaccagctgcctgaacgccaccagcgtggccagccacacccccggcaccgaggagctgaagcccgagctgctgctgcccaaggacaacagcgacgacaaggacctgggcagcctgagcagccagagcaaggagacctgcgtgcccagcagccccagaacccacagcagccccagccagggcagccacagccagcccgcccaccccggcagagccagcgactgccccagcagcagcaacaaccaccagaacctggtgagcctgaagaccaacagcgccagcaagagcgcccccggctgccaggagcagaccgccaacaaccccaccgagagcgacaccctggagttccccaactgccccggcagcaaccacctgcccagcagcctgagcagaagcgagaccaagctgcagagcaacagagagatcagcgacatcaaccagatccacctggccagaggcgagctgtgcgacctgcagggcagactgcagagcgtggaggagagcctgcacagcaaccaggagaagatcaaggtgctgctgaacgtgatccaggacctggagaaggccagagccctgaccgagggcagaaacttctacagaaccggccaggacctgaacaactgcagcacctgccagaacaccgcctgcatcatctacagcgtggagtacgacttcagacagcaggagggcagattccacgaggtgctgcagagcctggaggaggccgagcccgtggaggaggccagccccccccccaagagccccgccgagccccccgcccccgagaagcaggacctgagaagaaagaccaagaaggtgaagaagaagtgcttctggtggatctag

SEQ ID NO: 47063 - DNA, 1608 bp, Artificial Sequence
  derived and/or modified sequence
atggctcagcagaacatgaaagtgcgccccgtgctcctgaagcggaatagccttgaatcagtggagttcgtgaagcaaccacatcataggaggtccaaatcccagcaggttcgttttaaggaggacggcacaacaaagaaccctactggccttgctgaggtagatgtgcagacccctgaggatcctgcagtgatgggaaagactcaggcaactcgccaccatcttcctcccacctacagcctgagtttcccccggtcccagaaagctgggggcttccgaaatattgcgattcaaacgtcgccatctctgcgtaagcacttcccggtgtttaaacgtaagcgcctgacagcctccaaatctcttgtagaaatgcctacagccagccagtctgctatacaggtgaatggcaacttatctgaacaagatatagtctcatcagacttggcttaccttcgtctggcgcagcatctggaagacggcccaagaagggtgaaggtttcccacgctttcctgcctcgagtgcccaaagtgcagtcgaatggccctgttagcatctgcctcgaggctggaacctggcgatctcttgaaaaggctactgccgccattcaggtgcctgacgacatctatcactcccccagctgggaggcacgcgagtcagccctctcacccgaccgctcagcagaagttagtaattcaatccatcctctggacgacacaagacccggggacgggagacgtgtgacacccttggattcagagaagagtacttcctgtctgaacgcaacatctgttgcttcacatacaccaggaaccgaggaattgaaacctgaacttctcctgcccaaagataatagcgatgataaagacttaggaagtttaagctcccaatcgaaggaaacatgcgtgccaagctctcctcggacccatagctcaccgtcacagggatcacactctcagccagctcatcccggccgagccagtgactgtcccagctctagtaacaatcaccagaacctggtaagcctgaagactaattccgcatctaagtccgcacctggttgtcaggagcagactgcaaacaatcccaccgagtctgatactctggagtttcccaattgccccgggagcaaccatcttccctcatctctctccaggagcgagacaaaattgcagtcaaaccgcgagatcagtgacatcaaccagatccacctggccagaggtgagctgtgtgacctacagggcaggctgcagagtgtcgaggagtctctgcatagcaatcaggagaagattaaggtattgctaaacgtgatccaggaccttgagaaagcacgggccctgacagagggccgcaacttttaccgtacgggccaggacttgaataattgttccacctgccagaatacagcttgtatcatttactctgtcgaatatgatttccgccagcaggaggggcggttccacgaggtactgcagtcacttgaggaggccgagccggtggaagaagcttcaccaccacccaagtcgcccgcagagccgcctgcacctgaaaagcaggatctgaggcggaagaccaagaaggttaaaaagaagtgtttttggtggatttag

SEQ ID NO: 47064 - DNA, 2999 bp, Artificial Sequence
  derived and/or modified sequence
gctaatttaaccagctcccacttaaatcaagaaataaccattattctcgtttctacctccagccaggccaaatgcaagaaaggagaaaccttagcatttgtggggtgtaggagtgtgtgtatatgcatgtgtgtgtgcctgcatatgtgtgtgtgtgtgtgtctatacacacacaggagcgtgtgtttcctctgctccatctctcctctcccttccttaaagaattcagcctgtggccactagaggtcttttcttttcacatggtagctgccgagcagtttgttcggctttttatttattcctacgtgagcagacccactacacttcttgcatataaacagtgaaaattacaatatgaaggacttattattccttcttttggagtaattttgctgctggtcaaagcctggctcattgtgcaaggaagggggaccatcctctgcaggtaattccactgcttcaaggtgctcctcgcctgcttgcagatatcagaccccagctcatctcagacctcagcccctgaggccaagcaaacatacatcatcatggaggctgcagacgtagctcaccgtgcccacatgtgaacttcggccaacacaccacaacagggactctgcccactgaatcccctgtgattcctcaatcctgtcctggtcataccccactgggttttgtgaggctatttaggaagataagtttccctcactgaagaaaagagagacagcatgaaagaaaacaatggccccaaaggaggaatttgtgattgacataaatgggaatgttcccttgggagcatcatgtatcatcaaacaagcaaacctccaggtcatttatttctccacctgtttacctgctatggaaagaagatgcatttaagtttcctgcagtttcaccctggaaattaatgctctgggaaacaaaaagctgtatgttctagacgtagcaggtttcttttggaattcactcattgggagtctggcactaccccctaaatggtacttttgttgtctttttgttcaagacagccagcttcttccaagatcagaaccgcgtgccagcctcccttgataaaccgcctaccagctctcttggtagatcagatgtttaatagttagcctaactcatttgtttttccaaggagcaattatgactacaatgaattaatattttaactgcagggaaagcattacagatagttcctacgtagactctagaggctgggaatggccaacaggatttcccatactaagaggagaggaccactccatcctggccagcagttctctatgattgaaatactatcattagatactgctccaaagacctaaggggagatgtgcctaggagaagtgtatggtcctgatccttcccactgaggctcaatggcccagcaaaatatgaaagtgagacctgtgcttctaaagcgtaacagtctagaatcagtggagtttgtgaaacaacctcaccaccgcaggagcaaatcccagcaggtgagattcaaggaagatgggaccactaagaatccaactggcctagctgaggttgacgtccaaactccagaagacccggctgtgatggggaagactcaagcaaccaggcaccatcttccccccacctactcgctctccttccccaggtcccagaaggcagggggctttcgcaacattgcaatccaaacttcccccagtctcaggaagcatttcccagttttcaaaaggaagagactcacagccagtaagtccctggtggaaatgccaacagcctcccaaagtgccatccaggtcaacggtaacctctctgaacaggacattgtgtcttctgaccttgcctacttaaggttggctcagcatcttgaggatgggcctcgaagggtcaaggtgtcccatgcattcctcccaagggtccccaaggtgcaaagcaatggtcctgttagcatatgcttggaagcaggaacttggaggtccttagagaaagccacagctgccattcaggttccagatgatatttatcacagtccttcctgggaagctagagagtctgctctcagcccagacaggtcagctgaagtaagtaactccatacaccctttggatgacacacgtccaggtgatgggagaagggtgactccactagattcagaaaaatccacctcctgcttaaatgccaccagcgttgccagccacacaccaggcacagaggaacttaaacctgaattgcttttgcccaaagacaactcagatgacaaagaccttggctcactgtcatctcagtcaaaggaaacgtgtgttccttcatctccacggactcacagttccccctcacaaggctcccacagccagccagcccacccaggaagagcctcagactgtccttcatcaagtaacaatcaccagaatctggtgtcactcaaaactaacagtgcatcgaaatctgcccctgggtgtcaggagcagacggcaaacaaccccaccgagtcagacacactggagtttccaaattgtccaggaagtaatcatctcccatcctctctttcaaggagtgagaccaaacttcagagcaacagggagattagtgacattaatcaaattcacctggcacggggtgaactctgcgacctccaaggccgactgcaatctgtggaggaatctctgcactcgaaccaagagaaaattaaagtccttttgaatgtaattcaagacttggagaaagctcgagctctcactgaagggcgcaacttttatcgaactggccaagatctcaacaattgcagtacctgccagaacacggcgtgcatcatatacagtgtagagtatgattttcggcagcaggaaggcaggttccatgaagttttgcagagtctggaggaagcagagccagttgaggaggcatcgcccccaccaaagtccccagcagaacccccagccccggaaaagcaggacttaaggcggaaaaccaagaaggtgaaaaagaaatgcttctggtggatctgagctggttgg

SEQ ID NO: 47065 - DNA, 1608 bp, Artificial Sequence
  derived and/or modified sequence
atggcccagcagaacatgaaggtgcggcctgtgctgctgaagaggaacagcctggagagcgtggagtttgtgaagcagccccaccaccggcgcagcaagagccagcaggtgcgcttcaaggaggatggcaccaccaagaaccccaccggcctggccgaggtggatgtgcagaccccagaggaccctgctgtgatgggcaagacccaggccaccaggcaccacctgccccccacctacagcctgtccttccccaggagccagaaggccggcggcttcagaaatattgccatccagaccagccccagcctgaggaagcacttccctgtgttcaagaggaagaggctgacagccagcaagagcctggtggagatgcccacagccagccagagcgccatccaggtgaatggaaacctgtctgagcaggacatcgtgtccagtgacctggcctacctgcggctggcccagcacctggaggatggcccccggcgggtgaaggtgagccacgccttcctgccccgggtgcccaaggtgcagagcaatggacctgtgtccatctgcctggaggccggcacctggaggagcctggagaaggccacagctgccatccaggtgcctgatgacatctaccacagccccagctgggaggcccgggagagcgccctgagcccagacagatctgctgaggtgagcaacagcatccaccccctggatgacaccaggcctggagatggaagaagagtgacccccctggacagcgagaagagcaccagctgcctgaatgccacctctgtggccagccacaccccaggcacagaggagctgaagccagagctgctgctgcccaaggacaacagtgatgacaaggacctgggcagcctgagcagccagagcaaggagacctgtgtgcccagcagccccaggacccacagcagccccagccagggcagccacagccagcctgcccaccctggccgggccagtgactgccccagcagcagcaacaaccaccagaacctggtgtccctgaagaccaacagcgccagcaagagcgcccctggctgccaggagcagacagccaacaaccccacagaaagtgacaccctggagttccccaactgccccggcagcaaccacctgcccagcagcctgagccgctctgagaccaagctgcagagcaaccgggagatcagtgacatcaaccagatccacctggcccggggggagctgtgtgacctgcagggccgcctgcagagcgtggaggagagcctgcacagcaaccaggagaagatcaaggtgctgctgaatgtcatccaggacctggagaaggcccgggccctgacagagggcaggaacttctacagaacaggccaggacctgaacaactgcagcacctgccagaacacagcctgcatcatctacagcgtggagtatgacttccggcagcaggagggccgcttccacgaggtgctgcagagcctggaggaggccgagcctgtggaggaggccagccccccacccaagagccctgctgagcccccagcccctgagaagcaggacctgcggaggaagaccaagaaggtgaagaagaagtgcttctggtggatctag

SEQ ID NO: 47066 - DNA, 1608 bp, Artificial Sequence
  derived and/or modified sequence
atggcccagcagaacatgaaggtgcggcccgtgctgctgaagcggaattctttggagtctgtcgagttcgtaaagcagccccaccatagacgcagcaagagccaacaagtgcgattcaaggaagatgggacaaccaagaaccctacagggctggcagaggttgatgtccaaactcccgaggatccagcagtgatgggtaaaacacaggcaactcgccatcatttgccgcctacatactcgttgagcttcccccgcagccaaaaggcaggtggcttcagaaacattgctattcaaaccagcccctcactgcgcaagcatttccctgtcttcaaaagaaagcgcctgacagccagcaagtctcttgttgaaatgccaactgcaagccagtccgctatccaagtgaatgggaatctctctgagcaggatatcgtttcttccgacttagcttatctgagactcgctcaacacctagaggacggccctagacgtgtaaaagtctctcatgccttcctccctcgtgtgcccaaggtccaatctaacgggcctgtctcgatttgcctggaggctggtacctggaggagtcttgagaaggcaacagcagccatacaggttccagatgacatttatcattctccgtcttgggaggcccgggagtccgccctctcaccggatagatccgccgaagtttccaacagtatccaccctctggacgacacccgaccaggtgatggccgccgcgtgactcccctggattccgagaagtccacatcctgcctaaacgcgacctccgtggctagtcatacaccaggaacggaagaattaaagccggagctcctgctgcccaaggataacagtgacgataaagacctcggctcactgtcttcacaatctaaggagacatgtgtcccttccagccccaggactcattcttctccaagccaaggctcccactcccagccggcccaccccggaagagcttccgactgtccctcctcaagcaataatcatcagaatctcgtcagtctgaaaacgaactccgcctccaagtccgcaccggggtgccaggagcagacagccaacaacccgaccgagagtgataccctggaattccccaattgccctggctccaaccacttgccctccagcttaagtcggagcgaaacaaaactgcaaagcaatagggagatctccgatatcaaccagatacatctggcccgcggtgagttatgtgatcttcagggcagactgcagtcagtggaggagtcccttcatagcaaccaggaaaagatcaaggtgttgcttaacgtaattcaggacctggagaaggctcgggccctcactgaaggcagaaacttctataggaccggccaagatttgaacaattgctctacttgccaaaacacagcctgcatcatctatagcgtcgagtacgacttccgccaacaagaggggaggtttcacgaggtgttacagtccctggaggaggctgagcccgtagaagaggcctctccacctcctaaatccccagctgagcccccagctcctgaaaagcaggatctgcgcaggaaaaccaaaaaagtcaagaagaaatgtttttggtggatttag

SEQ ID NO: 47067 - DNA, 1608 bp, Artificial Sequence
  derived and/or modified sequence
atggcgcagcagaatatgaaagtccgacctgtgctgctcaaacgcaattctctggagtctgtcgaattcgttaaacagccccaccaccgtcggtctaaaagtcaacaagtgcggtttaaggaggacggcaccacaaaaaaccctactgggctggccgaggtcgacgtgcagacccccgaggacccggctgtcatgggtaaaacccaggctactagacaccacctcccccctacctattctctgtctttccccagatcccagaaggccggtggtttcaggaatatcgccattcagacatctccttccttacgcaagcattttcccgtgttcaaacgaaagcgactcaccgcctcgaaatcactcgtcgaaatgcccacagcctctcaatctgccatccaagtcaatggcaatctgtccgaacaggacatcgtgtcttctgaccttgcctatctgcgactggcacagcacctggaagacggacccaggagagtgaaagtcagccacgcctttctgcctagagttcctaaagtacagtcaaacggaccagtgtcaatttgtctagaggcaggcacctggcgcagcttagaaaaagccacggccgctatacaggttcctgatgatatttaccatagcccttcgtgggaggctcgggagtctgcccttagtccagataggtctgctgaggtgagtaattccattcatcctctcgacgacacacgtcccggagatgggagacgggtcactcctctggactccgagaaaagtactagctgcttgaacgctacttcagtcgcaagccacactccgggaactgaagagctcaaacctgagctcctcctccccaaagataatagtgatgataaggacctaggatctttatcctcgcagagcaaagaaacctgtgtcccaagtagtccaaggactcacagtagtccgagccaaggatcacactctcagcctgctcaccctggacgtgccagcgattgtccgagttcgtctaataatcaccagaatctcgttagcttaaagacgaacagtgcaagcaagtctgcaccgggatgccaggagcaaaccgctaataatcctaccgaatcagacacactcgagttcccaaattgcccagggtcaaaccacctgcctagttctctgagccgctctgaaaccaagctacagtctaaccgagagataagcgacatcaaccagatccaccttgctcggggtgaactgtgtgacctgcagggcagactccagagcgttgaggagtctttacacagcaatcaagagaaaatcaaggtcctgcttaatgtcattcaggatcttgagaaggcacgggctttaaccgagggacgtaacttttatcggactgggcaagacctgaacaattgctccacctgtcagaacacggcctgcataatttactccgttgagtacgactttaggcagcaggaaggtagattccacgaggttctgcagagtctggaggaagccgaaccggtggaggaagcctccccgcctcctaaatctccagccgagcctcccgcacccgagaagcaggatctgcggagaaagactaagaaagtcaagaaaaaatgcttttggtggatttag

SEQ ID NO: 47068 - protein, 171 aa, Artificial Sequence
  derived and/or modified sequence
MAMSQESLTFKDVFVDFTLEEWQQLDSAQKNLYRDVMLENYSHLVSVGYLVAKPDVIFRLGPGEESWMADGGTPVRTCAGEDRPEVWQVDEQIDHYKESQDKLPWQAAFIGKETLKDESGQESRTCRKSIYLSTEFDSVRQRLPKYYSWEKAFKTSFKLSWSKWKLCKKER

SEQ ID NO: 47069 - protein, 171 aa, Artificial Sequence
  derived and/or modified sequence
VAMSQESLTFKDVFVDFTLEEWQQLDSAQKNLYRDVMLENYSHLVSVGYLVAKPDVIFRLGPGEESWMADGGTPVRTCAGEDRPEVWQVDEQIDHYKESQDKLPWQAAFIGKETLKDESGQESRTCRKSIYLSTEFDSVRQRLPKYYSWEKAFKTSFKLSWSKWKLCKKER

SEQ ID NO: 47070 - DNA, 516 bp, Artificial Sequence
  derived and/or modified sequence
atggccatgagccaggagagcctgaccttcaaggacgtgttcgtggacttcaccctggaggagtggcagcagctggacagcgcccagaagaacctgtacagagacgtgatgctggagaactacagccacctggtgagcgtgggctacctggtggccaagcccgacgtgatcttcagactgggccccggcgaggagagctggatggccgacggcggcacccccgtgagaacctgcgccggcgaggacagacccgaggtgtggcaggtggacgagcagatcgaccactacaaggagagccaggacaagctgccctggcaggccgccttcatcggcaaggagaccctgaaggacgagagcggccaggagagcagaacctgcagaaagagcatctacctgagcaccgagttcgacagcgtgagacagagactgcccaagtactacagctgggagaaggccttcaagaccagcttcaagctgagctggagcaagtggaagctgtgcaagaaggagagatag

SEQ ID NO: 47071 - DNA, 516 bp, Artificial Sequence
  derived and/or modified sequence
gtggccatgagccaggagagcctgaccttcaaggacgtgttcgtggacttcaccctggaggagtggcagcagctggacagcgcccagaagaacctgtacagagacgtgatgctggagaactacagccacctggtgagcgtgggctacctggtggccaagcccgacgtgatcttcagactgggccccggcgaggagagctggatggccgacggcggcacccccgtgagaacctgcgccggcgaggacagacccgaggtgtggcaggtggacgagcagatcgaccactacaaggagagccaggacaagctgccctggcaggccgccttcatcggcaaggagaccctgaaggacgagagcggccaggagagcagaacctgcagaaagagcatctacctgagcaccgagttcgacagcgtgagacagagactgcccaagtactacagctgggagaaggccttcaagaccagcttcaagctgagctggagcaagtggaagctgtgcaagaaggagagatag

SEQ ID NO: 47072 - DNA, 516 bp, Artificial Sequence
  derived and/or modified sequence
atggccatgagccaagagtctttgacgttcaaagatgtgtttgttgacttcaccctggaagagtggcagcaactcgactctgcgcagaagaacctgtacagggatgtgatgctggagaattactcacatctcgtcagcgtgggctatcttgtggccaaacctgacgttatctttcgtctcggtccaggggaggagtcctggatggcggatggcggtaccccagtgcggacctgcgcgggtgaggatcgcccggaggtgtggcaagtagatgagcagatagatcactataaggaatctcaggataagctcccttggcaggccgcctttatcgggaaggagactctcaaagatgagtctggacaggaatccagaacttgcaggaaaagcatatacctgagtactgagttcgactcggtccgccagaggctccccaaatactacagttgggaaaaagcattcaagacatctttcaaactctcctggtcaaagtggaagctgtgcaagaaggaacgttag

SEQ ID NO: 47073 - DNA, 516 bp, Artificial Sequence
  derived and/or modified sequence
gttgcaatgagccaagaatctctgacctttaaggacgtgtttgtggattttacactcgaggagtggcagcagcttgatagtgcgcaaaaaaacctgtacagagacgtaatgctcgaaaattattctcacctcgtgagcgtcggctatcttgtcgccaagcctgatgttatttttaggcttggcccaggagaggagagctggatggcagacggcggtacacccgttaggacttgcgcgggtgaggacagacccgaggtgtggcaggtagacgagcaaatcgatcattacaaagaatcccaggacaaactgccctggcaggcagcctttattggtaaggaaacgctgaaagacgaatcgggccaggaatctcgaacctgccggaaatcaatttacctctccacagagttcgattccgtgcggcagagactaccaaaatattattcttgggaaaaagcatttaaaacatcgttcaagctaagttggtcaaagtggaagctttgtaaaaaagaaagatag

SEQ ID NO: 47074 - DNA, 516 bp, Artificial Sequence
  derived and/or modified sequence
atggccatgagccaggagagcctgaccttcaaggatgtgtttgtggacttcaccctggaggagtggcagcagctggacagcgcccagaagaacctgtacagagatgtgatgctggagaactacagccacctggtgtctgtgggctacctggtggccaagccagatgtgatcttccggctgggccctggagaggagagctggatggctgatggcggcacccctgtgaggacctgtgctggagaagatagacctgaggtgtggcaggtggatgagcagattgaccactacaaggagagccaggacaagctgccctggcaggccgccttcatcggcaaggagaccctgaaggatgaaagtggccaggagagcaggacctgcaggaagagcatctacctgagcacagaatttgacagcgtgcggcagaggctgcccaagtactacagctgggagaaggccttcaagaccagcttcaagctgtcctggagcaagtggaagctgtgcaagaaggagaggtag

SEQ ID NO: 47075 - DNA, 516 bp, Artificial Sequence
  derived and/or modified sequence
gtggccatgagccaggagagcctgaccttcaaggatgtgtttgtggacttcaccctggaggagtggcagcagctggacagcgcccagaagaacctgtacagagatgtgatgctggagaactacagccacctggtgtctgtgggctacctggtggccaagccagatgtgatcttccggctgggccctggagaggagagctggatggctgatggcggcacccctgtgaggacctgtgctggagaagatagacctgaggtgtggcaggtggatgagcagattgaccactacaaggagagccaggacaagctgccctggcaggccgccttcatcggcaaggagaccctgaaggatgaaagtggccaggagagcaggacctgcaggaagagcatctacctgagcacagaatttgacagcgtgcggcagaggctgcccaagtactacagctgggagaaggccttcaagaccagcttcaagctgtcctggagcaagtggaagctgtgcaagaaggagaggtag

SEQ ID NO: 47076 - DNA, 516 bp, Artificial Sequence
  derived and/or modified sequence
atggccatgagccaggagagcctgaccttcaaggacgtgttcgtggatttcacattagaggagtggcagcagctggacagcgctcagaaaaatctatatagggacgttatgctggaaaattatagtcacctcgtatccgttggctacctagttgcgaaacctgatgtgatattcaggctcggtcccggcgaggaatcctggatggcagatggtgggaccccggtgagaacttgcgcaggcgaggacaggcccgaagtttggcaggtggatgagcagatagaccattataaggagtcccaggacaagctgccttggcaggccgcctttatcggcaaagaaacgctgaaagatgaatccgggcaggaatcaaggacatgtaggaagtcaatctaccttagcaccgagtttgatagcgtgaggcagagactccccaagtattatagttgggagaaagccttcaaaacttcatttaagctgtcgtggagcaagtggaagctgtgtaagaaagagcgctag

SEQ ID NO: 47077 - DNA, 516 bp, Artificial Sequence
  derived and/or modified sequence
gtggccatgagccaggagagcctgaccttcaaggacgtgttcgtggactttacgctggaagagtggcagcagttggatagcgcacaaaaaaatctatacagggatgtaatgctggaaaactattctcacctggtgtcggtcggatacttggtggcgaagcccgatgtgatattccgcttgggcccaggcgaagagagttggatggctgatggcgggacgcctgtgaggacgtgtgccggcgaggatcgccccgaggtttggcaggtggatgagcagatcgaccactacaaagagagccaggataaactcccgtggcaggccgcctttattgggaaggaaacactcaaagatgaatcaggtcaagagagcaggacatgtagaaaatccatatatctgtctaccgaattcgattcagttaggcagcgtctgccgaaatactatagctgggaaaaagcatttaagacatcttttaaattgtcctggagcaaatggaaactgtgtaaaaaagagcggtag

SEQ ID NO: 47078 - DNA, 516 bp, Artificial Sequence
  derived and/or modified sequence
atggccatgagtcaggaatcattgactttcaaggacgtttttgtcgacttcacccttgaagaatggcagcagcttgacagcgcgcagaaaaatctgtacagggacgtgatgctggaaaattattcacaccttgtttccgtgggatatctcgtggccaagcctgacgttatctttaggcttggtcccggagaagaaagttggatggcagacggaggcacccctgtcaggacatgtgctggagaagatcgcccagaagtctggcaggtagatgaacaaattgatcactacaaagagagccaggataaactcccgtggcaggctgctttcatcggaaaggagaccttgaaggacgagagtggacaggagtcccgcacctgcaggaagagcatatacctcagtaccgagttcgacagtgttcgccagagattgcccaaatactatagctgggagaaggcttttaaaaccagctttaaattgtcatggagtaagtggaaactgtgcaaaaaagagcgctag

SEQ ID NO: 47079 - DNA, 516 bp, Artificial Sequence
  derived and/or modified sequence
gttgccatgagccaggagtctctcacgttcaaagacgtgttcgtcgacttcacactggaggagtggcaacagctcgactccgcgcagaaaaatttataccgggatgttatgctagaaaactattcccatttagtcagcgtgggatatctagtggcaaagcctgacgtgatctttcgtctaggacccggtgaggagagttggatggctgacggaggcacaccagttcgcacttgcgccggagaagatcgaccagaggtttggcaggtggacgagcagattgaccattacaaggagagtcaagacaaactcccttggcaggccgcattcattggcaaggaaaccctgaaagatgagagcgggcaggagtctcgaacatgtaggaagtctatctaccttagcacggaatttgactcagttcgccagcgcctgcccaagtattattcttgggaaaaagcgttcaaaacatctttcaagctgtcgtggagcaagtggaagctgtgcaaaaaagaacggtag

SEQ ID NO: 47080 - protein, 98 aa, Artificial Sequence
  derived and/or modified sequence
MAMSQESLTFKDVFVDFTLEEWQQLDSAQKNLYRDVMLENYSHLVSVGYLVAKPDVIFRLGPGEESWMADGGTPVRTCAGEDRPDVSIFASCILKCCY

SEQ ID NO: 47081 - DNA, 297 bp, Artificial Sequence
  derived and/or modified sequence
atggccatgagccaggagagcctgaccttcaaggacgtgttcgtggacttcaccctggaggagtggcagcagctggacagcgcccagaagaacctgtacagagacgtgatgctggagaactacagccacctggtgagcgtgggctacctggtggccaagcccgacgtgatcttcagactgggccccggcgaggagagctggatggccgacggcggcacccccgtgagaacctgcgccggcgaggacagacccgacgtgagcatcttcgccagctgcatcctgaagtgctgctactag

SEQ ID NO: 47082 - DNA, 297 bp, Artificial Sequence
  derived and/or modified sequence
atggccatgtcgcaggagtcactgacgttcaaggacgttttcgtggacttcactttagaagagtggcagcagctcgatagtgcgcagaaaaacttgtacagggacgtgatgctggaaaactacagtcatctcgtatcggttggctacctggttgcaaaaccggacgttatatttcggttgggtccaggagaggagtcctggatggctgatggcggaacccctgtgagaacttgtgctggggaagatagacctgacgttagcattttcgcatcttgcatcctcaagtgctgttattag

SEQ ID NO: 47083 - DNA, 297 bp, Artificial Sequence
  derived and/or modified sequence
atggccatgtcccaggagtccctaactttcaaggatgtatttgttgacttcaccttggaagagtggcagcagttggattccgcacaaaaaaatctgtatcgagacgtgatgctggagaattacagtcatctggtcagcgttggttacctggtggctaagcccgatgttatttttcgattaggccccggagaagagtcttggatggccgatgggggcactccagtgcggacatgtgctggagaggataggcccgacgtctcaattttcgcatcctgtatactgaagtgctgttactag

SEQ ID NO: 47084 - DNA, 297 bp, Artificial Sequence
  derived and/or modified sequence
atggctatgagtcaggagagccttacgttcaaggatgtattcgtggactttacattggaggaatggcagcagcttgactccgctcagaagaacttgtatcgggacgtgatgttggagaactacagtcatctagtgagtgtgggctaccttgtggccaagcccgacgtgatctttaggctgggccccggggaagaatcgtggatggcagacggtggaactcccgtccggacctgcgctggagaagaccgtcctgacgtctcaattttcgcgtcctgcattctgaaatgttgttattag

SEQ ID NO: 47085 - DNA, 297 bp, Artificial Sequence
  derived and/or modified sequence
atggccatgagccaggagagcctgaccttcaaggatgtgtttgtggacttcaccctggaggagtggcagcagctggacagcgcccagaagaacctgtacagagatgtgatgctggagaactacagccacctggtgtctgtgggctacctggtggccaagccagatgtgatcttccggctgggccctggagaggagagctggatggctgatggcggcacccctgtgaggacctgtgctggagaagatagaccagatgtgtccatctttgccagctgcatcctgaagtgctgctactag

SEQ ID NO: 47086 - DNA, 297 bp, Artificial Sequence
  derived and/or modified sequence
atggccatgagccaggagagcctgaccttcaaggacgtgttcgtggattttacgctggaggaatggcagcagctggactccgcccagaaaaatctgtaccgggatgtcatgctcgagaactacagtcacctggtgagtgtagggtacctagtggctaagccagacgtgatcttccgacttgggcccggcgaagaatcttggatggctgatggtgggacccccgtgcgcacgtgtgccggtgaagaccggcctgacgtttccatattcgcatcatgtatacttaagtgttgttactag

SEQ ID NO: 47087 - DNA, 297 bp, Artificial Sequence
  derived and/or modified sequence
atggccatgagccaggagagcctgaccttcaaggacgtgttcgtggattttaccctggaggagtggcaacagcttgactccgcacagaagaacctgtatagagatgtaatgctggaaaattattcccacttggttagcgtggggtatttggtcgccaagcccgacgtcattttcaggctgggccctggggaggaatcatggatggctgatgggggtactccagtgcgcacctgtgcaggagaagatcgacccgatgtctccatcttcgcttcctgcatcctgaagtgttgttactag

SEQ ID NO: 47088 - DNA, 297 bp, Artificial Sequence
  derived and/or modified sequence
atggccatgagccaggagagcctgaccttcaaggacgtgttcgtggattttaccctggaagaatggcagcagctggacagcgcccagaagaacctataccgggatgtgatgctggaaaattactcacacttggtgtccgtagggtacctcgtcgcaaaacccgatgttatctttcgactgggaccaggggaagagagctggatggccgatggtggtacaccagttagaacctgcgcaggtgaagacagacccgatgttagcatatttgctagttgcattcttaagtgttgctactag

SEQ ID NO: 47089 - DNA, 297 bp, Artificial Sequence
  derived and/or modified sequence
atggccatgagtcaagagtctctcacttttaaagatgtgttcgtcgattttaccctcgaagagtggcagcagctggactccgcacagaagaacttatatcgggacgtgatgcttgaaaactattcccacctggtgtccgtcggctatcttgttgcaaaacccgacgttatcttccgcctcggaccgggagaggagtcttggatggccgacggtggcacaccagtccggacgtgtgccggtgaagacagacctgacgtaagtatctttgcttcatgtattctgaagtgctgctattag

SEQ ID NO: 47090 - DNA, 297 bp, Artificial Sequence
  derived and/or modified sequence
atggctatgtcccaagagtctcttacattcaaagacgtcttcgttgactttaccttagaagaatggcaacaactagacagcgcgcagaaaaacctctacagggacgtgatgttggaaaattactcacacctggtcagcgtgggttacctggtggcaaagccggacgtcattttccgcctgggaccgggagaggagtcatggatggccgacggtggcaccccagttaggacctgtgctggtgaggaccgtccagacgtgtcgatttttgcttcttgcattctgaagtgttgctactag

SEQ ID NO: 47091 - DNA, 297 bp, Artificial Sequence
  derived and/or modified sequence
atggccatgtctcaggaatcactcacatttaaagatgtctttgtggacttcactttggaggagtggcagcagctcgactcggcgcaaaagaacttgtatagagacgtgatgctggagaactattcccacctggtcagcgtggggtatttggtggccaagccagatgtgatctttcgtttaggtcctggagaagaaagctggatggctgatggcggtacacccgtgaggacttgcgctggggaagacaggcccgacgtgagcatctttgcaagttgcattctaaaatgctgttactag

SEQ ID NO: 47092 - DNA, 993 bp, Artificial Sequence
  derived and/or modified sequence
ttcacactggctgttgtcagcggcctctgaggtttcaggctcttggcggtgaaggtcagagtgcagacctgagaccactgctcaccgacttcagactccagtttatctgtgccccagcttcctcacttagtctcagaagacttaggctgaggcctcagaaggagatctccatcctttgtccagagcagaacaggatggccatgtcccaggaatcattgaccttcaaggacgtgtttgtggacttcaccctggaggagtggcagcaactggactctgcccagaagaacctctacagggatgtcatgcttgagaactacagccacctggtgtccgtggggtatctagttgcgaagccagatgtgatcttcaggttgggaccaggtgaagagtcctggatggcagatggggggaccccggtacggacctgtgcaggtgaggacaggccagatgtatccatttttgcctcatgtattttgaagtgctgttattagtgagagttattttccatggaaattctgtgtaccctaagctatgaaagcatcactgcagaactatttggattgccactgctggggcccactggtttcactaatgcaggaacaatttataggtgaatttatcaacttcgggggttttgtattatacttcaaatgtccatttggaatgcactcctacatgtggtacaggactgtggttctgacttcttgtaagtaacccctgattcttcttaacattttcattagccagtgggtgacatctttctagttcctattttacacacagagatgtcctttgtgactcccagctttaagcaggtagctcaattctaattctctgcacatttgtgccctgtggcctagaattcacctcacactcatgattagagccttagtcccccaactgcaaagccacacagcttcaatttctgttcactccctcactttaaatttcttcttcatttttgtcacataataaatttattttctggtttga

SEQ ID NO: 47093 - protein, 242 aa, Artificial Sequence
  derived and/or modified sequence
MAGKLKPLNVEAPEATEEAEGQAKSLKTEDLLAMVIKLQKEGSLEPQIEDLISRINDLQQAKKKSSEELRETHSLWEALHRELDSLNGEKVHLEEVLGKKQEALRILQMHCQEKESEAQRLDVRGQLEDLMGQHKDLWEFHMLEQRLAREIRALERSKEQLLSERRLVRAKLREVERRLHSPPEVEGAMAVNDGLKAELEIFGEQVRSAPEVGAGEGEAGPELPRARDEEDPEPPVAAPDAL

SEQ ID NO: 47094 - DNA, 729 bp, Artificial Sequence
  derived and/or modified sequence
atggccggcaagctgaagcccctgaacgtggaggcccccgaggccaccgaggaggccgagggccaggccaagagcctgaagaccgaggacctgctggccatggtgatcaagctgcagaaggagggcagcctggagccccagatcgaggacctgatcagcagaatcaacgacctgcagcaggccaagaagaagagcagcgaggagctgagagagacccacagcctgtgggaggccctgcacagagagctggacagcctgaacggcgagaaggtgcacctggaggaggtgctgggcaagaagcaggaggccctgagaatcctgcagatgcactgccaggagaaggagagcgaggcccagagactggacgtgagaggccagctggaggacctgatgggccagcacaaggacctgtgggagttccacatgctggagcagagactggccagagagatcagagccctggagagaagcaaggagcagctgctgagcgagagaagactggtgagagccaagctgagagaggtggagagaagactgcacagcccccccgaggtggagggcgccatggccgtgaacgacggcctgaaggccgagctggagatcttcggcgagcaggtgagaagcgcccccgaggtgggcgccggcgagggcgaggccggccccgagctgcccagagccagagacgaggaggaccccgagccccccgtggccgcccccgacgccctgtag

SEQ ID NO: 47095 - DNA, 729 bp, Artificial Sequence
  derived and/or modified sequence
atggccggaaagcttaagcccctgaacgtagaagcccccgaagcaacagaggaggcagaaggccaggcgaagtctttgaagactgaggacctgctggccatggtcattaaactgcagaaagaggggagcttagagccccaaattgaagacctgattagtcgaattaatgacctgcagcaggcaaaaaagaaatcttctgaagagcttcgcgaaactcacagtctgtgggaggccctgcatcgggaattggatagcctgaacggtgagaaagtgcacctagaggaggtactgggaaagaagcaagaagcccttagaatattgcagatgcattgccaagaaaaagaatccgaggcccagagactggacgtgcggggacagttagaggatctgatggggcaacataaggacctttgggaatttcatatgcttgagcagagattggccagggagatcagagctctggagaggtcgaaagagcaactgttatctgagagaaggcttgtacgcgcaaagctgagagaagtagagcggagactccactcgccacccgaggtggaaggcgctatggccgtaaacgacggcttgaaagccgagttagaaattttcggggagcaagtgaggagcgcacccgaggtcggggccggcgagggagaggccgggcccgagctgccacgggccagagatgaggaagaccccgagccgcccgtggcggccccagacgcattgtag

SEQ ID NO: 47096 - DNA, 729 bp, Artificial Sequence
  derived and/or modified sequence
atggccggcaagctgaagcccctgaatgtggaggcccctgaggccacagaggaggccgagggccaggccaagagcctgaagacagaggacctgctggccatggtgatcaagctgcagaaggagggcagcctggagccccagattgaagatctcatcagccgcatcaatgacctgcagcaggccaagaagaagagcagcgaggagctgcgggagacccacagcctgtgggaggccctgcaccgggagctggacagcctgaatggagagaaggtgcacctggaggaggtgctgggcaagaagcaggaggccctgcgcatcctgcagatgcactgccaggagaaggagagcgaggcccagaggctggatgtgcggggccagctggaggacctgatgggccagcacaaggacctgtgggagttccacatgctggagcagaggctggcccgggagatccgggccctggagaggagcaaggagcagctgctgtctgaaagaaggctggtgcgggccaagctgcgggaggtggagcggcggctgcacagccccccagaggtggagggcgccatggctgtgaatgatggcctgaaggccgagctggagatctttggagagcaggtgcgcagcgcccctgaggtgggcgctggggagggggaggccggccctgagctgccccgggccagagatgaggaggaccctgagccccctgtggccgccccagatgccctgtag

SEQ ID NO: 47097 - DNA, 729 bp, Artificial Sequence
  derived and/or modified sequence
atggccggcaagctgaagcccctgaacgtggaggcccccgaggccaccgaagaggcagagggccaggccaaaagtcttaaaactgaggatcttcttgctatggtgatcaaacttcagaaggagggctccctggagccccagatagaggacttgatcagtcgcataaacgaccttcagcaggccaagaagaagagcagcgaggagttgcgagagactcacagtttgtgggaggcgctgcatagagaattagatagcttgaacggggaaaaggttcatttggaagaggttctcggtaaaaagcaggaagcactgagaatccttcagatgcactgccaggaaaaagagtctgaagcccagcgactggacgtaagggggcagcttgaagacttaatgggacagcacaaggacctttgggagttccacatgcttgagcaaagactggcccgggaaatcagggcattggaacggtccaaggaacagttactgtctgaaaggaggctcgtccgcgccaagctacgggaagtggagcggcgcttgcactcaccccctgaggttgaaggggccatggcagtaaatgacggcctaaaagccgaactcgaaatcttcggggagcaggtgcgcagtgccccggaggtgggcgcgggagagggagaggctggtcccgagctgcctcgtgcgagagacgaggaagatcctgaaccaccagtggccgccccagatgccctctag

SEQ ID NO: 47098 - DNA, 729 bp, Artificial Sequence
  derived and/or modified sequence
atggctggtaagcttaaacccctcaacgtggaggccccagaagcaaccgaagaagcagagggacaggcaaagagcctgaaaacagaggacttgctggccatggtgatcaaactgcagaaggagggatctcttgagccacagatcgaggatttaataagcagaatcaatgacctgcagcaggccaagaagaaatcatctgaggaacttagggaaacccattctctgtgggaggctctgcaccgcgagttggactctctgaacggggaaaaggtgcatctggaggaggtgctggggaagaagcaagaagctctgcgtatcctgcagatgcattgccaagaaaaggagtcagaagcccagagactagatgtgcggggacagctagaggatcttatgggacaacacaaggatctgtgggaattccacatgctcgagcagcggcttgctagggagattcgcgcactcgagagaagtaaggagcaactgctgtccgaacgcagattagtgagagcgaaactcagggaagtcgaacgcagattgcacagccctccggaagtagagggcgcaatggccgtgaacgacgggttaaaggctgaactggaaatcttcggggaacaggtccggtccgctccagaagtgggcgcaggggagggggaggctggcccagaactgccaagagcacgggatgaagaagatcctgagccaccagttgccgctcccgatgccctttag

SEQ ID NO: 47099 - DNA, 877 bp, Artificial Sequence
  derived and/or modified sequence
atggcggggaagctgaaacctctgaatgtggaggcgccagaagctactgaggaggctgaagggcaagccaagtctttgaagactgaagacttgctggcaatggtgataaagctgcagaaagagggaagcctggagccacagatagaggacctgattagccggattaatgatcttcagcaagcaaagaagaaatccagtgaggaactgagagagacccacagtctctgggaggccctgcatagggaattagactccttgaatggagagaaagtgcacctagaggaggtcttgggcaaaaagcaagaggcactgaggatcctccagatgcactgccaagagaaggaaagcgaggctcagaggttggatgtcagaggacagctggaggatctgatgggccagcacaaggacctctgggaattccacatgctggagcagcgactggcccgggagatccgtgccctggagagaagcaaggagcagctgctctcggagaggaggctggtgcgcgccaagctgcgggaggtggagcggcggctgcactcgccgcctgaggtcgagggcgccatggcggtgaatgacgggctgaaggcggagctggagatattcggggagcaggtccggagcgcccccgaggtcggggccggcgagggagaggccggacctgagctcccccgcgctcgcgacgaggaggatcccgagccgccggtggctgcccctgacgccctctaggccagcaggacccgcccgttcccgaccttccctcgagacccgccaagaaataaaggcgatgatttccgaccatgctcgcgttctccgcggagtctgtgctacaccgtggagcggggcggggcgtgctgggatctcgaggcggggcctc

SEQ ID NO: 47100 - protein, 327 aa, Artificial Sequence
  derived and/or modified sequence
MAKAPSWAGVGALAYKAPEALWPAEAVMDGTMEDSEAVQRATALIEQRLAQEEENEKLRGDARQKLPMDLLVLEDEKHHGAQSAALQKVKGQERVRKTSLDLRREIIDVGGIQNLIELRKKRKQKKRDALAASHEPPPEPEEITGPVDEETFLKAAVEGKMKVIEKFLADGGSADTCDQFRRTALHRASLEGHMEILEKLLDNGATVDFQDRLDCTAMHWACRGGHLEVVKLLQSHGADTNVRDKEGDTALHDAVRLNRYKIIKLLLLHGADMMTKNLAGKTPTDLVQLWQADTRHALEHPEPGAEHNGLEGPNDSGRETPQPVPAQ

SEQ ID NO: 47101 - protein, 300 aa, Artificial Sequence
  derived and/or modified sequence
MDGTMEDSEAVQRATALIEQRLAQEEENEKLRGDARQKLPMDLLVLEDEKHHGAQSAALQKVKGQERVRKTSLDLRREIIDVGGIQNLIELRKKRKQKKRDALAASHEPPPEPEEITGPVDEETFLKAAVEGKMKVIEKFLADGGSADTCDQFRRTALHRASLEGHMEILEKLLDNGATVDFQDRLDCTAMHWACRGGHLEVVKLLQSHGADTNVRDKEGDTALHDAVRLNRYKIIKLLLLHGADMMTKNLAGKTPTDLVQLWQADTRHALEHPEPGAEHNGLEGPNDSGRETPQPVPAQ

SEQ ID NO: 47102 - DNA, 984 bp, Artificial Sequence
  derived and/or modified sequence
atggctaaggccccgagctgggccggcgtgggtgccctggcttacaaggcaccagaagctctttggcctgccgaggctgtaatggacggaacgatggaggattcggaagctgtgcaacgcgcgactgctttgatcgagcagcgcttggcccaggaggaagagaacgaaaaacttagaggagacgcgagacaaaaattgcccatggacctgttggtgcttgaggacgagaagcaccacggcgctcagtcagctgccctccagaaagtcaaaggccaggaacgcgttaggaagacttcgcttgacttgcgacgggaaatcattgatgtgggcggtattcaaaatctgatagagctgcgtaaaaagagaaaacagaaaaagcgagacgccctggcagcaagtcatgagccccccccagaacccgaggaaatcacaggccctgtggatgaggaaacatttctaaaggcagccgtagagggaaagatgaaggtaattgagaaattccttgccgatggtggatcagcagacacgtgcgaccagttccgcaggactgcattacaccgcgcttccttggaagggcatatggaaattttggagaaactattagataacggcgcaacggtcgatttccaggaccggctggattgtaccgctatgcattgggcgtgccgaggcgggcaccttgaggtagtaaagctgctgcagagccatggggccgataccaacgtaagggataaggagggcgatactgccctgcacgatgccgtgcggctcaatagatataaaattataaagctactgctgctgcatggtgcagatatgatgacgaagaatcttgcaggaaagaccccaactgacctcgtccaactgtggcaggccgatacaaggcacgcactagagcaccctgagccgggagccgagcacaacggcctggaagggcctaacgatagcggccgcgaaacccctcagcccgtgcctgcccaatag

SEQ ID NO: 47103 - DNA, 903 bp, Artificial Sequence
  derived and/or modified sequence
atggacggtaccatggaggactctgaagccgtacagagggctacggccctgatcgagcagcgactggcccaggaagaagaaaatgagaaactgagaggggacgctcggcaaaaacttcccatggatctcctggtcctggaggatgaaaagcatcacggggcacagtccgctgcactgcagaaagtgaaggggcaggaacgcgttcgcaagaccagcctagacctccggcgagagatcattgacgtcggtgggattcagaatctcatcgaactacgtaagaagcgcaagcagaaaaagcgggacgccctggctgcatcccatgagcccccccctgaacctgaggagataactgggcccgtggatgaggaaaccttcctgaaggcagcagtcgaaggaaagatgaaggttatcgaaaagttcctggccgatgggggctcagcggacacttgcgaccagtttagaaggacagccctgcaccgcgccagtctggagggtcacatggagattctggagaagctactggacaacggcgctactgtggattttcaggaccggctggattgtacagctatgcactgggcctgcagaggcggccacctggaggtggtcaagcttttgcagagtcacggagcggacaccaacgttcgcgataaggagggagacacggccttacacgatgctgttcgtctgaacaggtacaagattatcaagctattgctgctccacggcgccgacatgatgaccaagaatcttgccggcaagacaccaacagatctggtgcaactctggcaggcagatacacgtcacgcactcgagcatccagagccaggagccgaacacaacgggttggagggccctaacgacagcggccgcgaaacaccccaacctgttccggctcagtag

SEQ ID NO: 47104 - DNA, 984 bp, Artificial Sequence
  derived and/or modified sequence
atggccaaggcccccagctgggccggcgtgggcgccctggcctacaaggcccctgaggccctgtggccagctgaggccgtgatggatggcaccatggaggacagcgaggccgtgcagagggccacagccctgattgagcagaggctggcccaggaggaggagaatgagaagctgcggggagatgcccggcagaagctgcccatggacctgctggtgctggaggatgagaagcaccacggggcccagagcgctgccctgcagaaggtgaagggccaggagcgggtgaggaagaccagcctggacctgcggcgggagatcattgatgtgggcggcatccagaacctgattgagctgaggaagaagaggaagcagaagaagagagatgccctggccgccagccatgagcccccacctgagcctgaggagatcaccggccctgtggatgaggagaccttcctgaaggctgctgtggagggcaagatgaaggtgattgagaagttcctggctgatggcggcagcgctgacacctgtgaccagttcagaagaacagccctgcaccgggccagcctggagggccacatggagatcctggagaagctgctggacaatggagccaccgtggacttccaggaccggctggactgcacagccatgcactgggcctgccggggcggccacctggaggtggtgaagctgctgcagagccacggggctgacaccaacgtgcgggacaaggagggggacacagccctgcatgatgctgtgcggctgaaccgctacaagatcatcaagctgctgctgctgcatggagctgacatgatgaccaagaacctggccggcaagacccccacagacctggtgcagctgtggcaggccgacaccaggcatgccctggagcaccctgagcctggagctgagcacaacggcctggagggccccaatgacagcggccgggagaccccccagcctgtgcctgcccagtag

SEQ ID NO: 47105 - DNA, 903 bp, Artificial Sequence
  derived and/or modified sequence
atggatggcaccatggaggacagcgaggccgtgcagagggccacagccctgattgagcagaggctggcccaggaggaggagaatgagaagctgcggggagatgcccggcagaagctgcccatggacctgctggtgctggaggatgagaagcaccacggggcccagagcgctgccctgcagaaggtgaagggccaggagcgggtgaggaagaccagcctggacctgcggcgggagatcattgatgtgggcggcatccagaacctgattgagctgaggaagaagaggaagcagaagaagagagatgccctggccgccagccatgagcccccacctgagcctgaggagatcactggacctgtggatgaggagaccttcctgaaggctgctgtggagggcaagatgaaggtgattgagaagttcctggctgatggcggcagcgctgacacctgtgaccagttccggaggacagccctgcaccgggccagcctggagggccacatggagatcctggagaagctgctggacaacggggccaccgtggacttccaggaccggctggactgcacagccatgcactgggcctgccggggcggccacctggaggtggtgaagctgctgcagagccatggagctgacaccaacgtgcgggacaaggagggggacacagccctgcatgatgctgtgcggctgaaccgctacaagatcatcaagctgctgctgctgcacggggctgacatgatgaccaagaacctggccggcaagacccccacagacctggtgcagctgtggcaggccgacaccaggcatgccctggagcaccctgagcccggggctgagcacaacggcctggagggccccaatgattctggccgggagaccccccagcctgtgcctgcccagtag

SEQ ID NO: 47106 - DNA, 984 bp, Artificial Sequence
  derived and/or modified sequence
atggccaaggcccccagctgggccggcgtgggcgccctggcctacaaggcccccgaagctctctggccggccgaggcagtcatggacggcaccatggaggatagcgaggctgttcagagggccaccgctcttatcgagcagcgcctcgcacaagaggaggagaatgaaaagttgcggggcgacgcgaggcagaaacttccaatggatttacttgtactggaagacgagaaacaccacggcgctcagagtgcagccctgcagaaggttaaaggacaggagcgagtgcgcaagacgtcgctggacctgagaagggagatcatcgacgttggggggatacaaaatcttatcgagctgaggaaaaagaggaagcagaagaagcgtgacgcgcttgcagcctcccacgagccaccgcccgagcctgaagagattacagggcccgtggatgaggaaaccttccttaaggccgctgtggaaggaaaaatgaaagtgatcgaaaagttcctggcagacggcgggtcggccgacacctgcgaccagtttcggagaactgctctgcacagggccagccttgaaggacacatggagatcctggagaagctgttggacaatggcgcaacagtcgacttccaggacagactggattgcactgcaatgcactgggcatgccgtggcggtcacctggaggtggtgaagcttctgcaaagtcacggtgcagacactaacgtacgggacaaagaaggggataccgccttgcatgacgccgtccggttgaaccgatataagattatcaaactacttctccttcacggcgcagacatgatgaccaaaaacctggccggtaagacacccaccgatcttgtgcagttatggcaggccgatacccgtcacgcactggaacatccggaacctggtgctgaacacaacggattggaaggccctaacgattctggccgcgagacgccacaacctgtaccagcccaatag

SEQ ID NO: 47107 - DNA, 903 bp, Artificial Sequence
  derived and/or modified sequence
atggacggcaccatggaggacagcgaggccgtgcagcgggccaccgcactgattgaacagcggctggctcaggaggaagagaacgagaaactgcggggggatgcacgtcagaaactgccgatggatcttctggtgctcgaagatgagaaacatcatggcgcccagtccgcggcacttcagaaagtgaaaggccaggagcgcgtgaggaaaacctctttggatctgaggagggaaattattgacgtaggtggtatccagaatctcatagagctcagaaaaaaaaggaagcagaaaaagcgcgacgctctcgctgcttctcatgaacctccgcccgaacctgaggagatcacaggccccgtagacgaagagacctttctcaaggccgctgtggagggcaagatgaaagtgatagagaagttcctggctgatgggggaagtgccgacacctgtgatcagttccgcaggaccgcgctgcacagagccagtttggaagggcatatggaaattctagagaagttattggataatggagccacggtcgacttccaagaccgactggattgtacagccatgcactgggcatgtcgcggcgggcatttagaagtggtcaaactactgcagagtcatggtgccgataccaacgtccgcgacaaagagggtgacaccgccctccacgatgcagtgcgcctcaaccggtataaaatcattaagctcttgcttctgcatggcgccgacatgatgaccaaaaatctggcaggcaaaaccccaactgatctggtacagttgtggcaagccgacactcgccatgctttggaacatccagagccaggcgctgagcataatgggttagaggggccaaacgattctggccgcgaaacaccacagccagtccctgctcagtag

SEQ ID NO: 47108 - DNA, 1072 bp, Artificial Sequence
  derived and/or modified sequence
agaggcggttatggacggcaccatggaggactccgaggcggtgcagagggccacagcgctcatcgagcagcggctggcacaggaggaggagaatgagaaactccgaggagacgcacgccagaagctgcccatggacttgctggtgctggaggatgagaagcaccacggggctcagagtgcagccctgcagaaggtgaagggccaagagcgcgtgcgcaagacgtccctggacctgcggcgggagatcatcgatgtgggcgggatccagaacctcatcgagctgcggaagaaacgcaagcagaagaagcgggacgctctggccgcctcgcatgagccgcccccagagcccgaggagatcactggccctgtggatgaggagaccttcctgaaagctgcggtggaggggaaaatgaaggtcattgagaagttcctggctgacggggggtcagccgacacgtgcgaccagttccgtcggacagcactgcaccgagcttccctggaaggccacatggaaatcctggagaagcttctagataatggggccactgtggacttccaggatcggctggactgcacagccatgcattgggcctgccgcgggggccacttagaggtggtgaaacttctgcaaagccatggagcagacaccaatgtgagggataaggaaggggatactgccctgcatgacgctgtgaggctcaaccgctacaaaatcatcaaactgctgctcctgcatggggctgacatgatgaccaagaacctggcaggaaagaccccgacggacctggtgcagctctggcaggctgatacccggcacgccctggagcatcctgagccgggggctgagcataacgggctggaggggcctaatgatagtgggcgagagacccctcagcctgtgccagcccagtgaatgcgtgccccagcccagccagctacccagcccctctctgtgtgcagccggagggtcctaagaatggctcccggagctaactgagggcccagccttttttctgcatgatccaggagcacataccacaaactaccacaataaaaaagctgtttttgctaa

SEQ ID NO: 47109 - DNA, 984 bp, Artificial Sequence
  derived and/or modified sequence
atggcaaaagcccctagttgggcgggagttggagctctagcatacaaggcccctgaagccctgtggccagccgaagccgtaatggacggcacaatggaggatagcgaggcggtgcagcgggcaaccgcacttatcgagcaaagactggcacaagaggaggagaatgagaaacttcgaggggacgccagacagaagctgcccatggatcttcttgttttggaagacgagaagcatcatggtgcacagagcgcagccctgcagaaggtcaaagggcaggaacgggtccggaagacatcactggacttaagacgggagatcattgatgttggaggcatccaaaatctgatagagctgcggaaaaagcggaaacaaaagaaacgggatgctttggcagctagccatgagccaccacccgaaccggaggagatcactggacccgtagacgaggagacttttcttaaagctgctgtggaaggcaagatgaaggtgattgagaaattcctcgcagacgggggttccgcagatacatgtgatcagttccgacggaccgccctgcacagagccagcctggaaggccacatggaaatcttagaaaaactgcttgacaacggcgcaactgtggactttcaggacaggttggactgcacagccatgcactgggcttgccgcggtggacacctggaagtggtcaaactcctccagagtcatggtgccgataccaatgtgagagacaaggaaggggacactgcactccatgacgccgtcagactgaacagatacaaaatcattaaactactactcctgcacggggctgacatgatgaccaagaacctggctggcaaaacaccaaccgacctggtgcagctgtggcaggctgatacgagacacgctctcgaacaccccgagcctggcgctgaacacaatgggttggaaggcccaaacgattccggaagggagaccccgcagccagtcccagcccaatag

SEQ ID NO: 47110 - DNA, 903 bp, Artificial Sequence
  derived and/or modified sequence
atggacggtacgatggaagattccgaggctgtccagcgagccacggctttaatcgaacagcgtctggcacaggaagaagagaatgagaagctcagaggggatgccaggcaaaagctcccgatggaccttttagttttggaagacgagaagcaccacggggcacagagcgcggctttgcagaaagtgaaagggcaggaaagagtgcgcaagacaagtctggatctgcggagggagattatagatgttggcggaattcagaatctgattgagttgcgtaagaagagaaagcagaaaaagagagatgccctggctgccagtcatgagcccccaccagaacctgaagagattactgggccagtggacgaggagaccttcctaaaagcagccgttgaagggaaaatgaaggttattgaaaaattcctggccgacggaggcagcgctgacacctgtgatcagtttagaagaactgcgctacacagggcctccctagaaggccacatggaaattttggaaaagctcctggacaacggggctaccgtggatttccaagaccgtcttgactgcaccgcgatgcactgggcctgtcggggaggtcatttggaggtggttaagctgcttcagtcccacggagcagacactaatgtgcgcgacaaagagggggataccgccttacacgacgctgtgaggctgaacagatataaaataataaaattgctcttactccacggggcagatatgatgactaaaaacctggccggtaagaccccgacagacctcgtgcagctgtggcaggcagacaccagacatgctctagagcaccctgagcccggtgccgaacataacggactggagggtccaaatgactctggaagagaaactccccagcctgtgccagcacagtag

SEQ ID NO: 47111 - DNA, 984 bp, Artificial Sequence
  derived and/or modified sequence
atggccaaggcccccagctgggccggcgtgggcgccctggcctacaaggcccccgaggccctgtggcccgccgaggccgtgatggacggcaccatggaggacagcgaggccgtgcagagagccaccgccctgatcgagcagagactggcccaggaggaggagaacgagaagctgagaggcgacgccagacagaagctgcccatggacctgctggtgctggaggacgagaagcaccacggcgcccagagcgccgccctgcagaaggtgaagggccaggagagagtgagaaagaccagcctggacctgagaagagagatcatcgacgtgggcggcatccagaacctgatcgagctgagaaagaagagaaagcagaagaagagagacgccctggccgccagccacgagcccccccccgagcccgaggagatcaccggccccgtggacgaggagaccttcctgaaggccgccgtggagggcaagatgaaggtgatcgagaagttcctggccgacggcggcagcgccgacacctgcgaccagttcagaagaaccgccctgcacagagccagcctggagggccacatggagatcctggagaagctgctggacaacggcgccaccgtggacttccaggacagactggactgcaccgccatgcactgggcctgcagaggcggccacctggaggtggtgaagctgctgcagagccacggcgccgacaccaacgtgagagacaaggagggcgacaccgccctgcacgacgccgtgagactgaacagatacaagatcatcaagctgctgctgctgcacggcgccgacatgatgaccaagaacctggccggcaagacccccaccgacctggtgcagctgtggcaggccgacaccagacacgccctggagcaccccgagcccggcgccgagcacaacggcctggagggccccaacgacagcggcagagagaccccccagcccgtgcccgcccagtag

SEQ ID NO: 47112 - DNA, 903 bp, Artificial Sequence
  derived and/or modified sequence
atggacggcaccatggaggacagcgaggccgtgcagagagccaccgccctgatcgagcagagactggcccaggaggaggagaacgagaagctgagaggcgacgccagacagaagctgcccatggacctgctggtgctggaggacgagaagcaccacggcgcccagagcgccgccctgcagaaggtgaagggccaggagagagtgagaaagaccagcctggacctgagaagagagatcatcgacgtgggcggcatccagaacctgatcgagctgagaaagaagagaaagcagaagaagagagacgccctggccgccagccacgagcccccccccgagcccgaggagatcaccggccccgtggacgaggagaccttcctgaaggccgccgtggagggcaagatgaaggtgatcgagaagttcctggccgacggcggcagcgccgacacctgcgaccagttcagaagaaccgccctgcacagagccagcctggagggccacatggagatcctggagaagctgctggacaacggcgccaccgtggacttccaggacagactggactgcaccgccatgcactgggcctgcagaggcggccacctggaggtggtgaagctgctgcagagccacggcgccgacaccaacgtgagagacaaggagggcgacaccgccctgcacgacgccgtgagactgaacagatacaagatcatcaagctgctgctgctgcacggcgccgacatgatgaccaagaacctggccggcaagacccccaccgacctggtgcagctgtggcaggccgacaccagacacgccctggagcaccccgagcccggcgccgagcacaacggcctggagggccccaacgacagcggcagagagaccccccagcccgtgcccgcccagtag

SEQ ID NO: 47113 - protein, 276 aa, Artificial Sequence
  derived and/or modified sequence
MCMVIFAPHNEECKSHFHLLFAIFAFATCGGYSGGLRLSVDCVNKTESNLSIDIAFAYPFRLHQVTFEVPTCEGKERQKLALIGDSSSSAEFFVTVAVFAFLYSLAATVVYIFFQNKYRENNRGPLIDFIVTVVFSFLWLVGSSAWAKGLSDVKVATDPKEVLLLMSACKQPSNKCMAIHSPVMSSLNTSVVFGFLNFILWAGNIWFVFKETGWHSSGQRYLSDPMEKHSSSYNQGGYNQDSYGSSSGYSQQASLGPTSDEFGQQPTGPTSFTNQI

SEQ ID NO: 47114 - protein, 285 aa, Artificial Sequence
  derived and/or modified sequence
MDPVSQLASAGTFRVLKEPLAFLRALELLFAIFAFATCGGYSGGLRLSVDCVNKTESNLSIDIAFAYPFRLHQVTFEVPTCEGKERQKLALIGDSSSSAEFFVTVAVFAFLYSLAATVVYIFFQNKYRENNRGPLIDFIVTVVFSFLWLVGSSAWAKGLSDVKVATDPKEVLLLMSACKQPSNKCMAIHSPVMSSLNTSVVFGFLNFILWAGNIWFVFKETGWHSSGQRYLSDPMEKHSSSYNQGGYNQDSYGSSSGYSQQASLGPTSDEFGQQPTGPTSFTNQI

SEQ ID NO: 47115 - DNA, 858 bp, Artificial Sequence
  derived and/or modified sequence
atggaccccgtgagccagctggccagcgccggcaccttcagagtgctgaaggagcccctggccttcctgagagccctggagctgctgttcgccatcttcgccttcgccacctgcggcggctacagcggcggcctgagactgagcgtggactgcgtgaacaagaccgagagcaacctgagcatcgacatcgccttcgcctaccccttcagactgcaccaggtgaccttcgaggtgcccacctgcgagggcaaggagagacagaagctggccctgatcggcgacagcagcagcagcgccgagttcttcgtgaccgtggccgtgttcgccttcctgtacagcctggccgccaccgtggtgtacatcttcttccagaacaagtacagagagaacaacagaggccccctgatcgacttcatcgtgaccgtggtgttcagcttcctgtggctggtgggcagcagcgcctgggccaagggcctgagcgacgtgaaggtggccaccgaccccaaggaggtgctgctgctgatgagcgcctgcaagcagcccagcaacaagtgcatggccatccacagccccgtgatgagcagcctgaacaccagcgtggtgttcggcttcctgaacttcatcctgtgggccggcaacatctggttcgtgttcaaggagaccggctggcacagcagcggccagagatacctgagcgaccccatggagaagcacagcagcagctacaaccagggcggctacaaccaggacagctacggcagcagcagcggctacagccagcaggccagcctgggccccaccagcgacgagttcggccagcagcccaccggccccaccagcttcaccaaccagatctag

SEQ ID NO: 47116 - DNA, 858 bp, Artificial Sequence
  derived and/or modified sequence
atggatccagtttcccagttagcgagtgcaggcacgttcagagtccttaaggaacctcttgcttttcttcgcgctctggagctcctctttgctatcttcgccttcgcgacctgcggaggatattccggaggcctgcgcctgtcagtcgattgcgtgaataagacagagtccaacctcagtatcgacatcgccttcgcctatcctttccgcctacatcaggtcacttttgaagtgccaacctgtgagggtaaagaaaggcagaaactggcactcatcggggacagctcatcctccgccgaattctttgttacagtggccgtttttgctttcttgtacagtctggcagctacagtggtctatatcttttttcaaaacaagtaccgcgagaataaccgcggccctctcattgactttatcgtgacagtggtcttctcattcctgtggttggtcggctcttctgcgtgggcgaagggactgagtgatgtgaaggttgctacggacccaaaggaggtcttattgctcatgagcgcctgtaagcagcctagtaacaagtgtatggctattcattctcccgtgatgtctagtctaaacacttccgttgtgtttggattcttaaacttcatactgtgggccggcaatatttggttcgtgttcaaagagactgggtggcacagctccggccagcgttacttatcagatccaatggagaagcactctagctcatataatcaaggaggctacaatcaggactcatatgggtcctcttccggctattcccagcaggctagcctcggacccacaagcgatgaattcggacagcagccgacaggaccgactagctttactaaccagatatag

SEQ ID NO: 47117 - DNA, 858 bp, Artificial Sequence
  derived and/or modified sequence
atggaccctgtgtcccagctggccagcgctggcaccttccgggtgctgaaggagcccctggccttcctgcgggccctggagctgctgtttgccatctttgcctttgccacctgtggcggctacagcggcggcctgcggctgtctgtggactgtgtgaacaagacagagagcaacctgagcattgatattgcctttgcctaccccttccggctgcaccaggtgacctttgaggtgcccacctgtgagggcaaggagcggcagaagctggccctgattggagacagcagcagcagcgctgagttctttgtgacagtggccgtgtttgccttcctgtacagcctggccgccaccgtggtgtacatcttcttccagaacaagtaccgggagaacaacagaggccccctgattgacttcatcgtgacagtggtgttctccttcctgtggctggtgggcagcagcgcctgggccaagggcctgagtgatgtgaaggtggccacagaccccaaggaggtgctgctgctgatgtctgcctgcaagcagcccagcaacaagtgcatggccatccacagccctgtgatgagcagcctgaacacctctgtggtgtttggcttcctgaacttcatcctgtgggccggcaacatctggtttgtgttcaaggagaccggctggcacagcagcggccagcgctacctgagtgaccccatggagaagcacagcagcagctacaaccagggcggctacaaccaggacagctatggcagcagcagcggctacagccagcaggccagcctgggccccaccagtgatgaatttggccagcagcccaccggccccaccagcttcaccaaccagatctag

SEQ ID NO: 47118 - DNA, 858 bp, Artificial Sequence
  derived and/or modified sequence
atggaccccgtgagccagctggccagcgccggcaccttccgggtgctcaaggaaccgttagctttcctccgcgccctggagctgctatttgcaatcttcgcctttgcaacctgtggcggctactccggcggcctgaggcttagcgtcgactgtgtgaataaaacggagtcgaatctcagcattgatattgcattcgcatatccttttaggcttcaccaggttacctttgaagtgcccacctgtgaaggaaaggagagacaaaaacttgccctgataggtgactcatccagttctgccgagtttttcgttactgtggctgtgttcgccttcctttattctctggccgccaccgtcgtctatattttctttcaaaacaagtatcgcgaaaacaatagaggtccgttgatcgatttcattgtaactgtggtgttcagcttcctatggctggttggatcaagcgcttgggccaaaggtctctcagatgtgaaggtggccacagatcccaaggaagtgctactgcttatgtccgcttgcaagcagccatcaaataaatgcatggctatccactcaccggtgatgtcttccctaaacaccagcgtcgtgttcggattcctcaattttatcctctgggcagggaacatatggtttgtttttaaagagaccggctggcacagctcagggcaacggtatctctccgacccaatggagaaacacagctcgtcgtacaaccagggcggctataaccaggatagttatggctcttcatccgggtacagccagcaggcctcactggggccaacctcagatgaatttggacagcagcccacagggccaacttcgttcactaatcagatctag

SEQ ID NO: 47119 - DNA, 858 bp, Artificial Sequence
  derived and/or modified sequence
atggaccctgtgtctcaattggcgtcggcgggaacattccgcgtgcttaaggagcccctggcctttctgagagctctagaattactgttcgcaatctttgcgtttgccacatgcggaggatacagtgggggtctgaggcttagcgtcgattgtgtgaacaagacagagagcaacctctcgatcgatatcgcattcgcgtacccctttaggttacaccaggtaacgttcgaggtaccgacgtgcgagggaaaggaacgccaaaagttggccttgatcggagactccagttccagcgctgagttcttcgtgactgtggcagtgtttgccttcctctattcactggccgcaaccgtggtgtacatcttcttccagaacaagtaccgagagaataaccggggacctctcatagatttcatcgtgaccgtggttttttcttttctctggctggttggtagctctgcctgggcaaaagggttgtctgacgtcaaggttgccaccgacccaaaggaggttctcttgctgatgtccgcatgtaaacagccaagtaataaatgtatggctatccacagccctgtcatgagcagcctgaatacatctgtggtgttcgggttcctaaattttatcctctgggcgggaaatatctggtttgtatttaaagagactggatggcactcttcaggtcagcggtatctctcagatcccatggagaaacactcgagctcatacaaccagggcggatacaaccaggactcatacggctcctcttccgggtacagtcagcaggctagcctggggccaaccagtgatgaattcggtcagcaacctactggtcctactagttttaccaaccagatttag

SEQ ID NO: 47120 - DNA, 2709 bp, Artificial Sequence
  derived and/or modified sequence
aagtttccccggagccagagggcaccgggcgcacggctgagcctgcaccaatgtctgtgggccctgcctcgcccacctcctcgccctcccctctggagcgcggctggccaatgacagccttcccctggctccatgggtttccccctcccctgttgtatctaccctgccccagctcttccctgcccacccctcgctgactcgcttcgcttccccgacgcgctgggttcccggagcgcagagcccagcgttagcgggtgggctccccgaggccccctgccctcgccgggctgctccagggtgtcgctcctctggctgctcccgaaggggcttctggccctgaggacggtggtgccaagcgaacttcatttttaaaaagaactggtggatgagaagagcgagcgagggcgagctatggaccctgtgagtcagctggcctctgcgggcaccttccgggtgctgaaggagccccttgccttcctgcgagccctggaattgctttttgcaatctttgcatttgcaacatgcggtggctattctggaggcctgcggctgagtgtggactgcgtcaacaagacagaaagtaacctcagcatcgacatagcgtttgcctacccattcaggttgcaccaggtgacgtttgaggtgcccacctgcgagggaaaggaacggcagaagctggcattgattggtgactcctcgtcttcagcagagttcttcgtcactgttgctgtcttcgccttcctctactctttggctgccactgtcgtttacattttcttccagaacaaataccgggaaaacaaccggggcccactcattgacttcattgtcactgtagtcttttcgttcttgtggttggtgggttcatcagcttgggcaaaaggactgtctgacgtcaaagttgcaacggatcccaaggaagtattgctactaatgtcagcttgcaaacagccatccaacaaatgcatggctatccacagccctgttatgtcaagcttaaacacttctgtggtctttggattcttgaactttattctctgggctggaaacatatggtttgttttcaaggagaccggctggcattcttcgggacagagatatctttcagatccaatggagaagcactccagcagctataatcaaggtggttacaaccaagacagctatggatcaagcagtgggtacagtcagcaggcgagtttggggccaacctcagatgagtttggccaacagcctactggccccacttcctttaccaatcagatttaacagagtagcatttgcattcttctgcagtcgcctcaccatcttccatttcagtggcagaagaattttttaagggtttcaatcaattattaatgcagagagtattgaatgtaaatcagagctctctagtcttcattaaggcagcaagtcctgggttgtgaaaaatgatacttagagatgaggcgacatgaggagatatattattcatcatagatggctaattggagagtaccttgttatatatacagatactttcatggtcattttgtatgtatgttaaagtagtagaagtattttgtagcttaaagtctctagtatgtaatatgcataaagtaaatcaaatagcgttgagttttcttatgcattttgatgtgaaagatgttataataatttctagaagacaatttggtgtatcacaacatgcatgtcttatttttttttagttttaagtcctataggactatgagtctctaagttatttgtttcagaaaattattctttttttatgtgataaatcatatgatttaagtgcatgaataagcattttcccacacaatgaacatttgaactgtgtttatgaaaattttctggtttgcaccatgaatttgtcaaatggatatttataggaatatattcactactttgtatactttgcaaatttgtctctctggctttacccaagttctgaatgcattgtaattaaaatttaagtttttcttttcccccattagtaaacatttagtgctacatatgataactgcccaatatttattctatttacttagctaaatatttgcattcttgtaaccttctatggtgttttgtggctcttatcttgtggaccataaataacacggcccaataactctttgtgtttatggagtgttgttttcttagaataatggagatgcagatatagataccatagtcaaggtaccgccttgctgaagtatttatttataaagaatattctgtagaacctctactaccagctatatttttaaatcctgtttatttgtaaagctaatatgctcctcaatgtaattattaaaaattctcaagtcacagctaaacttactaattctgattttagtgtagcccctaaattaaaaatggcttccatatgccactctgtaccccaaagagagttctcatgaaatattctccagaatgtattcattatcaagaaaatgtcaatcgtcacttcctcgttttaactcagctgaaacaccaggacccaatagagagggcaagctgagcatctgtatttccagataaaagttgttattgatgtataaactcgttgcgtgattagtgatgttggaagcattttagcacaaaacagccttgtgtcttagatgatatctgtaaccagtttctgaatcccgttggataaaactgtattgtgatatctatttgatgttaataaagttattgcataca

SEQ ID NO: 47121 - protein, 914 aa, Artificial Sequence
  derived and/or modified sequence
MDHYDSQQTNDYMQPEEDWDRDLLLDPAWEKQQRKTFTAWCNSHLRKAGTQIENIEEDFRDGLKLMLLLEVISGERLAKPERGKMRVHKISNVNKALDFIASKGVKLVSIGAEEIVDGNVKMTLGMIWTIILRFAIQDISVEETSAKEGLLLWCQRKTAPYKNVNIQNFHISWKDGLGFCALIHRHRPELIDYGKLRKDDPLTNLNTAFDVAEKYLDIPKMLDAEDIVGTARPDEKAIMTYVSSFYHAFSGAQKAETAANRICKVLAVNQENEQLMEDYEKLASDLLEWIRRTIPWLENRVPENTMHAMQQKLEDFRDYRRLHKPPKVQEKCQLEINFNTLQTKLRLSNRPAFMPSEGRMVSDINNAWGCLEQVEKGYEEWLLNEIRRLERLDHLAEKFRQKASIHEAWTDGKEAMLRQKDYETATLSEIKALLKKHEAFESDLAAHQDRVEQIAAIAQELNELDYYDSPSVNARCQKICDQWDNLGALTQKRREALERTEKLLETIDQLYLEYAKRAAPFNNWMEGAMEDLQDTFIVHTIEEIQGLTTAHEQFKATLPDADKERLAILGIHNEVSKIVQTYHVNMAGTNPYTTITPQEINGKWDHVRQLVPRRDQALTEEHARQQHNERLRKQFGAQANVIGPWIQTKMEEIGRISIEMHGTLEDQLSHLRQYEKSIVNYKPKIDQLEGDHQLIQEALIFDNKHTNYTMEHIRVGWEQLLTTIARTINEVENQILTRDAKGISQEQMNEFRASFNHFDRDHSGTLGPEEFKACLISLGYDIGNDPQKKTGMMDTDDFRACLISMGYNMGEAEFARIMSIVDPNRLGVVTFQAFIDFMSRETADTDTADQVMASFKILAGDKNYITMDELRRELPPDQAEYCIARMAPYTGPDSVPGALDYMSFSTALYGESDL

SEQ ID NO: 47122 - DNA, 2745 bp, Artificial Sequence
  derived and/or modified sequence
atggatcattacgattcacagcagaccaatgattatatgcagccagaggaagattgggatagggatctcctcctggaccctgcctgggagaagcagcagcgcaaaacatttacagcgtggtgtaattcacatctgcggaaggcgggtacccaaattgagaacatagaagaggattttagggatggccttaaattaatgctgctgcttgaagtcatcagcggcgagcgtttagcaaagccggagcgcggaaagatgagagtgcacaagatcagcaacgtcaacaaggctcttgactttattgcatctaaaggcgttaagcttgtttctatcggtgccgaggagattgtggatggaaatgtgaagatgactctgggcatgatctggacaatcatcctccgatttgctatacaggacatcagcgttgaagagaccagcgctaaagaagggctgttgctctggtgccagcggaaaactgccccctataaaaacgttaacatccaaaacttccacatctcttggaaagatggactgggtttttgtgcccttatacatcggcacagaccagaacttatcgattacggcaaactccggaaggatgacccgttgaccaatctgaacaccgcattcgacgtcgctgagaaatatctggatatacccaaaatgctggatgctgaggatatcgtcgggacagcgaggcccgacgagaaagcgatcatgacctatgtcagctccttctatcatgccttcagcggcgctcaaaaagctgagactgccgctaaccgaatatgtaaagttctggccgtgaaccaggaaaacgagcaacttatggaagattatgagaaactagcctcagatctgctggaatggatcagaagaacaatcccttggctagagaacagggtcccagaaaatacgatgcacgcaatgcagcaaaagttggaggattttcgcgattacagacgattgcacaagccaccaaaagttcaggaaaaatgtcagctggaaatcaactttaacaccttacagacgaaactgaggctgagcaatcgccccgcgttcatgccttccgagggcaggatggtctctgacatcaacaacgcttggggatgtttggagcaggtcgagaagggctatgaggagtggcttcttaacgagattcggcgcctggagagactggatcatctcgctgaaaagtttcgtcaaaaggcttccatccacgaggcatggacagacggtaaggaagccatgctacgccagaaggattatgagacagcgacattgagcgagataaaggctttactcaagaaacacgaggcgttcgaatcagatctggcagcccaccaagatagggtcgagcagattgcagcaattgctcaggagctaaatgagcttgattattatgactccccaagcgtgaacgcgagatgtcaaaaaatttgcgatcaatgggataatttgggcgctctgactcagaaacgtcgtgaggccttagagcgcaccgagaaactgctggagaccatcgatcagctctatttggagtatgccaaaagggcagccccctttaacaactggatggagggcgccatggaggatcttcaggacacctttattgtgcacacgatcgaggagatacaggggctgacaacagctcacgaacagtttaaggccacattgcctgacgctgataaggaacggttagccatcctcgggatccacaatgaggtgtcaaaaatcgtccaaacgtatcatgtgaatatggccggaaccaacccatacacaactatcactccccaagagattaatggcaagtgggatcacgtgcgccagctggtcccacgtagagaccaggccctgaccgaggaacacgccaggcaacagcacaacgagcggctcagaaagcagttcggcgcccaggcaaatgtcattggaccttggattcagaccaaaatggaggaaatcggacgcattagcatcgaaatgcatggcaccctggaggaccagctctcccacctgcgccaatacgagaaaagtatcgtcaattacaagcctaagattgatcagctcgagggggatcaccaactcatacaggaagcactgatcttcgataacaagcatacaaactacacgatggagcatatcagagtgggttgggaacagcttctcacaactatagcgcgcacaattaatgaagtcgagaatcaaatcctgacccgtgatgctaagggaatctcccaagaacaaatgaacgaatttagagcctcctttaaccactttgatagggaccactcgggcaccctggggcccgaagagttcaaagcctgcttgatcagccttggctatgacatcgggaacgacccgcaaaagaagaccggcatgatggataccgacgactttcgggcttgtttgatctccatgggttacaacatgggagaggccgaatttgctcgcatcatgtcaatcgtggatccgaatcgactgggcgtggtcaccttccaggcattcatcgactttatgagcagggaaaccgccgacacagataccgccgaccaggtcatggcctctttcaaaattctggcgggtgataagaactatatcacaatggatgaactgagaagggagctcccccctgaccaggcggagtactgcattgctagaatggctccatacacgggaccagattccgttccaggagccctcgattacatgagcttctcaactgctctgtatggtgagtcggatctatag

SEQ ID NO: 47123 - DNA, 2745 bp, Artificial Sequence
  derived and/or modified sequence
atggaccactatgacagccagcagaccaatgactacatgcagcctgaggaggactgggaccgggacctgctgctggaccctgcctgggagaagcagcagaggaagaccttcaccgcctggtgcaacagccacctgaggaaggccggcacccagattgaaaatattgaggaggacttcagagatggcctgaagctgatgctgctgctggaggtgatctctggagagcggctggccaagccagagcggggcaagatgagggtgcacaagatcagcaatgtgaacaaggccctggacttcatcgccagcaaaggagtgaagctggtgtccatcggggctgaggagatcgtggatggaaatgtgaagatgaccctgggcatgatctggaccatcatcctgcgctttgccatccaggacatctctgtggaggagaccagcgccaaggagggcctgctgctgtggtgccagaggaagacagccccctacaagaatgtgaacatccagaacttccacatctcctggaaggatggcctgggcttctgtgccctgatccaccgccacaggcctgagctgattgattatggcaagctgaggaaggatgaccccctgaccaacctgaacacagcctttgatgtggccgagaagtacctggacatccccaagatgctggatgctgaagatattgtgggcacagcccggccagatgagaaggccatcatgacctacgtgagcagcttctaccacgccttcagcggggcccagaaggccgagacagctgccaaccgcatctgcaaggtgctggccgtgaaccaggagaatgagcagctgatggaggactatgagaagctggccagtgacctgctggagtggatccggaggaccatcccctggctggagaacagagtgcctgagaacaccatgcacgccatgcagcagaagctggaggacttccgggactaccgccgcctgcacaagccacccaaggtgcaggagaagtgccagctggagatcaacttcaacaccctgcagaccaagctgcggctgagcaacagacctgccttcatgcccagcgagggccgcatggtgtctgacatcaacaatgcctggggctgcctggagcaggtggagaagggctatgaggagtggctgctgaatgagatccggcggctggagcggctggaccacctggccgagaagttccggcagaaggccagcatccacgaggcctggacagatggcaaggaggccatgctgcggcagaaggactatgaaacagccaccctgtctgagatcaaggccctgctgaagaagcatgaggcctttgaaagtgacctggccgcccaccaggacagagtggagcagattgctgccatcgcccaggagctgaatgagctggactactatgacagccccagcgtgaatgcccgctgccagaagatctgtgaccagtgggacaacctgggcgccctgacccagaagagaagagaggccctggagaggacagagaagctgctggagaccatcgaccagctgtacctggagtatgccaagagagctgcccccttcaacaactggatggagggcgccatggaggacctgcaggacaccttcatcgtgcacaccatcgaggagatccagggcctgaccacagcccacgagcagttcaaggccaccctgcctgatgctgacaaggagcggctggccatcctgggcatccacaatgaggtgtccaagatcgtgcagacctaccacgtgaacatggccggcaccaacccctacaccaccatcaccccccaggagatcaatggcaagtgggaccacgtgcggcagctggtgccccggcgggaccaggccctgacagaggagcacgcccggcagcagcacaatgaaaggctgaggaagcagtttggagcccaggccaacgtcatcggcccctggatccagaccaagatggaggagatcggccgcatcagcattgagatgcacggcaccctggaggaccagctgagccacctgcggcagtatgagaagagcatcgtgaactacaagcccaagattgaccagctggagggggaccaccagctgatccaggaggccctgatctttgacaacaagcacaccaactacaccatggagcacatccgggtgggctgggagcagctgctgaccaccatcgcccggaccatcaatgaggtggagaaccagatcctgaccagagatgccaagggcatcagccaggagcagatgaatgagttccgggccagcttcaaccactttgaccgggaccacagcggcaccctgggccctgaggagttcaaggcctgcctgatcagcctgggctatgacattggaaatgacccccagaagaagacaggcatgatggacacagatgacttccgggcctgcctgatctccatgggctacaacatgggagaggccgagtttgcccgcatcatgagcatcgtggaccccaaccggctgggcgtggtgaccttccaggccttcatcgacttcatgagccgggagacagctgacacagacacagctgaccaggtgatggccagcttcaagatcctggccggggacaagaactacatcaccatggatgagctgcggcgggagctgcccccagaccaggccgagtactgcatcgccaggatggccccctacacaggccctgacagcgtgcctggggccctggactacatgtccttcagcacagccctgtatggagagagtgacctgtag

SEQ ID NO: 47124 - DNA, 3464 bp, Artificial Sequence
  derived and/or modified sequence
cgctgtcgccgccagtagcagccttcgccagcagcgccgcggcggaaccgggcgcaggggagcgagcccggccccgccagcccagcccagcccagccctactccctccccacgccagggcagcagccgttgctcagagagaaggtggaggaagaaatccagaccctagcacgcgcgcaccatcatggaccattatgattctcagcaaaccaacgattacatgcagccagaagaggactgggaccgggacctgctcctggacccggcctgggagaagcagcagagaaagacattcacggcatggtgtaactcccacctccggaaggcggggacacagatcgagaacatcgaagaggacttccgggatggcctgaagctcatgctgctgctggaggtcatctcaggtgaacgcttggccaagccagagcgaggcaagatgagagtgcacaagatctccaacgtcaacaaggccctggatttcatagccagcaaaggcgtcaaactggtgtccatcggagccgaagaaatcgtggatgggaatgtgaagatgaccctgggcatgatctggaccatcatcctgcgctttgccatccaggacatctccgtggaagagacttcagccaaggaagggctgctcctgtggtgtcagagaaagacagccccttacaaaaatgtcaacatccagaacttccacataagctggaaggatggcctcggcttctgtgctttgatccaccgacaccggcccgagctgattgactacgggaagctgcggaaggatgatccactcacaaatctgaatacggcttttgacgtggcagagaagtacctggacatccccaagatgctggatgccgaagacatcgttggaactgcccgaccggatgagaaagccatcatgacttacgtgtctagcttctaccacgccttctctggagcccagaaggcggagacagcagccaatcgcatctgcaaggtgttggccgtcaaccaggagaacgagcagcttatggaagactacgagaagctggccagtgatctgttggagtggatccgccgcacaatcccgtggctggagaaccgggtgcccgagaacaccatgcatgccatgcaacagaagctggaggacttccgggactaccggcgcctgcacaagccgcccaaggtgcaggagaagtgccagctggagatcaacttcaacacgctgcagaccaagctgcggctcagcaaccggcctgccttcatgccctctgagggcaggatggtctcggacatcaacaatgcctggggctgcctggagcaggtggagaagggctatgaggagtggttgctgaatgagatccggaggctggagcgactggaccacctggcagagaagttccggcagaaggcctccatccacgaggcctggactgacggcaaagaggccatgctgcgacagaaggactatgagaccgccaccctctcggagatcaaggccctgctcaagaagcatgaggccttcgagagtgacctggctgcccaccaggaccgtgtggagcagattgccgccatcgcacaggagctcaatgagctggactattatgactcacccagtgtcaacgcccgttgccaaaagatctgtgaccagtgggacaatctgggggccctaactcagaagcgaagggaagctctggagcggaccgagaaactgctggagaccattgaccagctgtacttggagtatgccaagcgggctgcacccttcaacaactggatggagggggccatggaggacctgcaggacaccttcattgtgcacaccattgaggagatccagggactgaccacagcccatgagcagttcaaggccaccctccctgatgccgacaaggagcgcctggccatcctgggcatccacaatgaggtgtccaagattgtccagacctaccacgtcaatatggcgggcaccaacccctacacaaccatcacgcctcaggagatcaatggcaaatgggaccacgtgcggcagctggtgcctcggagggaccaagctctgacggaggagcatgcccgacagcagcacaatgagaggctacgcaagcagtttggagcccaggccaatgtcatcgggccctggatccagaccaagatggaggagatcgggaggatctccattgagatgcatgggaccctggaggaccagctcagccacctgcggcagtatgagaagagcatcgtcaactacaagccaaagattgatcagctggagggcgaccaccagctcatccaggaggcgctcatcttcgacaacaagcacaccaactacaccatggagcacatccgtgtgggctgggagcagctgctcaccaccatcgccaggaccatcaatgaggtagagaaccagatcctgacccgggatgccaagggcatcagccaggagcagatgaatgagttccgggcctccttcaaccactttgaccgggatcactccggcacactgggtcccgaggagttcaaagcctgcctcatcagcttgggttatgatattggcaacgacccccagaagaagacaggcatgatggacacggatgatttccgcgcctgcctgatctccatgggttacaacatgggagaagcagaatttgcccgcatcatgagcattgtggaccccaaccgcctgggggtagtgacattccaggccttcattgacttcatgtcccgcgagacagccgacacagatacagcagaccaagtcatggcttccttcaagatcctggctggggacaagaactacattaccatggacgagctgcgccgcgagctgccacccgaccaggctgagtactgcatcgcgcggatggccccctacaccggccccgactccgtgccaggtgctctggactacatgtccttctccacggcgctgtacggcgagagtgacctctaatccaccccgcccggccgccctcgtcttgtgcgccgtgccctgccttgcacctccgccgtcgcccatctcctgcctgggttcggtttcagctcccagcctccacccgggtgagctggggcccacgtggcatcgatcctccctgcccgcgaagtgacagtttacaaaattattttctgcaaaaaagaaaaaaaagttacgttaaaaaccaaaaaactacatattttattatagaaaaagtattttttctccaccagacaaatggaaaaaaagaggaaagattaactatttgcaccgaaatgtcttgttttgttgcgacataggaaaataaccaagcacaaagttatattccatcctttttactgatttttttttcttctatctgttccatctgctgtattcatttctccaatctcatgtccattttggtgtgggagtcggggtagggggtactcttgtcaaaaggcacattggtgcatgtgtgtttgctagctcacttgtccatgaaaatattttatgatattaaagaaaatcttttg

SEQ ID NO: 47125 - DNA, 2745 bp, Artificial Sequence
  derived and/or modified sequence
atggaccactacgacagccagcagaccaacgactacatgcagcccgaggaggactgggatcgtgacctgctgttggatcctgcctgggaaaagcagcagcgaaaaacttttaccgcctggtgcaatagtcacttacggaaggctggcacacaaatcgagaatatagaggaggattttcgggatggattgaagttaatgctactcctagaagtaatctcaggcgagaggcttgccaagcctgagcgaggtaaaatgagagtccataaaattagtaatgtaaataaagccctggactttattgcctcgaagggggttaaactggtgagtatcggcgccgaggagatagtggatggcaacgtgaaaatgacactgggcatgatttggacaatcattctacggttcgcaatccaggacataagcgtcgaggaaaccagcgctaaggaaggcctcctgctttggtgccaacgcaaaacagccccgtacaaaaacgtgaatatacaaaattttcatattagctggaaagatggcctcgggttctgcgccctcattcatagacacagaccagagctgatcgattacggcaagctccggaaggacgaccctctgaccaatctgaatacagcctttgatgtggcagagaagtacctggacatccccaaaatgctcgatgctgaagacatagtgggcaccgcccgcccagatgaaaaagccattatgacctatgtgtcatctttttaccacgcattcagcggtgctcaaaaggccgaaactgcggctaatcgaatatgtaaagttctggctgtcaatcaggaaaacgagcagctgatggaggattatgagaagctggcctctgacctgctggagtggataaggcgaactataccctggttggagaaccgagttccagaaaacactatgcacgccatgcagcaaaaactggaagattttcgtgactatagaagactgcacaagcctcccaaggtgcaggagaagtgccagctagagatcaatttcaatacactgcagacaaagctgagactgagcaatagaccggcctttatgcctagcgaaggccgaatggtctcagacataaataacgcatggggttgcctggagcaggtagaaaagggctatgaagaatggctgttgaatgaaattcggcggcttgagcgactagatcatctcgctgagaagttccgacaaaaggcgtcaatccatgaagcgtggacagatggcaaggaggcaatgctgcggcagaaggattacgaaactgcaaccctatccgaaatcaaagccctcctaaagaagcatgaggctttcgagtctgacctggcggctcaccaggaccgcgtggagcaaattgcagcaatcgcacaggagctgaatgaacttgactattacgattctccgtcagtgaacgccagatgtcagaagatatgcgatcagtgggacaatctgggtgcgctgacccagaagcgtagggaggctttggaacgaacagaaaaactgctggagactattgaccagctttacctggaatatgcaaaacgggcagcccctttcaacaactggatggaaggagccatggaagacttacaggatactttcatagtccacaccattgaggagatccaggggctcactaccgcacacgagcagttcaaggccacattgcccgacgcagataaagagcggctggccatactgggtatccacaacgaagtgtccaagattgtgcagacctaccacgtgaatatggcaggaactaacccatacacaactattacacctcaggagatcaatgggaagtgggaccacgtgcgccaactggtgccacgacgcgatcaagctctcacagaagagcacgccaggcaacagcacaatgaaaggctcaggaagcaatttggggcacaggccaatgtaatcggcccctggattcagaccaaaatggaggaaattggtagaatttcaatcgagatgcacggcactctggaggatcaactgtcccatctgaggcagtacgaaaagagcatcgttaactacaaacccaagatcgatcagctcgaaggagaccaccagctgattcaggaggcactcatcttcgataataagcacacgaattatacgatggagcatataagggtggggtgggaacagttgctgacaactatcgcacgtacaattaatgaagtcgaaaaccaaatcctcacaagggacgcaaaaggtatttcgcaggagcaaatgaacgaattccgagctagcttcaaccactttgatagagatcattccggtacactggggcccgaagaatttaaagcatgtcttatcagtctcgggtatgacataggtaacgatcctcagaaaaaaacgggtatgatggacaccgacgactttcgggcatgtctgatatccatgggctacaacatgggagaggcggaatttgctaggattatgagcatcgtcgatccaaaccgtcttggcgtggtgacatttcaggccttcatagatttcatgagcagagagactgcggatactgacactgcagatcaggttatggctagttttaagatcctcgccggagataagaactatatcaccatggatgagctgagaagggagctccctcctgaccaagccgagtattgtattgcacggatggcaccatatacgggaccggattcggtcccaggggctttggattatatgtccttcagcacagctctttacggcgagtccgatttatag

SEQ ID NO: 47126 - DNA, 2745 bp, Artificial Sequence
  derived and/or modified sequence
atggatcattacgattcccaacagacgaatgactacatgcagcctgaggaagattgggacagggatctgcttctcgatcctgcttgggagaaacagcagaggaaaacctttacagcctggtgtaattcccacctgcgcaaagcaggcacccaaattgaaaacatagaggaagacttccgggacggactcaagttgatgctcctgctcgaggttatttctggggaacggttggccaaacctgaacgcggaaagatgagagttcataagatttccaatgtcaataaagctcttgattttattgcttccaagggagtaaaactggttagtattggcgctgaagagatcgttgatgggaacgtgaagatgaccctgggcatgatatggacaatcattctacgtttcgccatccaggacatttccgtagaagagaccagcgccaaggaaggcctgcttctgtggtgccagcggaagacagccccatacaaaaacgttaatattcagaactttcacatcagttggaaagacggcctcggcttctgcgccctgatccaccggcaccgccctgagctgatcgactatggtaagctccggaaagacgacccactcaccaatctcaacacagcattcgatgtggctgaaaaatacttggatattccaaaaatgctggacgcagaagacattgtgggcaccgcccgaccagatgaaaaagccattatgacgtacgtgtcatctttctatcatgccttctccggcgctcagaaagcagagaccgcagcaaatagaatttgcaaggtgctggctgtaaaccaggagaatgaacagctgatggaagactacgagaagctggcctcagacctgctagagtggatccgtcggacaatcccctggttggagaatagggtgcccgagaacacaatgcacgccatgcagcagaaactcgaggactttcgggactatcgaaggttgcacaaaccgcctaaagtccaagaaaaatgtcagctggagatcaactttaatactctgcagaccaaattgcgcctctccaaccgacctgctttcatgccgagcgagggaagaatggtgagcgatatcaataatgcatggggctgcttagaacaggtcgaaaagggctacgaagagtggttactcaacgaaattaggcgtctggagcgccttgaccacctcgccgaaaaattcagacaaaaggcctccatacacgaggcttggacggatggcaaagaagctatgctccggcagaaagactacgagaccgcaaccctgagcgagatcaaagcgctcctcaaaaaacacgaggcctttgaatccgaccttgccgctcaccaggaccgggtggagcagattgccgctattgcgcaggagctgaatgaactagactattacgactctccatccgtcaatgcacgctgtcagaaaatatgcgaccaatgggacaatcttggcgcacttacccaaaagcgccgtgaggcccttgagcggaccgaaaaactgctcgaaacgattgatcagctgtacttggagtatgccaaaagggccgcacccttcaataactggatggagggggctatggaagatctccaggataccttcatcgtccacacgatcgaagaaatccagggacttacgaccgcccacgaacagttcaaagcgactctgcctgatgcagacaaggaacgtttggccattctgggtatccacaacgaagttagcaagattgtccaaacctaccatgttaatatggctggaactaatccttataccactataacgccccaggaaattaacggcaagtgggatcatgtccggcagctggtgccccgtcgagaccaggctctgaccgaagagcatgccagacagcaacataacgagcgtctgagaaaacaattcggtgctcaagcaaacgtgatcggcccatggatacagactaagatggaagaaataggtagaatctctatagagatgcacggaaccctcgaggaccagctcagtcatctgcgccagtatgagaagtctatcgtcaattataaacctaaaattgaccagcttgaaggagaccaccagctgatccaggaggcgctgatttttgacaacaaacacaccaattacaccatggagcacattagggtgggatgggagcagcttctcactactatcgccaggaccatcaatgaagtagagaaccagatcctgacgcgagacgctaaaggcataagccaggagcaaatgaatgaattccgtgcctcctttaatcatttcgatagagatcatagcggaaccctaggtcctgaggagttcaaggcctgtctcatttccttaggctacgacattggcaatgacccccaaaagaagactggcatgatggatactgatgactttagagcatgtctcatctccatggggtataacatgggcgaagcagaatttgccagaatcatgtctatcgttgatcccaacaggctgggcgttgtcacatttcaggccttcatcgacttcatgagcagggagaccgcagacactgacaccgccgatcaggtgatggcctcttttaaaatccttgcaggagacaagaactacatcactatggatgagctgcggagagaactccctcctgatcaggccgagtactgcatcgccagaatggctccctacaccggacctgactccgtcccgggagctcttgattatatgtctttctccacagccctgtacggggagtctgatctttag

SEQ ID NO: 47127 - DNA, 2745 bp, Artificial Sequence
  derived and/or modified sequence
atggaccactacgacagccagcagaccaacgactacatgcagcccgaggaggactgggacagagacctgctgctggaccccgcctgggagaagcagcagagaaagaccttcaccgcctggtgcaacagccacctgagaaaggccggcacccagatcgagaacatcgaggaggacttcagagacggcctgaagctgatgctgctgctggaggtgatcagcggcgagagactggccaagcccgagagaggcaagatgagagtgcacaagatcagcaacgtgaacaaggccctggacttcatcgccagcaagggcgtgaagctggtgagcatcggcgccgaggagatcgtggacggcaacgtgaagatgaccctgggcatgatctggaccatcatcctgagattcgccatccaggacatcagcgtggaggagaccagcgccaaggagggcctgctgctgtggtgccagagaaagaccgccccctacaagaacgtgaacatccagaacttccacatcagctggaaggacggcctgggcttctgcgccctgatccacagacacagacccgagctgatcgactacggcaagctgagaaaggacgaccccctgaccaacctgaacaccgccttcgacgtggccgagaagtacctggacatccccaagatgctggacgccgaggacatcgtgggcaccgccagacccgacgagaaggccatcatgacctacgtgagcagcttctaccacgccttcagcggcgcccagaaggccgagaccgccgccaacagaatctgcaaggtgctggccgtgaaccaggagaacgagcagctgatggaggactacgagaagctggccagcgacctgctggagtggatcagaagaaccatcccctggctggagaacagagtgcccgagaacaccatgcacgccatgcagcagaagctggaggacttcagagactacagaagactgcacaagccccccaaggtgcaggagaagtgccagctggagatcaacttcaacaccctgcagaccaagctgagactgagcaacagacccgccttcatgcccagcgagggcagaatggtgagcgacatcaacaacgcctggggctgcctggagcaggtggagaagggctacgaggagtggctgctgaacgagatcagaagactggagagactggaccacctggccgagaagttcagacagaaggccagcatccacgaggcctggaccgacggcaaggaggccatgctgagacagaaggactacgagaccgccaccctgagcgagatcaaggccctgctgaagaagcacgaggccttcgagagcgacctggccgcccaccaggacagagtggagcagatcgccgccatcgcccaggagctgaacgagctggactactacgacagccccagcgtgaacgccagatgccagaagatctgcgaccagtgggacaacctgggcgccctgacccagaagagaagagaggccctggagagaaccgagaagctgctggagaccatcgaccagctgtacctggagtacgccaagagagccgcccccttcaacaactggatggagggcgccatggaggacctgcaggacaccttcatcgtgcacaccatcgaggagatccagggcctgaccaccgcccacgagcagttcaaggccaccctgcccgacgccgacaaggagagactggccatcctgggcatccacaacgaggtgagcaagatcgtgcagacctaccacgtgaacatggccggcaccaacccctacaccaccatcaccccccaggagatcaacggcaagtgggaccacgtgagacagctggtgcccagaagagaccaggccctgaccgaggagcacgccagacagcagcacaacgagagactgagaaagcagttcggcgcccaggccaacgtgatcggcccctggatccagaccaagatggaggagatcggcagaatcagcatcgagatgcacggcaccctggaggaccagctgagccacctgagacagtacgagaagagcatcgtgaactacaagcccaagatcgaccagctggagggcgaccaccagctgatccaggaggccctgatcttcgacaacaagcacaccaactacaccatggagcacatcagagtgggctgggagcagctgctgaccaccatcgccagaaccatcaacgaggtggagaaccagatcctgaccagagacgccaagggcatcagccaggagcagatgaacgagttcagagccagcttcaaccacttcgacagagaccacagcggcaccctgggccccgaggagttcaaggcctgcctgatcagcctgggctacgacatcggcaacgacccccagaagaagaccggcatgatggacaccgacgacttcagagcctgcctgatcagcatgggctacaacatgggcgaggccgagttcgccagaatcatgagcatcgtggaccccaacagactgggcgtggtgaccttccaggccttcatcgacttcatgagcagagagaccgccgacaccgacaccgccgaccaggtgatggccagcttcaagatcctggccggcgacaagaactacatcaccatggacgagctgagaagagagctgccccccgaccaggccgagtactgcatcgccagaatggccccctacaccggccccgacagcgtgcccggcgccctggactacatgagcttcagcaccgccctgtacggcgagagcgacctgtag

SEQ ID NO: 47128 - protein, 887 aa, Artificial Sequence
  derived and/or modified sequence
MDHYDSQQTNDYMQPEEDWDRDLLLDPAWEKQQRKTFTAWCNSHLRKAGTQIENIEEDFRDGLKLMLLLEVISGERLAKPERGKMRVHKISNVNKALDFIASKGVKLVSIGAEEIVDGNVKMTLGMIWTIILRFAIQDISVEETSAKEGLLLWCQRKTAPYKNVNIQNFHISWKDGLGFCALIHRHRPELIDYGKLRKDDPLTNLNTAFDVAEKYLDIPKMLDAEDIVGTARPDEKAIMTYVSSFYHAFSGAQKAETAANRICKVLAVNQENEQLMEDYEKLASDLLEWIRRTIPWLENRVPENTMHAMQQKLEDFRDYRRLHKPPKVQEKCQLEINFNTLQTKLRLSNRPAFMPSEGRMVSDINNAWGCLEQVEKGYEEWLLNEIRRLERLDHLAEKFRQKASIHEAWTDGKEAMLRQKDYETATLSEIKALLKKHEAFESDLAAHQDRVEQIAAIAQELNELDYYDSPSVNARCQKICDQWDNLGALTQKRREALERTEKLLETIDQLYLEYAKRAAPFNNWMEGAMEDLQDTFIVHTIEEIQGLTTAHEQFKATLPDADKERLAILGIHNEVSKIVQTYHVNMAGTNPYTTITPQEINGKWDHVRQLVPRRDQALTEEHARQQHNERLRKQFGAQANVIGPWIQTKMEEIGRISIEMHGTLEDQLSHLRQYEKSIVNYKPKIDQLEGDHQLIQEALIFDNKHTNYTMEHIRVGWEQLLTTIARTINEVENQILTRDAKGISQEQMNEFRASFNHFDRKKTGMMDTDDFRACLISMGYNMGEAEFARIMSIVDPNRLGVVTFQAFIDFMSRETADTDTADQVMASFKILAGDKNYITMDELRRELPPDQAEYCIARMAPYTGPDSVPGALDYMSFSTALYGESDL

SEQ ID NO: 47129 - DNA, 2664 bp, Artificial Sequence
  derived and/or modified sequence
atggaccattacgatagccaacaaacaaacgattacatgcagcctgaagaggactgggaccgcgatctgctgctcgatcctgcgtgggaaaagcagcagagaaaaacctttaccgcgtggtgcaatagccacttgaggaaagccggtactcaaattgaaaatatcgaagaggattttcgtgatggtctaaagctaatgcttctattggaagttatcagcggagaaaggttggcgaagcccgagaggggcaagatgcgagtgcataagatctcaaatgtaaacaaggccctcgattttatcgcatctaagggggttaagctggtcagcataggggccgaggagattgtggacgggaacgtgaaaatgaccctggggatgatctggaccattatacttcgctttgctatacaggacatctctgtggaagaaacatccgccaaagaaggccttctactgtggtgtcaacgcaagaccgctccttataagaacgtgaatatccagaatttccatatctcttggaaggacggactcggcttttgtgccttgattcacagacaccgccctgaactgattgattatgggaagctgcgaaaggacgaccccctcaccaatttgaataccgctttcgacgtggctgagaaatatttggacatcccaaagatgctggatgccgaagacattgtggggacagcgcgcccagacgagaaagcaattatgacctacgttagcagcttctatcacgcgttcagcggggcccagaaggcagaaacggctgccaatcggatttgcaaagtactggccgtcaaccaggaaaacgaacagctgatggaagattacgaaaagctggcttctgacctcctggagtggatccgtcggactatcccttggctggaaaaccgcgtcccagaaaatacaatgcacgccatgcaacagaagctggaagactttcgtgactaccgaaggcttcataagccacccaaggtccaggaaaaatgccagctcgaaataaacttcaacaccctgcagacaaagctccggctgtctaacagaccagccttcatgccctcagagggtcggatggtatccgatattaacaatgcctggggctgcctcgaacaggtggagaaaggatacgaagaatggctgcttaatgaaatccggcggctggagagactcgatcacttagccgaaaagttcaggcagaaagcctccatccacgaggcctggacggacggtaaggaggctatgctgaggcaaaaagattatgagacagccacactgagcgaaattaaggctctgttaaagaagcacgaggcctttgaaagcgacttggccgcccatcaagatagagtggagcagattgcggcaatcgcccaggaactgaacgaactcgactactacgattccccatcagtgaatgcccggtgtcaaaaaatctgtgatcagtgggataatctgggggccttgacacagaaaaggcgtgaggcgttggaaagaacggaaaaattattagagactatcgaccagctatacctggaatacgcaaagcgtgccgctccctttaacaattggatggagggcgccatggaagacttgcaggacactttcattgtccacaccattgaagagattcagggtctgaccactgcacacgaacagtttaaggccacactgccggatgccgataaagagcggctggctatcttgggcattcacaacgaggtctccaaaatcgtacagacttatcacgtaaacatggccgggaccaacccttacactacgatcacgccacaggagataaacggcaaatgggatcacgtcaggcagcttgtaccacgcagggaccaggcgttgacagaggagcacgcccgacagcagcacaatgaacggctgagaaaacagttcggagctcaggctaatgtcattgggccatggatacagaccaagatggaggagatcggccgcatctcgatcgagatgcatggtaccctggaagatcagttgtcccatctgagacagtatgagaagtcgattgtgaattacaagccaaagatcgaccagctggaaggcgaccatcaactgatccaggaggccctgatattcgacaataaacataccaattacacaatggaacacatcagggtgggatgggaacagctcttaaccaccatcgccaggaccatcaacgaagttgagaatcagattctcacacgggatgcaaagggtatctcgcaggagcaaatgaacgagtttagggccagcttcaatcattttgacagaaaaaagacaggcatgatggataccgacgattttcgcgcctgcctgattagcatgggatataatatgggggaagcggagtttgctcggatcatgtctattgtggacccaaatcggcttggcgttgtcacctttcaggccttcatagactttatgtctagggagaccgctgacactgatactgccgatcaggtgatggcctcttttaagatcctggcgggggacaagaactatatcaccatggatgaactgaggcgggagctgccccctgatcaggccgaatactgcatcgccagaatggcgccatatacagggccggatagcgtgcccggggccctggattacatgtctttcagcacagcattatatggagaaagtgacctgtag

SEQ ID NO: 47130 - DNA, 2664 bp, Artificial Sequence
  derived and/or modified sequence
atggaccactatgacagccagcagaccaatgactacatgcagcctgaggaggactgggaccgggacctgctgctggaccctgcctgggagaagcagcagaggaagaccttcaccgcctggtgcaacagccacctgaggaaggccggcacccagattgaaaatattgaggaggacttcagagatggcctgaagctgatgctgctgctggaggtgatctctggagagcggctggccaagccagagcggggcaagatgagggtgcacaagatcagcaatgtgaacaaggccctggacttcatcgccagcaaaggagtgaagctggtgtccatcggggctgaggagatcgtggatggaaatgtgaagatgaccctgggcatgatctggaccatcatcctgcgctttgccatccaggacatctctgtggaggagaccagcgccaaggagggcctgctgctgtggtgccagaggaagacagccccctacaagaatgtgaacatccagaacttccacatctcctggaaggatggcctgggcttctgtgccctgatccaccgccacaggcctgagctgattgattatggcaagctgaggaaggatgaccccctgaccaacctgaacacagcctttgatgtggccgagaagtacctggacatccccaagatgctggatgctgaagatattgtgggcacagcccggccagatgagaaggccatcatgacctacgtgagcagcttctaccacgccttcagcggggcccagaaggccgagacagctgccaaccgcatctgcaaggtgctggccgtgaaccaggagaatgagcagctgatggaggactatgagaagctggccagtgacctgctggagtggatccggaggaccatcccctggctggagaacagagtgcctgagaacaccatgcacgccatgcagcagaagctggaggacttccgggactaccgccgcctgcacaagccacccaaggtgcaggagaagtgccagctggagatcaacttcaacaccctgcagaccaagctgcggctgagcaacagacctgccttcatgcccagcgagggccgcatggtgtctgacatcaacaatgcctggggctgcctggagcaggtggagaagggctatgaggagtggctgctgaatgagatccggcggctggagcggctggaccacctggccgagaagttccggcagaaggccagcatccacgaggcctggacagatggcaaggaggccatgctgcggcagaaggactatgaaacagccaccctgtctgagatcaaggccctgctgaagaagcatgaggcctttgaaagtgacctggccgcccaccaggacagagtggagcagattgctgccatcgcccaggagctgaatgagctggactactatgacagccccagcgtgaatgcccgctgccagaagatctgtgaccagtgggacaacctgggcgccctgacccagaagagaagagaggccctggagaggacagagaagctgctggagaccatcgaccagctgtacctggagtatgccaagagagctgcccccttcaacaactggatggagggcgccatggaggacctgcaggacaccttcatcgtgcacaccatcgaggagatccagggcctgaccacagcccacgagcagttcaaggccaccctgcctgatgctgacaaggagcggctggccatcctgggcatccacaatgaggtgtccaagatcgtgcagacctaccacgtgaacatggccggcaccaacccctacaccaccatcaccccccaggagatcaatggcaagtgggaccacgtgcggcagctggtgccccggcgggaccaggccctgacagaggagcacgcccggcagcagcacaatgaaaggctgaggaagcagtttggagcccaggccaacgtcatcggcccctggatccagaccaagatggaggagatcggccgcatcagcattgagatgcacggcaccctggaggaccagctgagccacctgcggcagtatgagaagagcatcgtgaactacaagcccaagattgaccagctggagggggaccaccagctgatccaggaggccctgatctttgacaacaagcacaccaactacaccatggagcacatccgggtgggctgggagcagctgctgaccaccatcgcccggaccatcaatgaggtggagaaccagatcctgaccagagatgccaagggcatcagccaggagcagatgaatgagttccgggccagcttcaaccactttgacaggaagaagacaggcatgatggacacagatgacttccgggcctgcctgatctccatgggctacaacatgggagaggccgagtttgcccgcatcatgagcatcgtggaccccaaccggctgggcgtggtgaccttccaggccttcatcgacttcatgagccgggagacagctgacacagacacagctgaccaggtgatggccagcttcaagatcctggccggggacaagaactacatcaccatggatgagctgcggcgggagctgcccccagaccaggccgagtactgcatcgccaggatggccccctacacaggcccagattctgtgcctggggccctggactacatgtccttcagcacagccctgtatggagagagtgacctgtag

SEQ ID NO: 47131 - DNA, 3043 bp, Artificial Sequence
  derived and/or modified sequence
aggcagtccgcgagcccagccgccgctgtcgccgccagtagcagccttcgccagcagcgccgcggcggaaccgggcgcaggggagcgagcccggccccgccagcccagcccagcccagccctactccctccccacgccagggcagcagccgttgctcagagagaaggtggaggaagaaatccagaccctagcacgcgcgcaccatcatggaccattatgattctcagcaaaccaacgattacatgcagccagaagaggactgggaccgggacctgctcctggacccggcctgggagaagcagcagagaaagacattcacggcatggtgtaactcccacctccggaaggcggggacacagatcgagaacatcgaagaggacttccgggatggcctgaagctcatgctgctgctggaggtcatctcaggtgaacgcttggccaagccagagcgaggcaagatgagagtgcacaagatctccaacgtcaacaaggccctggatttcatagccagcaaaggcgtcaaactggtgtccatcggagccgaagaaatcgtggatgggaatgtgaagatgaccctgggcatgatctggaccatcatcctgcgctttgccatccaggacatctccgtggaagagacttcagccaaggaagggctgctcctgtggtgtcagagaaagacagccccttacaaaaatgtcaacatccagaacttccacataagctggaaggatggcctcggcttctgtgctttgatccaccgacaccggcccgagctgattgactacgggaagctgcggaaggatgatccactcacaaatctgaatacggcttttgacgtggcagagaagtacctggacatccccaagatgctggatgccgaagacatcgttggaactgcccgaccggatgagaaagccatcatgacttacgtgtctagcttctaccacgccttctctggagcccagaaggcggagacagcagccaatcgcatctgcaaggtgttggccgtcaaccaggagaacgagcagcttatggaagactacgagaagctggccagtgatctgttggagtggatccgccgcacaatcccgtggctggagaaccgggtgcccgagaacaccatgcatgccatgcaacagaagctggaggacttccgggactaccggcgcctgcacaagccgcccaaggtgcaggagaagtgccagctggagatcaacttcaacacgctgcagaccaagctgcggctcagcaaccggcctgccttcatgccctctgagggcaggatggtctcggacatcaacaatgcctggggctgcctggagcaggtggagaagggctatgaggagtggttgctgaatgagatccggaggctggagcgactggaccacctggcagagaagttccggcagaaggcctccatccacgaggcctggactgacggcaaagaggccatgctgcgacagaaggactatgagaccgccaccctctcggagatcaaggccctgctcaagaagcatgaggccttcgagagtgacctggctgcccaccaggaccgtgtggagcagattgccgccatcgcacaggagctcaatgagctggactattatgactcacccagtgtcaacgcccgttgccaaaagatctgtgaccagtgggacaatctgggggccctaactcagaagcgaagggaagctctggagcggaccgagaaactgctggagaccattgaccagctgtacttggagtatgccaagcgggctgcacccttcaacaactggatggagggggccatggaggacctgcaggacaccttcattgtgcacaccattgaggagatccagggactgaccacagcccatgagcagttcaaggccaccctccctgatgccgacaaggagcgcctggccatcctgggcatccacaatgaggtgtccaagattgtccagacctaccacgtcaatatggcgggcaccaacccctacacaaccatcacgcctcaggagatcaatggcaaatgggaccacgtgcggcagctggtgcctcggagggaccaagctctgacggaggagcatgcccgacagcagcacaatgagaggctacgcaagcagtttggagcccaggccaatgtcatcgggccctggatccagaccaagatggaggagatcgggaggatctccattgagatgcatgggaccctggaggaccagctcagccacctgcggcagtatgagaagagcatcgtcaactacaagccaaagattgatcagctggagggcgaccaccagctcatccaggaggcgctcatcttcgacaacaagcacaccaactacaccatggagcacatccgtgtgggctgggagcagctgctcaccaccatcgccaggaccatcaatgaggtagagaaccagatcctgacccgggatgccaagggcatcagccaggagcagatgaatgagttccgggcctccttcaaccactttgaccggaagaagacaggcatgatggacacggatgatttccgcgcctgcctgatctccatgggttacaacatgggagaagcagaatttgcccgcatcatgagcattgtggaccccaaccgcctgggggtagtgacattccaggccttcattgacttcatgtcccgcgagacagccgacacagatacagcagaccaagtcatggcttccttcaagatcctggctggggacaagaactacattaccatggacgagctgcgccgcgagctgccacccgaccaggctgagtactgcatcgcgcggatggccccctacaccggccccgactccgtgccaggtgctctggactacatgtccttctccacggcgctgtacggcgagagtgacctctaatccaccccgcccggccgccctcgtcttgtgcgccgtgccctgccttgcacctccgccgtcgcccatctcctgcctgggttcggtttcagctcccagcctccacccgggtgagctggggcccacgtggcatcgatcctccctgcccgcgaagtgacagtttacaaaattatttt

SEQ ID NO: 47132 - DNA, 2664 bp, Artificial Sequence
  derived and/or modified sequence
atggaccactacgacagccagcagaccaacgactacatgcagcccgaggaagattgggatcgggacttactattagaccctgcttgggagaaacagcaaagaaaaactttcacagcctggtgcaacagccacctgcggaaagccggaacacaaattgagaacatagaggaagacttccgcgacggactcaagctaatgcttctgctggaagtgatctccggcgagcgtttggccaaacccgagagaggtaagatgagggttcacaaaatttctaatgtgaacaaagccctggatttcatcgcgtctaagggcgtgaaactcgtgtcaattggggctgaagagatagtggacggtaatgtcaagatgaccctcggaatgatttggactataatcttacggttcgcgatccaggatatttccgtagaagaaacttctgcgaaggaagggctgcttctttggtgccagcgaaaaacggccccctacaagaatgtgaatatccagaactttcatatatcctggaaagatggacttggcttctgtgccctcatccatcgtcacaggccggagcttattgattatggcaagctgagaaaagacgaccctctaactaaccttaacactgcttttgacgtagctgagaagtatctggatatccctaagatgttggatgctgaagacatagtcgggaccgccaggcctgacgagaaagccattatgacgtacgtgagctctttttaccacgctttcagcggagcacagaaagcagagaccgcagcaaataggatctgcaaagtgctcgcggtcaatcaggaaaacgagcagctcatggaggattacgagaaactagcttcagatctgttagagtggatccgcagaacaatcccttggctggagaatagagtccccgagaatacaatgcatgcgatgcagcaaaagttagaggactttcgggactacagaagactacacaaacctccaaaggtccaggaaaaatgccagttagagatcaacttcaatacccttcaaacgaagctgagactcagtaataggcccgcattcatgccttccgaaggccggatggtgagcgacattaataacgcctggggttgtttggagcaagttgaaaaaggatatgaagagtggctcctgaatgaaattcgccgactggaacggctcgaccatctggcggagaaattccggcagaaggcatcaattcacgaagcatggacagacggaaaggaggcaatgttacggcagaaggattatgagacagcgaccctctccgagatcaaggccctcttgaaaaagcatgaggctttcgaatctgatttggccgcacatcaggatcgggtggaacagattgctgcgattgcccaggaactgaacgaactggactactacgattctccgtcggtaaacgccagatgtcagaaaatctgtgatcagtgggacaatctgggggccctcacacagaagaggagagaagccctggaaaggactgaaaagctgctggaaacaatcgatcagctatatctggagtacgccaagcgggctgcaccattcaacaactggatggagggcgccatggaagacctccaggatacatttattgtgcacaccatagaggagattcaagggctgaccacagcccatgaacagttcaaagccaccctccctgatgctgataaagagagactggccatcctcggaattcataatgaggtctctaagatcgtgcagacgtaccatgtgaatatggcaggcacaaacccttatacaacaattacaccccaagaaataaatggaaaatgggaccatgtgcgccagctggtgcctaggagggatcaagccctgacagaggagcatgctcgccagcagcataacgaaaggttgcggaagcaatttggggctcaagccaatgttatcggtccgtggatccagacgaaaatggaggagattgggagaatctctattgagatgcatggcacattagaggatcagctgagtcacctgaggcagtatgagaaatctatagtcaattacaagccgaaaatagatcaattagaaggggatcaccaattgattcaggaggctctgattttcgataacaagcacactaactatacaatggagcacattcgtgtgggctgggaacagctgctgactacgatcgccagaactataaatgaggtagagaatcagattctgacccgagacgccaaagggatcagccaggagcaaatgaatgaatttcgagccagcttcaaccacttcgaccgaaaaaagacaggcatgatggatacagatgacttccgagcttgcctgataagtatggggtacaatatgggagaggcggaatttgctagaatcatgagtattgtcgatcccaacagactgggggtcgtgactttccaagcgttcatcgactttatgtcccgcgaaactgcagacaccgacacagctgatcaagttatggccagtttcaaaatactggcaggcgataaaaactatatcactatggacgaattaaggagggaactgcccccagaccaagccgaatactgtattgctcgtatggctccatatacaggtccagactccgttcctggtgcactggattacatgagtttttccaccgcactttatggcgagagtgacttgtag

SEQ ID NO: 47133 - DNA, 2664 bp, Artificial Sequence
  derived and/or modified sequence
atggatcactacgactcacagcaaaccaatgattatatgcagcccgaggaggactgggacagggatctacttctagaccctgcttgggagaagcagcagcgcaaaacatttaccgcatggtgtaatagtcacctacgtaaggctgggacccagattgagaatatcgaggaagatttccgtgacgggctgaaactgatgttgctcctggaggtaatcagcggggagaggctagctaaaccggaacgcggtaagatgcgagtgcacaagatttcaaatgtgaacaaggctcttgatttcatcgccagcaagggtgtcaagcttgtgtcaatcggggctgaggagattgtggacggcaacgtgaagatgacgctggggatgatctggacaatcatactgcgtttcgctattcaggacattagcgtggaagagaccagtgctaaggaggggcttcttctctggtgccagaggaagaccgccccttacaaaaatgtgaacatacagaatttccatatatcatggaaggacgggctgggattctgcgctcttatacatagacatcgccctgaactcatcgattacgggaagctccgaaaggatgacccactcacgaaccttaatactgcctttgacgtcgctgaaaagtatctggatattccaaagatgctggacgcggaggatattgtcggaaccgcccgtcctgatgaaaaggcgataatgacatacgtttcttcattttaccacgccttttcaggtgcccagaaagctgaaaccgcagccaacagaatctgcaaagtgctggctgtgaatcaagaaaatgaacaattaatggaggactatgaaaagctcgcgtccgaccttctagagtggatccgacgaactatcccttggctcgagaatcgggtgcccgagaacacgatgcacgctatgcagcagaagctcgaggactttagagattacagacgattacataagccaccaaaggtgcaggagaagtgtcagctcgagatcaactttaatacgctgcagactaagttgaggctcagtaatagacctgcattcatgccctcagaaggtaggatggtctccgacattaacaacgcctgggggtgcctggagcaggtggagaaaggctacgaggaatggctgctaaacgagatccgtcggttggaacgtctagaccatcttgcggagaagttccgacagaaagcgtccattcacgaagcatggacagacgggaaggaggccatgctcaggcagaaggactatgagacagccacactgagtgagataaaggcccttttgaagaaacatgaggcctttgagtccgatctggccgctcatcaggatcgggttgagcagatcgccgctattgcgcaggaattgaatgaactggactattatgactcaccctctgtgaacgccaggtgccagaaaatttgcgaccagtgggacaacttgggcgctttaacccaaaaacgtcgagaagccctggagcggaccgaaaaactcctggaaacaatcgatcaactctacctcgaatatgccaaacgtgctgctccttttaacaactggatggaaggcgctatggaggaccttcaggatacttttatcgtgcatactatagaggagatccagggtctgacgactgcccacgaacagttcaaagcgacactccccgacgctgacaaggaacggcttgccatactgggtatacacaatgaggtgtctaaaatcgtccagacctaccacgtgaacatggccggtaccaacccttatacaacaataaccccccaggaaattaatggtaaatgggaccacgtgagacaattagttccaaggcgcgaccaggccctcacggaggagcatgcgagacagcagcacaacgagagactgcgaaaacaatttggtgcacaggcgaacgttattgggccatggattcagactaaaatggaagaaatcggtagaatttcaattgaaatgcatgggacgctcgaagaccagctgagccatctgagacagtacgaaaagtcaatagtaaactataaacccaaaatcgaccagctggaaggggatcatcagctgatccaggaagcattaatttttgacaacaagcatacaaattatacgatggaacacatccgagtagggtgggagcagctgctgaccactattgcacggacaattaatgaagtggaaaaccagatcctgactcgggatgccaagggtatcagtcaagaacagatgaatgaattccgggcatccttcaatcactttgatcgcaagaagaccggaatgatggacactgatgacttccgcgcatgcctcatctccatgggctacaacatgggcgaggccgagttcgccaggattatgtccatagtggatcctaaccgactgggggtggtgacattccaggctttcatcgactttatgtcacgcgaaacagcggacacagatacagctgaccaagtgatggcctcctttaagattctcgccggagataaaaactacattaccatggacgagctgaggagggaactcccccctgatcaggctgaatattgcatagcaaggatggctccttacaccggacccgactcagtgcctggggctctagattatatgtccttttcaacggcactgtatggggagagcgatctctag

SEQ ID NO: 47134 - DNA, 2664 bp, Artificial Sequence
  derived and/or modified sequence
atggaccactacgacagccagcagaccaacgactacatgcagcccgaggaggactgggacagagacctgctgctggaccccgcctgggagaagcagcagagaaagaccttcaccgcctggtgcaacagccacctgagaaaggccggcacccagatcgagaacatcgaggaggacttcagagacggcctgaagctgatgctgctgctggaggtgatcagcggcgagagactggccaagcccgagagaggcaagatgagagtgcacaagatcagcaacgtgaacaaggccctggacttcatcgccagcaagggcgtgaagctggtgagcatcggcgccgaggagatcgtggacggcaacgtgaagatgaccctgggcatgatctggaccatcatcctgagattcgccatccaggacatcagcgtggaggagaccagcgccaaggagggcctgctgctgtggtgccagagaaagaccgccccctacaagaacgtgaacatccagaacttccacatcagctggaaggacggcctgggcttctgcgccctgatccacagacacagacccgagctgatcgactacggcaagctgagaaaggacgaccccctgaccaacctgaacaccgccttcgacgtggccgagaagtacctggacatccccaagatgctggacgccgaggacatcgtgggcaccgccagacccgacgagaaggccatcatgacctacgtgagcagcttctaccacgccttcagcggcgcccagaaggccgagaccgccgccaacagaatctgcaaggtgctggccgtgaaccaggagaacgagcagctgatggaggactacgagaagctggccagcgacctgctggagtggatcagaagaaccatcccctggctggagaacagagtgcccgagaacaccatgcacgccatgcagcagaagctggaggacttcagagactacagaagactgcacaagccccccaaggtgcaggagaagtgccagctggagatcaacttcaacaccctgcagaccaagctgagactgagcaacagacccgccttcatgcccagcgagggcagaatggtgagcgacatcaacaacgcctggggctgcctggagcaggtggagaagggctacgaggagtggctgctgaacgagatcagaagactggagagactggaccacctggccgagaagttcagacagaaggccagcatccacgaggcctggaccgacggcaaggaggccatgctgagacagaaggactacgagaccgccaccctgagcgagatcaaggccctgctgaagaagcacgaggccttcgagagcgacctggccgcccaccaggacagagtggagcagatcgccgccatcgcccaggagctgaacgagctggactactacgacagccccagcgtgaacgccagatgccagaagatctgcgaccagtgggacaacctgggcgccctgacccagaagagaagagaggccctggagagaaccgagaagctgctggagaccatcgaccagctgtacctggagtacgccaagagagccgcccccttcaacaactggatggagggcgccatggaggacctgcaggacaccttcatcgtgcacaccatcgaggagatccagggcctgaccaccgcccacgagcagttcaaggccaccctgcccgacgccgacaaggagagactggccatcctgggcatccacaacgaggtgagcaagatcgtgcagacctaccacgtgaacatggccggcaccaacccctacaccaccatcaccccccaggagatcaacggcaagtgggaccacgtgagacagctggtgcccagaagagaccaggccctgaccgaggagcacgccagacagcagcacaacgagagactgagaaagcagttcggcgcccaggccaacgtgatcggcccctggatccagaccaagatggaggagatcggcagaatcagcatcgagatgcacggcaccctggaggaccagctgagccacctgagacagtacgagaagagcatcgtgaactacaagcccaagatcgaccagctggagggcgaccaccagctgatccaggaggccctgatcttcgacaacaagcacaccaactacaccatggagcacatcagagtgggctgggagcagctgctgaccaccatcgccagaaccatcaacgaggtggagaaccagatcctgaccagagacgccaagggcatcagccaggagcagatgaacgagttcagagccagcttcaaccacttcgacagaaagaagaccggcatgatggacaccgacgacttcagagcctgcctgatcagcatgggctacaacatgggcgaggccgagttcgccagaatcatgagcatcgtggaccccaacagactgggcgtggtgaccttccaggccttcatcgacttcatgagcagagagaccgccgacaccgacaccgccgaccaggtgatggccagcttcaagatcctggccggcgacaagaactacatcaccatggacgagctgagaagagagctgccccccgaccaggccgagtactgcatcgccagaatggccccctacaccggccccgacagcgtgcccggcgccctggactacatgagcttcagcaccgccctgtacggcgagagcgacctgtag

SEQ ID NO: 47135 - protein, 636 aa, Artificial Sequence
  derived and/or modified sequence
MDPGSGGGGGGGGGGGSSSGSSSSDSAPDCWDQADMEAPGPGPCGGGGSLAAAAEAQRENLSAAFSRQLNVNAKPFVPNVHAAEFVPSFLRGPAAPPPPVGGAANNHGAGSGAGGRAAPVESSQEEQSLCEGSNSAVSMELSEPIENGETEMSPEESWEHKEEISEAEPGGGSLGDGRPPEESAHEMMEEEEEIPKPKSVVAPPGAPKKEHVNVVFIGHVDAGKSTIGGQIMYLTGMVDKRTLEKYEREAKEKNRETWYLSWALDTNQEERDKGKTVEVGRAYFETEKKHFTILDAPGHKSFVPNMIGGASQADLAVLVISARKGEFETGFEKGGQTREHAMLAKTAGVKHLIVLINKMDDPTVNWSNERYEECKEKLVPFLKKVGFNPKKDIHFMPCSGLTGANLKEQSDFCPWYIGLPFIPYLDNLPNFNRSVDGPIRLPIVDKYKDMGTVVLGKLESGSICKGQQLVMMPNKHNVEVLGILSDDVETDTVAPGENLKIRLKGIEEEEILPGFILCDPNNLCHSGRTFDAQIVIIEHKSIICPGYNAVLHIHTCIEEVEITALICLVDKKSGEKSKTRPRFVKQDQVCIARLRTAGTICLETFKDFPQMGRFTLRDEGKTIAIGKVLKLVPEKD

SEQ ID NO: 47136 - DNA, 552 bp, Artificial Sequence
  derived and/or modified sequence
tgggcaggaaagagcatgaaagccccagccagcctcacatgtgcggctgggaggactcacagaaaccctctgtacccagtcatgggccaaagacaccgtcatgcaagggggtgaaggctccacactcgtcccggccccgggcgtggaagcaggacctcgagcagtctctggcagcagcctatgtgccggtcgttgtggactctaaggggcagaatccggacaagctcaggttcaatttctacacctcccagtactccaactccctgaaccccttctacactttgcagaagcctacctgtggctacctgtaccgccgggacactgaccacacccgcaagcgctttgatgtgcctcctgccaacttggtcttgtggcgctcctaggcctgagccaaacggaagcccccgacccttcaccctcacccctgtgacctcaggtccccaaggggaagggctgctcactgcaggaggagtgacctatattcgggctaagacagctgtgccatgcccacctattgacaatgataaagggaggtctctcttctcagcagca

SEQ ID NO: 47137 - DNA, 7148 bp, Artificial Sequence
  derived and/or modified sequence
gggaggagatccgctcacacacacgaggaggagggttgagctgccgccgccgccgcctctgtcgtcgtcgcgagtgtggagtcgggactggagctgctgccgcggcgacgccggggatctttgtcgctagctcccggcccttctgccccgccgccttccctcagtcagcgttgcccactcctctccggccgggcgcccctgcctccatttcccgctctctgtccaccacacacacggcccccccgatcatggatccgggcagtggcggcggcggcggcggcggcggcggcggcgggagcagcagcggcagcagcagcagcgactcggcgcctgactgctgggaccaggcggacatggaagcccccgggccgggcccttgcggcggcggcggctccctggcggcggcggccgaggcccagcgggagaacctcagcgcggccttcagccggcaactcaacgtcaacgccaagcccttcgtgcccaacgtccacgccgccgagttcgtgccgtccttcctgcggggcccggcagcgccgccacccccagttggcggcgccgccaataaccacggagccggcagcggcgcgggaggccgtgcggcacctgtggaatcctctcaagaggaacagtcattgtgtgaaggttcaaattcagctgttagcatggaactttcagaacctattgaaaatggagagacagaaatgtctccagaagaatcatgggagcacaaagaagaaataagtgaagcagagccagggggtggttccttgggagatggaaggccgccagaggaaagtgcccatgaaatgatggaggaggaagaggaaatcccaaaacctaagtctgtggttgcaccgccaggtgctcctaagaaagagcatgtaaatgtagtattcattgggcacgtagatgctggcaagtcaaccattggaggacaaataatgtatttgactggaatggttgacaaaaggacgcttgaaaagtatgaaagagaagctaaagagaaaaacagagaaacttggtacttgtcttgggccttagacacaaatcaggaagaacgagacaagggtaaaacagtagaagtgggtcgtgcctattttgaaaccgaaaagaagcatttcacaattctagatgcccctggccacaagagttttgtcccaaatatgattggtggtgcctctcaagctgatttggctgtgctggtaatctcagccaggaaaggagagtttgaaactggatttgaaaaaggaggacagacaagagaacatgcaatgttggcaaagacagcaggtgtaaaacacctaattgtgctaattaataagatggatgatccaacagtaaattggagcaatgagagatatgaagaatgtaaggagaaactagtgccatttttgaaaaaagttggcttcaatcccaaaaaggacattcactttatgccctgctcaggacttactggagcaaatctcaaagagcagtcggatttctgtccttggtacattggattaccgtttattccatatctggataatttgccgaacttcaatagatcagttgatggaccaatcaggctgccaattgtggataagtacaaggatatgggcactgtggtcctgggaaagctggaatcaggatctatttgtaaaggccagcagcttgtgatgatgccaaacaagcacaacgtggaagttcttggaatactttccgatgatgtagagactgataccgtagccccaggtgaaaacctcaaaatcagactgaaaggaattgaagaagaggagattcttccagggtttatactttgtgatcctaataatctttgtcattctggacgcacatttgatgcccagatagtgattatagagcacaaatccatcatctgcccaggctataatgcggtgctgcatattcatacctgtattgaggaggtggaaataacagccttaatctgcttggtagacaaaaaatcaggagaaaaaagtaagacccgaccccgttttgtcaaacaagatcaagtatgcattgctcgcttaaggacagcaggaaccatctgccttgagacctttaaagacttccctcagatgggtcgtttcaccttaagagatgagggtaagaccattgcaattggaaaagttctgaaactggttccagagaaagactaagcattttcttgatgaccctgcacaatactgtgaggaaaattgactgcagaagcctacttcacaccgccttctcttattttctgcccattgataaacctctccccatattttgcaaagaggaaattcacagcaaaagtccacattatgtcagctttctcatattgagagctctgctatgccactgttgaatttttcccaagattcctgtccctagccctcacttcaaactctgcttccttggacagatttggcaatagctttgtaagtgatgtggacataattgcctacaataatgaaaacctacaggaatttttttatttttcattttccccttaggcatatttagtatttttcccccaggcagatcattctgagtgtgcgagtgtgtgtgcacatgttacaaaggcaactaccatgttaataaaatattcaatttgaaatccttttcggtatttgaattgcttttgaataatgttttttatctggatgtaacattgttgcattagctttttaactttcccaagtaattgaatacattttattacttggacttttataaactctttccctacccactataaatgagacattcacagcgttcaagtttgtattaaaggaaaggattagtttgaccccttcttttgatggttaatgcatacatgcagttaaatccctttatgcaaatgtgacactgctttactaggtcttttagttatttatttattttttttttttttgccaatttatattgtaacatgatttcttgaacacagtaagttgttttaaaataaaagaacagcatactgtagtttttataagtaaagcgtaatgaaattgtacccctagagaaaattccattaacttgttaaattagtggaattaacaacaaataaagcatgtttgagacctggcaaaaattcctctggtagtatttataaatagagctgcatgcctctagtatgaaaaccgtatcagttgcaagtgccacttctacaagttactcagtttactctttgtatcagtaactttaaaggttggatgatccttgctggttaaagctaaatctcaacctagcaactaaatgaaaatatttagaatcatcagaatctgaacagactaaaattatcagcgataagcagaatcaagcagggtataagttttatctcaattatttgaaattgactgagttttcttaagtgtaaagctgaaatttgctaaccatgtttttgatgaaccacagtgcagcattgtgtgggttttagattgaatgactctctgctataattatcatgactttgaaatttttcatgagaataaatgaggaatggaggcaatttgtgggtttatccaaagcccccttgatgttgagtgttgccattgatcaaagatagcctcttttagattgtgatttctctctaaataagatactttgtatatttaatgacaagtctcttccctataattttgctcctcagaaaagaaaagcctagacagactgtatttccagtcacagaacataaaacttaatctaatgggtgttttgttttgttttgagacagaggctcactctgtcacctaggctggagtgcagtggctcgatctcagctcactgcagcctccacctcccggattcaagcaatttcctgcctcagcctcttgagtagctgggattacaggagccctccacgaggcccagttaatttttgtatctttagtggagacgaggtttccccctattggtcaggctggtctcaaacttctgacctcaagtgatccactcgcctcagcctctcaaaagtgctgggattacaggcatgaggcgccgcacttggcctagtgttttcttaactgtgaaattcccattcatttcttgaatgaggctacatcttatggacagagcaaagttattgtcctacagattcttaaaactataattatggctattgcatgaaatttaaatagattttattatgtctgcaaatctctgggcttttatttttctggaaaatataggagctttaatcaaaacataatagttctttttgtaattccatgttaataaaaacaaatactagcaattgcttgaattttaatgaatatttaaaagttcaagagccacggaaatcacttccagagataagagttccctttctaaatagaacacatttttaaaaaataagttatgtttgctactaaaacatttacactgttagactattatgtgcatgttgccaagactcttaagtaacttggatatcaactgtgaagggcctacctctaaaaagtaacaggtcatacaaatacaaatgtaactgtaaaaattccactggattcttgcatatttgcaagattagattattcaaaagaaatttcagtgctaaaattaaccagcaacataagttctatgggctttgaaaattgttctcatctttttaaagttgatgcattttcaatcctgcttacacaggctgttcatttggataagtaaataaaatgtctaaggtgaacttggcattatgtggagatgttggaccgttatagagcaatacaaattcctatgctgtcattctgttttctgcaaatgcaaacgtgcttatatggtcaacagtgcaaaaatagggtagttggctgcatatttagggtattacctaagcatttgttctctaacgttgctctactagaatgatttttttcttgcatcttttcacattaatgatgttctttatataactttcatgcgattatttagttttttaaattaataaagtgaatttaagaaatattgaaataaacatctaagtaattgccattttaaacccttgtttcttactgtgggagagggggaaatacagcactcatttcttgtttttaatttgcagaagtaagtgaaaatctatgtaaaatcaaaccaaaagagttggactgagtgtgtattgtcttgagattaagtgacaaatagtaaagtgttactgagtaattaagcccatgtattttttttttgtgagttgaaaatctttgaaatatgtgataaccgaatgtcaaaagttcctaaactctaacagtgcaggttgttcactgtaacgaggtaactcatatttgctggttacataaactacaagtactgctctcacaatatgggactttgaactgtgatgtagttcaacagttgccggcatcctctcagctgatacgctgcgaatattttgggttagacttgcagccagatgcagttttgcaacccaagaaaaaagttgaacctatgatcaaaaactgctcccaagatgaacctggaaaaaaatcagctaagctcccttggcgatctgcaggaacactagtaatgactggaattactccgtgatctttgatgactattacacataacagcactctagcaccttttcttactggcatggacttcctcatggactgctacttcatggatgatagcttcattgctttgggtagggatttaaggtagtcaaggggaaaatacgcagttttattacaggtcttaacatcaggcaactttcaactttaaaaccctttgtgaaaaatgtggttatagcactatagctctgattttaggatggttaaatgttatattcattgttggcttaccttatcaaactgtgccattaatcctttcacagacataggtaaggaagagaacaaccagtggattcaggggacaattatctatctccaaataataggcttttatttcttgcagctaactttttcagtgattctagcagatgccatctagtacatccttgatcttgtttctttcgtgagagatctcgccatggcagcatcttgttaagtaagtgtaattgcacatgcacaaaagacttaactagctttacatttagcagtcagttggttagattaggtttcatagtaaatgaataggaatagaaagaataggaagtgtttttattttccagtagtaattccgtggattccatttgacccagtttactatcagttcagttcaggtagatttggttcaacttttggtggtttttggctctaggatattcttgactttaatatcctagaacttactgagtcttcccttcaataaatacacttctcacatacctctaatcctatgcttccttgaaacaataatgctagctgagttgtttactaaggattattataagggcctgaaggtgtgggagtggagattaattaaaacctttatgttctccaatataagggaaaagcaggttggtactacttctgattaggcagaaaacaccaggattccttaagtgatccttgaaatggttattgttttctgccttgtcacatttgccactgtgccctttaaaacgatgtggaaacctcaggtttgtggacagcacaggtggaatgacatcttgtgcttcctgaggctcccctctaccaggcacattagcttagtgcttcagatgtcagcccaagtccttgttacctccttttcctgctgcccagggaagagtgtgtgtgctggagctggagcgcttgcactcttcaggtgactattctcacctccatttcctccacatgcattaggtgaaactgaggtctaagcctcctgcaaggtctacattttaaggactcacacatcaggctctcagaaatgtacacaggtattagttctgtttgttctaaaggaaatgtgggtatctctcaggccaggacttagtgactagttttcgctagacagcaggttaatacctagatctcatttaaaaaaaaaaaaaaaaaacaggattaaagggaactgatcaggtttgttgagttttttagcctaattccaaagcatggaagagtgctctaggtaggaaagaaagctttttcttacgatttgtagctacctactgtgcctgacttggtgcctgtgtgaggattaagcccttagtctgctcttgcaattattcaaatgacaaattaaatttgcttttgtaataacaataaaagttgtcatcttcccttttg

SEQ ID NO: 47138 - DNA, 1911 bp, Artificial Sequence
  derived and/or modified sequence
atggacccaggtagcggcggaggcggaggcgggggcggcggcggaggcagctcttcagggtcgtctagcagcgactctgcacccgattgctgggatcaggcagatatggaggctccggggcccggcccgtgcggcggcggcggcagtcttgccgccgcggccgaagctcagcgcgaaaacctatcggcagcgttctccagacagctgaatgtgaatgctaaaccttttgttcccaacgtacatgctgccgaattcgtaccatcatttttgcgcggtccggctgctccaccaccgcccgtgggcggggcagctaataaccatggagcaggaagtggggccgggggccgggctgctccagtggaatcctcccaggaagaacaaagcctgtgtgaaggctcaaattccgctgtttccatggaactgtctgaaccgatcgaaaacggagagacagagatgtctcccgaagaatcttgggaacataaggaagagatcagcgaagccgagcccgggggaggcagtttaggagatggtcgtccccctgaggagagtgctcacgagatgatggaggaggaggaggaaatccctaaaccaaaatcagtcgtcgctcctcctggagcccctaagaaagagcacgtgaacgtggtatttatagggcacgtcgatgcgggtaaaagcaccatcggcgggcagattatgtaccttaccggcatggtagataagcgaacccttgagaagtatgagcgcgaggcaaaagaaaagaacagagaaacttggtacttatcgtgggctctagatacgaaccaggaagagagggacaagggaaaaacagttgaagtcggtagagcatacttcgaaaccgagaaaaaacatttcacaatactggacgcccccggacataaatccttcgtccctaacatgatagggggggccagtcaggccgacttagcagtcctggtaataagtgcccgtaaaggagagtttgagacaggattcgagaaaggcggtcagacccgtgaacatgcaatgctggctaagacagctggtgtgaagcatcttatcgtgttaatcaacaaaatggatgatccaactgtgaactggtcaaacgagaggtacgaggagtgcaaggagaagttggtgccatttctaaaaaaggtaggcttcaatcccaaaaaggatatccacttcatgccttgttctgggctaactggcgcaaacttgaaagaacagtccgacttctgtccctggtatatcggattgccttttatcccttatctggacaacctccctaatttcaatcggtcagtcgatggccccattcggctccccatcgtggataaatataaggatatgggcaccgtcgtgttgggcaaactggagtctggaagcatttgtaaaggccagcagctagtgatgatgcccaataagcataatgtggaggtgctcggaattctgagtgatgatgttgaaacggatacagttgcacctggcgaaaatctgaagattcgcctgaagggcattgaggaagaagagatcttgcccgggttcatactctgtgacccaaataacctgtgtcattcagggagaacatttgatgctcagattgttattattgagcacaaatccattatctgccccgggtacaacgctgtgctgcacatccacacatgcatcgaggaagttgaaataactgccctgatttgcctagtggacaagaaatccggggaaaaatccaagacacgtcccaggttcgtaaagcaagatcaggtgtgcatcgctagactccggaccgcaggaacaatatgtctggaaacattcaaggacttcccacagatggggcggttcacccttagagacgaggggaaaaccattgctatcggcaaggtgcttaaattagtccccgagaaggattag

SEQ ID NO: 47139 - DNA, 1911 bp, Artificial Sequence
  derived and/or modified sequence
atggaccccggcagcggcggcggcggcggcggcggcggcggcggcggcagcagcagcggcagcagcagcagtgacagcgccccagactgctgggaccaggccgacatggaggcccctggccctggcccctgtggcggcggcggcagcctggccgctgctgctgaggcccagcgggagaacctgtctgctgccttcagccggcagctgaatgtgaatgccaagccctttgtgcccaacgtgcacgccgctgagtttgtgcccagcttcctgcggggccctgctgcccctcctcctcctgtgggcggggccgccaacaaccacggggccggcagcggggccggcggccgggccgcccctgtggagagcagccaggaggagcagagcctgtgtgagggcagcaacagcgctgtgtccatggagctgtctgagcccattgaaaatggagaaacagagatgagccctgaggagagctgggagcacaaggaggagatcagcgaggccgagcccggcggcggcagcctgggagatggccggcccccagaggagagcgcccacgagatgatggaggaggaggaggagatccccaagcccaagtctgtggtggcccctcctggggcccccaagaaggagcacgtgaatgtggtgttcatcggccacgtggatgctgggaagagcaccatcggcggccagatcatgtacctgaccggcatggtggacaagaggaccctggagaagtatgaaagagaggccaaggagaagaaccgggagacctggtacctgtcctgggccctggacaccaaccaggaggagcgggacaagggcaagacagtggaggtgggccgggcctactttgaaacagagaagaagcacttcaccatcctggatgcccctggccacaagagctttgtgcccaacatgattggaggagccagccaggccgacctggccgtgctggtgatcagcgccaggaagggggagtttgaaacaggctttgagaagggcggccagacccgggagcacgccatgctggccaagacagctggggtgaagcacctgattgtgctgatcaacaagatggatgaccccaccgtgaactggagcaatgaaagatatgaggagtgcaaggagaagctggtgcccttcctgaagaaggtgggcttcaaccccaagaaggacatccacttcatgccctgcagcggcctgaccggggccaacctgaaggagcagagcgacttctgcccctggtacatcggcctgcccttcatcccctacctggacaacctgcccaacttcaacagatctgtggatggccccatccggctgcccatcgtggacaagtacaaggacatgggcaccgtggtgctgggcaagctggagagcggcagcatctgcaagggccagcagctggtgatgatgcccaacaagcacaacgtggaggtgctgggcatcctgagtgatgatgtggagacagacacagtggcccctggagagaacctgaagatccggctgaagggcatcgaggaggaggagatcctgcccggcttcatcctgtgtgaccccaacaacctgtgccacagcggccgcacctttgatgcccagatcgtcatcatcgagcacaagagcatcatctgccccggctacaatgctgtgctgcacatccacacctgcatcgaggaggtggagatcacagccctgatctgcctggtggacaagaagtctggagagaagagcaagacccggcccaggtttgtgaagcaggaccaggtgtgcatcgcccggctgaggacagctggcaccatctgcctggagaccttcaaggacttcccccagatgggccgcttcaccctgagagatgagggcaagaccatcgccatcggcaaggtgctgaagctggtgcctgagaaggactag

SEQ ID NO: 47140 - DNA, 1911 bp, Artificial Sequence
  derived and/or modified sequence
atggaccccggcagcggcggcggcggcggcggcggcggcggcggcggctctagctcaggctcatcaagtagcgatagcgcccccgactgctgggaccaggccgacatggaagctccgggtcccggaccctgcggaggcggtggttctctcgccgccgccgctgaagcacagagggagaacctgtctgctgcatttagtcgccagctcaatgtgaatgctaagccgttcgttcccaatgtacatgctgctgagtttgtccccagctttctgcggggacctgctgcaccccctcctccagttggcggcgctgctaacaaccacggagcgggctccggtgccggagggagagccgcgccagtggagtcatcacaagaagaacaatcactgtgcgagggatcaaattctgccgtctccatggagcttagcgagcccattgagaatggagagacagagatgagtcctgaagagagctgggagcacaaggaggagattagcgaagccgaacccggggggggctccctcggcgatggaagaccgcctgaggagtccgcccatgagatgatggaagaggaggaggaaataccaaagcccaaaagtgtggttgcaccacctggcgcgcctaaaaaggagcacgtcaacgtcgtcttcatcggacatgtggatgccgggaagtctacgatcggcgggcagattatgtaccttaccggcatggtggacaagcgaactctggagaaatacgagcgggaagctaaggagaagaaccgagaaacttggtatctgtcctgggctcttgacacgaatcaggaggagcgtgataagggaaagactgtggaagtcggtcgggcctatttcgaaaccgagaaaaaacacttcaccattctcgatgcacccggacacaagtccttcgtccctaatatgataggcggggcgtctcaggccgaccttgctgttttggtaatctcagccaggaagggcgagtttgagactggatttgaaaaaggtggacagacacgggagcacgcaatgctggccaaaactgccggagtgaagcatctgattgtgctcatcaataagatggacgaccctaccgtgaattggtctaacgagagatacgaagagtgtaaagaaaaactcgtcccctttctcaaaaaagtgggctttaatccgaaaaaggatatccattttatgccctgctcagggctgacgggggctaacctcaaggagcagtcagacttctgcccatggtatataggcctcccttttatcccttatcttgataacttaccaaacttcaacaggagtgtggatggccccattaggctgcccatcgtggataagtataaggatatgggcacagtggttctgggcaaactcgagagtggtagtatctgcaaaggccagcagcttgtcatgatgcctaataagcacaacgtagaagtccttggaatactcagcgacgacgtggaaaccgatactgtggcccccggagagaatttaaagatcaggctgaagggcattgaagaggaggagatactgcctggattcattctctgcgacccaaacaatttatgccacagtggaagaaccttcgacgcccaaatcgtaatcatagagcataagtcaataatatgccctggttataatgcagtgctccacattcacacttgcatagaagaggtggaaattacagctcttatctgcctcgttgataaaaaatctggtgagaagtctaaaacccggccccggttcgtaaagcaggaccaggtatgtatcgcccgcctacgcaccgccggcacaatctgtttggagaccttcaaggacttcccccagatgggccgtttcacactgcgagacgaaggaaaaaccatcgccatcggaaaggtgcttaagctggtgcctgagaaagactag

SEQ ID NO: 47141 - DNA, 1911 bp, Artificial Sequence
  derived and/or modified sequence
atggaccctgggtctggtggcggtggcggaggtggcggaggcggtggctcctcctccggttcatccagcagtgactcggcgccagattgctgggatcaggccgacatggaagcccctggtcctggaccatgtggtggtggaggatctttggcggctgccgctgaggctcaacgggaaaatctttccgctgcattcagccgtcagttgaacgtgaatgctaaaccgttcgtgcctaacgttcacgccgctgagtttgtgccatctttcctgcgcggtcccgcagctcccccacccccagtgggcggtgccgctaataatcacggcgcagggtccggagctggaggaagggctgcacccgtggagtcctcccaagaagagcagtctctgtgcgaaggcagtaattcagctgtgagcatggagctcagtgagccgatcgaaaacggagaaacggagatgagcccagaggagagctgggaacacaaggaggagattagcgaagctgaacccggtggaggcagtctgggagacggacgacctcccgaagagtctgctcatgaaatgatggaggaagaagaggagattcctaaaccaaaaagcgttgtggccccacctggagccccaaagaaagaacacgttaacgtcgtgttcataggacacgtggacgccggtaaatccactatcggagggcaaattatgtacctaacaggcatggtcgacaaaaggacattagaaaaatatgagcgtgaggcaaaagaaaagaaccgcgaaacatggtacctgagctgggcattggatactaaccaggaggaaagggacaaaggcaagacagtcgaggtgggccgtgcttacttcgaaacggagaagaagcacttcactattctcgatgcccctggacacaagtctttcgtcccaaatatgatcggcggagcatcacaagcagacctggctgttctggtgatctcggccagaaagggcgaatttgaaacaggatttgagaaaggaggacagacaagagaacatgccatgctcgccaagacggccggagtaaaacacttaatagtccttataaacaagatggacgatcccaccgtgaattggtcgaatgagcgctatgaggagtgcaaggagaagttggtcccatttctcaaaaaggtggggtttaatcctaaaaaagatattcatttcatgccgtgtagcggtctcaccggagcaaacctaaaggaacagtctgatttttgtccgtggtacatcgggctcccatttattccctatctggataaccttcccaattttaaccggtccgtggacggcccaatcaggctacccattgtggataaatacaaagatatgggaaccgtggttctgggtaaactggaaagcggaagtatttgtaaaggccaacagctggtgatgatgcccaataaacataatgtggaggttctgggcattctctccgatgatgttgaaaccgacacagtcgcacctggcgagaatttgaaaatccggctgaaaggcatcgaggaagaagagattctgcctggtttcattctctgcgaccctaataatttgtgtcacagtggaagaacattcgatgcccagatagtgattatcgagcacaaaagcattatatgccctggatacaacgccgtccttcatattcacacctgcattgaggaggtcgagattaccgctctgatctgtctggtagataagaaatccggtgagaagagcaaaactaggcccaggtttgttaagcaggaccaagtctgtatcgctaggctgcggaccgcaggcaccatctgtctcgaaaccttcaaagattttccacagatggggcgattcaccctgcgggacgagggtaagaccatcgcaattggtaaagtgttgaagcttgtccctgagaaggactag

SEQ ID NO: 47142 - DNA, 1911 bp, Artificial Sequence
  derived and/or modified sequence
atggaccccggcagcggcggcggcggcggcggcggcggcggcggcggcagcagcagcggcagcagcagcagcgacagcgcccccgactgctgggaccaggccgacatggaggcccccggccccggcccctgcggcggcggcggcagcctggccgccgccgccgaggcccagagagagaacctgagcgccgccttcagcagacagctgaacgtgaacgccaagcccttcgtgcccaacgtgcacgccgccgagttcgtgcccagcttcctgagaggccccgccgccccccccccccccgtgggcggcgccgccaacaaccacggcgccggcagcggcgccggcggcagagccgcccccgtggagagcagccaggaggagcagagcctgtgcgagggcagcaacagcgccgtgagcatggagctgagcgagcccatcgagaacggcgagaccgagatgagccccgaggagagctgggagcacaaggaggagatcagcgaggccgagcccggcggcggcagcctgggcgacggcagaccccccgaggagagcgcccacgagatgatggaggaggaggaggagatccccaagcccaagagcgtggtggccccccccggcgcccccaagaaggagcacgtgaacgtggtgttcatcggccacgtggacgccggcaagagcaccatcggcggccagatcatgtacctgaccggcatggtggacaagagaaccctggagaagtacgagagagaggccaaggagaagaacagagagacctggtacctgagctgggccctggacaccaaccaggaggagagagacaagggcaagaccgtggaggtgggcagagcctacttcgagaccgagaagaagcacttcaccatcctggacgcccccggccacaagagcttcgtgcccaacatgatcggcggcgccagccaggccgacctggccgtgctggtgatcagcgccagaaagggcgagttcgagaccggcttcgagaagggcggccagaccagagagcacgccatgctggccaagaccgccggcgtgaagcacctgatcgtgctgatcaacaagatggacgaccccaccgtgaactggagcaacgagagatacgaggagtgcaaggagaagctggtgcccttcctgaagaaggtgggcttcaaccccaagaaggacatccacttcatgccctgcagcggcctgaccggcgccaacctgaaggagcagagcgacttctgcccctggtacatcggcctgcccttcatcccctacctggacaacctgcccaacttcaacagaagcgtggacggccccatcagactgcccatcgtggacaagtacaaggacatgggcaccgtggtgctgggcaagctggagagcggcagcatctgcaagggccagcagctggtgatgatgcccaacaagcacaacgtggaggtgctgggcatcctgagcgacgacgtggagaccgacaccgtggcccccggcgagaacctgaagatcagactgaagggcatcgaggaggaggagatcctgcccggcttcatcctgtgcgaccccaacaacctgtgccacagcggcagaaccttcgacgcccagatcgtgatcatcgagcacaagagcatcatctgccccggctacaacgccgtgctgcacatccacacctgcatcgaggaggtggagatcaccgccctgatctgcctggtggacaagaagagcggcgagaagagcaagaccagacccagattcgtgaagcaggaccaggtgtgcatcgccagactgagaaccgccggcaccatctgcctggagaccttcaaggacttcccccagatgggcagattcaccctgagagacgagggcaagaccatcgccatcggcaaggtgctgaagctggtgcccgagaaggactag

SEQ ID NO: 47143 - DNA, 1500 bp, Artificial Sequence
  derived and/or modified sequence
atggagctgagtgaacctatcgtggaaaacggagagaccgaaatgagtcccgaggagtcttgggagcataaagaagaaatctcagaagctgaacctggggggggatcactgggcgatggacggccaccagaggagtcagctcacgaaatgatggaggaagaggaggagatcccgaaacctaagtccgtggtggcccctcccggcgcccccaagaaggagcacgtgaacgtcgtgtttatcgggcacgttgacgctggaaaatcaactatcggggggcagataatgtacctgacgggtatggtagataaacgaacgttggagaagtacgagcgagaggccaaagaaaagaatagagagacttggtacttgagctgggccctcgacacaaatcaagaggaaagggataaaggcaagacagtggaggtagggcgggcctacttcgagacagagaagaaacatttcacgatactggatgctccaggtcacaaatccttcgtcccaaatatgatcgggggcgcctcacaggcagacctcgctgtgcttgttatttccgctaggaaaggcgagttcgagaccggattcgagaagggagggcagacacgggaacacgcgatgctggcaaaaaccgcgggggtgaaacacctgatagtgctgattaacaaaatggatgaccctacggttaattggtctaatgaacggtatgaagaatgtaaagagaagctcgttccattcctgaagaaggtggggtttaatcccaaaaaagacattcacttcatgccctgctctggcctaacaggtgcaaatctaaaagagcagtcggacttttgcccatggtatatagggctgccgttcattccatatctcgataacctgccaaacttcaaccgttctgttgatggccccataaggctgcccatcgtcgataagtacaaagacatgggcacagtagttttggggaaactagagagcggaagtatctgcaaagggcagcagctggttatgatgccgaataaacacaacgtagaggtgctcggtattctgtcagatgacgtggagacagataccgttgcccccggagagaacttgaagattcgtctgaaaggtattgaggaagaggaaattctgcccggctttattctttgtgatcctaataacctgtgccacagtggacggactttcgatgcccagatcgtcattattgaacacaaaagcattatttgcccgggatacaacgccgtcctccacatccacacatgcattgaggaggtagagatcaccgcacttatatgtttggtagataagaagagcggagagaaaagcaagacgcggccccgctttgttaagcaggatcaggtatgtatcgcaaggctgcggaccgccggcactatctgtttggaaacttttaaggactttcctcagatgggccgcttcacactgagggatgagggcaagactattgcaatcggaaaggtgttgaagctggtccccgagaaggactag

SEQ ID NO: 47144 - DNA, 1500 bp, Artificial Sequence
  derived and/or modified sequence
atggagctgtctgagcccatcgtggagaatggagaaacagagatgagccctgaggagagctgggagcacaaggaggagatcagcgaggccgagcccggcggcggcagcctgggagatggccggcccccagaggagagcgcccacgagatgatggaggaggaggaggagatccccaagcccaagtctgtggtggcccctcctggggcccccaagaaggagcacgtgaatgtggtgttcatcggccacgtggatgctgggaagagcaccatcggcggccagatcatgtacctgaccggcatggtggacaagaggaccctggagaagtatgagcgggaggccaaggagaagaaccgggagacctggtacctgtcctgggccctggacaccaaccaggaggagcgggacaagggcaagacagtggaggtgggccgggcctactttgaaacagagaagaagcacttcaccatcctggatgcccctggccacaagagctttgtgcccaacatgattggaggagccagccaggccgacctggccgtgctggtgatcagcgccaggaaaggagaatttgagaccggctttgagaagggcggccagacccgggagcacgccatgctggccaagacagctggggtgaagcacctgattgtgctgatcaacaagatggatgaccccaccgtgaactggagcaatgaaagatatgaggagtgcaaggagaagctggtgcccttcctgaagaaggtgggcttcaaccccaagaaggacatccacttcatgccctgcagcggcctgactggagccaacctgaaggagcagagcgacttctgcccctggtacatcggcctgcccttcatcccctacctggacaacctgcccaacttcaacagatctgtggatggccccatccggctgcccatcgtggacaagtacaaggacatgggcaccgtggtgctgggcaagctggagagcggcagcatctgcaagggccagcagctggtgatgatgcccaacaagcacaacgtggaggtgctgggcatcctgagtgatgatgtggagacagacacagtggcccctggagagaacctgaagatccggctgaagggcatcgaggaggaggagatcctgcccggcttcatcctgtgtgaccccaacaacctgtgccacagcggccgcacctttgatgcccagatcgtcatcatcgagcacaagagcatcatctgccccggctacaatgctgtgctgcacatccacacctgcatcgaggaggtggagatcacagccctgatctgcctggtggacaagaagagcggggagaagagcaagacccggcccaggtttgtgaagcaggaccaggtgtgcatcgcccggctgaggacagctggcaccatctgcctggagaccttcaaggacttcccccagatgggccgcttcaccctgagagatgagggcaagaccatcgccatcggcaaggtgctgaagctggtgcctgagaaggactag

SEQ ID NO: 47145 - DNA, 1500 bp, Artificial Sequence
  derived and/or modified sequence
atggagctgagcgagcccatcgtggagaacggcgagaccgagatgtcccccgaggagtcttgggaacataaggaggagatttcagaggccgagccgggtggaggaagcctcggggatggcaggccacccgaggaatctgcgcacgaaatgatggaggaagaggaggaaatcccaaagcctaagtcagttgtggccccacctggcgcacctaaaaaggagcacgtgaatgtggtcttcattggccatgtggacgctggcaagtcaaccattgggggacagatcatgtatctcacgggtatggttgataaacggacacttgagaaatatgaaagagaggcgaaggaaaaaaatcgggaaacttggtatctatcatgggcattagacacaaatcaagaggagagagacaagggaaaaaccgtcgaggtagggcgggcatacttcgagacagaaaagaaacattttaccattttagatgccccgggccacaagtcctttgttcccaacatgataggtggcgccagtcaggccgacttggccgtgctcgtcatatccgcgaggaagggagagtttgagacgggcttcgagaaggggggacagaccagggagcatgcgatgttggccaaaaccgctggcgtaaagcatctgatcgtgctgatcaacaaaatggatgatcctacagtgaactggagcaacgagcgatacgaagagtgcaaagagaagctggtcccatttctcaagaaagtcgggttcaatcccaaaaaggatattcattttatgccctgttcagggctgaccggcgccaaccttaaagagcagtccgatttttgtccatggtatattggtctcccgttcataccctatcttgacaatctgcccaattttaatcggagtgttgacgggcctatacgtctgccaattgtcgataagtacaaagacatgggaaccgtggtgctggggaagcttgaatctggttctatctgtaaaggacagcagttggtgatgatgccaaataagcacaacgtggaagtgctgggtatcctgagtgacgatgtggaaaccgacaccgtagcccccggagagaacctcaagattagactgaagggtatcgaggaagaagagattctcccgggcttcatcctttgtgaccccaataacttatgtcatagcgggaggacattcgacgcccaaatcgtgatcatagagcacaagagtataatatgtcccggctataacgccgtcctgcacattcacacctgcatcgaggaggtggaaatcactgcgctgatttgcttggttgacaagaagagcggagagaagtctaagactagacctcgattcgttaagcaggaccaggtttgcatcgcacgcctgcggaccgccggaaccatctgtcttgagactttcaaggattttccccagatgggacggtttacacttagggacgaagggaagacgattgcaattggtaaggtgctgaagctggttccagagaaagattag

SEQ ID NO: 47146 - DNA, 1500 bp, Artificial Sequence
  derived and/or modified sequence
atggagctcagtgagcccatcgtggaaaatggggagaccgaaatgagtccagaagagtcatgggagcataaggaggagatttctgaagctgagccaggcggtggaagtctgggcgacgggaggccacctgaggagtccgcccacgagatgatggaggaagaagaggaaatccctaaaccaaaatctgttgtcgcccctcccggtgcacccaagaaggaacacgtaaacgttgtgttcatcggacatgtggatgccggaaaatcgacaattggtggccagatcatgtatctcactggaatggtcgataagcggacgctcgagaagtatgaaagagaagcgaaagaaaagaaccgtgagacttggtatctcagctgggctctcgacacgaaccaggaagaaagagacaaaggcaaaacagtcgaagtaggacgggcatacttcgagacagagaaaaaacatttcaccatccttgacgcccctgggcataagtctttcgttccaaatatgatcggtggcgcaagccaggcagacttggctgtcctagtgatcagcgccaggaaaggggaattcgagacaggatttgagaaaggcggacagacacgcgaacacgccatgctcgccaaaaccgccggtgtgaaacatctgatcgtcttgatcaataagatggacgacccaactgtgaattggtcgaatgagcggtacgaagagtgtaaagagaagctggtgccttttttgaaaaaagtaggctttaatcccaaaaaagatattcattttatgccatgcagtgggcttactggagccaacctgaaggaacagtctgatttttgtccatggtatattgggctaccattcataccctacctcgataacctcccaaattttaaccggtcagtggacggaccaataagactgcctatcgttgataagtataaagacatgggcaccgttgtcctgggcaaactcgagtcagggtcaatttgtaaggggcaacaactcgtgatgatgcctaacaagcacaatgtggaagtcttgggtatcctatccgacgatgtagagaccgatactgtcgcccctggcgagaacctcaaaatccgcctcaaaggtatcgaggaagaagaaattctcccgggattcatcctgtgcgacccgaacaatctatgtcattcgggtaggacatttgatgcccagatagtcatcatcgagcataagagcataatctgccccggatataacgccgttcttcacatccatacctgcattgaggaggtggaaatcacagccctaatctgcctggtagataaaaagtccggggagaagagcaagacacggccacgattcgtgaagcaagatcaagtttgcatcgccagacttaggactgctggcactatttgccttgagacgttcaaagacttccctcagatgggccgatttacactcagggacgagggcaagacgattgctataggcaaagtgctcaagctcgttcctgagaaggattag

SEQ ID NO: 47147 - DNA, 1500 bp, Artificial Sequence
  derived and/or modified sequence
atggagctgagcgagcccatcgtggagaacggcgagaccgagatgagccccgaggagagctgggagcacaaggaggagatcagcgaggccgagcccggcggcggcagcctgggcgacggcagaccccccgaggagagcgcccacgagatgatggaggaggaggaggagatccccaagcccaagagcgtggtggccccccccggcgcccccaagaaggagcacgtgaacgtggtgttcatcggccacgtggacgccggcaagagcaccatcggcggccagatcatgtacctgaccggcatggtggacaagagaaccctggagaagtacgagagagaggccaaggagaagaacagagagacctggtacctgagctgggccctggacaccaaccaggaggagagagacaagggcaagaccgtggaggtgggcagagcctacttcgagaccgagaagaagcacttcaccatcctggacgcccccggccacaagagcttcgtgcccaacatgatcggcggcgccagccaggccgacctggccgtgctggtgatcagcgccagaaagggcgagttcgagaccggcttcgagaagggcggccagaccagagagcacgccatgctggccaagaccgccggcgtgaagcacctgatcgtgctgatcaacaagatggacgaccccaccgtgaactggagcaacgagagatacgaggagtgcaaggagaagctggtgcccttcctgaagaaggtgggcttcaaccccaagaaggacatccacttcatgccctgcagcggcctgaccggcgccaacctgaaggagcagagcgacttctgcccctggtacatcggcctgcccttcatcccctacctggacaacctgcccaacttcaacagaagcgtggacggccccatcagactgcccatcgtggacaagtacaaggacatgggcaccgtggtgctgggcaagctggagagcggcagcatctgcaagggccagcagctggtgatgatgcccaacaagcacaacgtggaggtgctgggcatcctgagcgacgacgtggagaccgacaccgtggcccccggcgagaacctgaagatcagactgaagggcatcgaggaggaggagatcctgcccggcttcatcctgtgcgaccccaacaacctgtgccacagcggcagaaccttcgacgcccagatcgtgatcatcgagcacaagagcatcatctgccccggctacaacgccgtgctgcacatccacacctgcatcgaggaggtggagatcaccgccctgatctgcctggtggacaagaagagcggcgagaagagcaagaccagacccagattcgtgaagcaggaccaggtgtgcatcgccagactgagaaccgccggcaccatctgcctggagaccttcaaggacttcccccagatgggcagattcaccctgagagacgagggcaagaccatcgccatcggcaaggtgctgaagctggtgcccgagaaggactag

SEQ ID NO: 47148 - DNA, 750 bp, Artificial Sequence
  derived and/or modified sequence
atgggcacccccagaatccagcacctgctgatcctgctggtgctgggcgccagcctgctgaccagcggcctggagctgtactgccagaagggcctgagcatgaccgtggaggccgaccccgccaacatgttcaactggaccaccgaggaggtggagacctgcgacaagggcgccctgtgccaggagaccatcctgatcatcaaggccggcaccgagaccgccatcctggccaccaagggctgcatccccgagggcgaggaggccatcaccatcgtgcagcacagcagcccccccggcctgatcgtgaccagctacagcaactactgcgaggacagcttctgcaacgacaaggacagcctgagccagttctgggagttcagcgagaccaccgccagcaccgtgagcaccaccctgcactgccccacctgcgtggccctgggcacctgcttcagcgcccccagcctgccctgccccaacggcaccaccagatgctaccagggcaagctggagatcaccggcggcggcatcgagagcagcgtggaggtgaagggctgcaccgccatgatcggctgcagactgatgagcggcatcctggccgtgggccccatgttcgtgagagaggcctgcccccaccagctgctgacccagcccagaaagaccgagaacggcgccacctgcctgcccatccccgtgtggggcctgcagctgctgctgcccctgctgctgcccagcttcatccacttcagctag

SEQ ID NO: 47149 - DNA, 750 bp, Artificial Sequence
  derived and/or modified sequence
atgggtacgccacgaatccaacacctgttgattctgttggttctgggggcctccctgttaaccagcggtctagagctgtattgtcaaaaaggcctgtccatgactgtggaggccgacccagcaaatatgttcaattggacaacagaagaagtcgagacttgtgacaaaggagctttatgccaggagacaatcctcattatcaaagccgggacggagaccgccatcctcgccaccaagggctgtatacccgagggggaagaggccattaccatcgttcagcactctagcccccctggactgatcgtcacctcatacagcaactattgtgaggacagcttttgtaatgacaaggattccctgtcccagttctgggagtttagtgagacaactgctagcaccgtttccacaacgttacactgtcccacttgcgtcgccctgggcacgtgctttagcgccccatctctcccttgtcccaatgggacaacacggtgctaccagggaaaactggagatcaccggtggagggattgagagctcagtggaggtgaaaggttgcacagcaatgattggatgtcggttaatgtcaggcatcctggcggtcggcccaatgtttgtgagagaagcttgccctcaccagttgctcacccaaccgcggaagacagagaatggtgcaacatgtctgcctatcccagtgtggggtcttcagcttctgctgccccttcttttgccttcgtttatccatttttcatag

SEQ ID NO: 47150 - DNA, 750 bp, Artificial Sequence
  derived and/or modified sequence
atgggcaccccccgcatccagcacctgctgatcctgctggtgctgggcgccagcctgctgaccagcggcctggagctgtactgccagaagggcctgtccatgacagtggaggccgaccctgccaacatgttcaactggaccacagaggaggtggagacctgtgacaagggggccctgtgccaggagaccatcctgatcatcaaggccggcacagaaacagccatcctggccaccaagggctgcatccctgagggggaggaggccatcaccatcgtgcagcacagcagccccccaggcctgattgtgaccagctacagcaactactgtgaggacagcttctgcaatgacaaggacagcctgagccagttctgggagttcagcgagaccacagccagcacagtgtccaccaccctgcactgccccacctgtgtggccctgggcacctgcttcagcgcccccagcctgccctgccccaacggcaccacccgctgctaccagggcaagctggagatcaccggcggcggcatcgagagctctgtggaggtgaagggctgcacagccatgattggctgccgcctgatgagcggcatcctggccgtgggccccatgtttgtgcgggaggcctgcccccaccagctgctgacccagcccaggaagacagaaaatggagccacctgcctgcccatccctgtgtggggcctgcagctgctgctgcccctgctgctgcccagcttcatccacttctcctag

SEQ ID NO: 47151 - DNA, 750 bp, Artificial Sequence
  derived and/or modified sequence
atgggcaccccccggatccagcacctgctgatcctgctggtgctgggcgcgtctctgctgacaagtggtcttgaactctattgtcagaagggactgtctatgaccgtggaggccgatccagccaatatgttcaattggacaactgaagaggtcgaaacctgtgacaagggagccctttgtcaagagacaatcttaattattaaggccggtactgagacagctattttggctacaaaagggtgtatccccgagggcgaggaagccattacaatcgtgcaacattcatctccccccgggctaatcgttacaagctacagtaactactgtgaagactccttttgtaatgacaaggattcgctatctcaattctgggagtttagtgagaccacggcgtccacagtcagtaccactctgcattgcccaacctgtgtcgccctgggcacatgttttagtgcgcctagtctcccatgcccaaacggaactacccgctgttaccaaggtaaactcgagatcaccggtgggggaatcgaatcctctgttgaggtcaagggttgtactgcaatgattggctgtcggctgatgtctggaatactggccgtgggccctatgtttgtgagagaagcttgcccgcaccagctactgacccagcctcgaaagaccgagaacggggccacctgcctgcccattccagtctggggactccaattgttactccccctgctcctgccatcgttcatccacttcagctag

SEQ ID NO: 47152 - DNA, 750 bp, Artificial Sequence
  derived and/or modified sequence
atggggacccctagaatccagcacctgctcatccttttggtgctgggcgcttcgctgctgacttcaggactcgagttatattgccagaaggggttgagcatgacagtggaggctgatcctgccaacatgtttaactggacaacagaggaagtggaaacatgtgataaaggtgccctgtgtcaggagacaatcctgataataaaggctggcaccgagacagccatcctcgccactaagggatgcattccagagggagaagaagccattacgatagtgcagcattcgagtccgcctgggctcattgttacttcctattcgaactactgtgaagatagcttttgcaatgataaggattctctaagtcagttttgggagttttcagagacgactgcctcaaccgtgagtaccacgctccactgtccaacatgcgtggctctcggtacctgtttctctgctccatccctcccctgtcctaatgggacaaccaggtgttatcagggaaagttggagatcactgggggtggcattgagtcttccgtggaagtgaaaggttgcaccgccatgatcggctgtagactgatgagcggcattctcgctgtgggcccaatgtttgtccgcgaggcctgcccccaccagctgctcactcaaccacgcaagaccgaaaacggcgctacctgcttgcccattcccgtgtgggggctgcagctcctgcttcctctgctgttaccatcttttatacacttcagttag

SEQ ID NO: 47153 - protein, 337 aa, Artificial Sequence
  derived and/or modified sequence
MAAPEPLRPRLCRLVRGEQGYGFHLHGEKGRRGQFIRRVEPGSPAEAAALRAGDRLVEVNGVNVEGETHHQVVQRIKAVEGQTRLLVVDQETDEELRRRQLTCTEEMAQRGLPPAHDPWEPKPDWAHTGSHSSEAGKKDVSGPLRELRPRLCHLRKGPQGYGFNLHSDKSRPGQYIRSVDPGSPAARSGLRAQDRLIEVNGQNVEGLRHAEVVASIKAREDEARLLVVDPETDEHFKRLRVTPTEEHVEGPLPSPVTNGTSPAQLNGGSACSSRSDLPGSDKDTEDGSAWKQDPFQESGLHLSPTAAEAKEKARAMRVNKRAPQMDWNRKREIFSNF

SEQ ID NO: 47154 - DNA, 1014 bp, Artificial Sequence
  derived and/or modified sequence
atggccgcccccgagcccctgagacccagactgtgcagactggtgagaggcgagcagggctacggcttccacctgcacggcgagaagggcagaagaggccagttcatcagaagagtggagcccggcagccccgccgaggccgccgccctgagagccggcgacagactggtggaggtgaacggcgtgaacgtggagggcgagacccaccaccaggtggtgcagagaatcaaggccgtggagggccagaccagactgctggtggtggaccaggagaccgacgaggagctgagaagaagacagctgacctgcaccgaggagatggcccagagaggcctgccccccgcccacgacccctgggagcccaagcccgactgggcccacaccggcagccacagcagcgaggccggcaagaaggacgtgagcggccccctgagagagctgagacccagactgtgccacctgagaaagggcccccagggctacggcttcaacctgcacagcgacaagagcagacccggccagtacatcagaagcgtggaccccggcagccccgccgccagaagcggcctgagagcccaggacagactgatcgaggtgaacggccagaacgtggagggcctgagacacgccgaggtggtggccagcatcaaggccagagaggacgaggccagactgctggtggtggaccccgagaccgacgagcacttcaagagactgagagtgacccccaccgaggagcacgtggagggccccctgcccagccccgtgaccaacggcaccagccccgcccagctgaacggcggcagcgcctgcagcagcagaagcgacctgcccggcagcgacaaggacaccgaggacggcagcgcctggaagcaggaccccttccaggagagcggcctgcacctgagccccaccgccgccgaggccaaggagaaggccagagccatgagagtgaacaagagagccccccagatggactggaacagaaagagagagatcttcagcaacttctag

SEQ ID NO: 47155 - DNA, 1014 bp, Artificial Sequence
  derived and/or modified sequence
atggcggcacctgagccgctgcggccgcgcctgtgtcgtttggtgcgaggagagcagggctatgggttccatctccacggcgaaaaggggcgcaggggtcagttcataagaagagtcgagcctggttcccctgctgaagcagctgctttgagagccggtgatcgccttgtggaggtgaatggcgttaacgtggaaggcgagacacaccatcaggttgtgcaacgcattaaggccgtggagggccagactcgacttttggtggttgaccaggaaacagatgaggaactgcgccggaggcagctcacctgcacagaggagatggcgcagagaggcctgcccccagcccatgatccttgggaaccgaagcctgactgggcccataccggtagtcactctagcgaagcaggaaaaaaagacgtgagcggaccactaagagaactgcgaccacggctctgtcatctgagaaaaggccctcagggctatggatttaatctgcatagtgataagtccaggccaggccagtacattcgatccgttgatcctgggtcccctgcggccaggtctggactgagagcacaggatcgtctgattgaagtcaatggccagaatgtggagggcctccggcacgccgaggtagtcgctagtattaaagcacgggaagacgaagctagacttttggtagtggatcctgaaactgacgagcattttaaacgcctgcgtgtgacacccacggaggagcacgtcgaggggcccctcccaagtcccgtgacgaatgggacctcccccgcccagcttaacggcggatccgcttgctcgtcccgtagcgaccttcccggaagcgataaggataccgaagacggctctgcgtggaagcaggatccctttcaggagtcaggactgcatctgagtcccaccgccgctgaggccaaggaaaaggccagggcaatgagggtcaataaaagagccccacagatggattggaacagaaaaagagagatcttctctaacttttag

SEQ ID NO: 47156 - DNA, 1014 bp, Artificial Sequence
  derived and/or modified sequence
atggccgcccctgagcccctgcggccccggctgtgccgcctggtgcggggggagcagggctacggcttccacctgcacggggagaagggcagaagaggccagttcatcagaagagtggagcccggcagccctgctgaggccgccgccctgcgggccggggaccggctggtggaggtgaatggagtgaatgtggagggggagacccaccaccaggtggtgcagaggatcaaggctgtggagggccagacccggctgctggtggtggaccaggagacagatgaggagctgcggcggcggcagctgacctgcacagaggagatggcccagaggggcctgcccccagcccatgacccctgggagcccaagccagactgggcccacacaggcagccacagcagcgaggccggcaagaaggatgtgtctggccccctgcgggagctgcggccccggctgtgccacctgaggaagggcccccagggctacggcttcaacctgcacagcgacaagagccggcccggccagtacatccgctctgtggaccccggcagccctgctgcccggagcggcctgcgggcccaggaccggctgattgaggtgaatggccagaatgtggagggcctgcggcatgctgaggtggtggccagcatcaaggcccgggaggatgaggcccggctgctggtggtggaccctgagacagatgagcacttcaagaggctgcgggtgacccccacagaggagcacgtggagggccccctgcccagccctgtgaccaacggcaccagccctgcccagctgaatggaggcagcgcctgcagcagcagaagtgacctgcccggcagtgacaaggacacagaagatggcagcgcctggaagcaggaccccttccaggagagcggcctgcacctgagccccacagctgctgaggccaaggagaaggcccgggccatgagggtgaacaagagggccccccagatggactggaacaggaagcgggagatcttcagcaacttctag

SEQ ID NO: 47157 - DNA, 1014 bp, Artificial Sequence
  derived and/or modified sequence
atggccgcccccgagcccctgcggccccggctgtgccggctggtgcgcggagaacagggctacggattccacctgcacggggagaaagggagacgcggacagttcatcagaagagtcgaacctgggagccccgccgaggccgcagctttgcgtgctggcgaccgcctggtggaggtgaacggcgtgaatgtcgagggagagactcatcatcaagttgtgcagaggatcaaagctgtggaagggcaaactaggcttctcgtggtggatcaggagaccgatgaggagcttaggagaaggcagctgacctgtacggaggaaatggcccagcgcggactcccacctgctcacgacccttgggaaccaaagcccgattgggcccatactggctcacattcctctgaggccggcaaaaaggatgtgagtgggcctctccgtgagctgcgacctcggctctgccacctgagaaaaggaccgcaggggtatggattcaatctgcattctgacaaaagccgacccggacaatacataaggagtgtcgaccctgggtcccctgctgcacgatctggtctccgggctcaggaccgcctgatcgaggtgaacgggcaaaatgttgaaggcctgagacacgcagaggtggtcgcaagtataaaagcacgggaagatgaagcacgactccttgtggtggacccagaaactgatgaacactttaagcgcctacgagtaactcccacagaggaacacgtagagggccctttgccttctcctgtgactaacgggacctccccagcccagctcaacgggggtagtgcttgtagctccagaagcgacctgccgggaagtgacaaagacacagaggacggcagtgcttggaagcaggacccattccaggaaagcgggctccacctgtcgcccaccgcggccgaggctaaagaaaaggctcgggcgatgcgtgtaaacaaaagggcccctcagatggattggaaccgaaaaagagagatcttcagtaatttttag

SEQ ID NO: 47158 - DNA, 1014 bp, Artificial Sequence
  derived and/or modified sequence
atggccgctccagagcccctgcggcctaggctatgtaggcttgttcgcggagagcagggctacggatttcacctccacggtgaaaagggtagaaggggccaatttattcgcagagtcgagcctggctccccagctgaagccgctgcgctcagagctggcgacagactagttgaggtgaacggtgtcaacgtggagggtgagacgcatcaccaagttgtgcagcgtatcaaggccgtggaaggccagacacgcctgctggtggtggaccaggagaccgatgaagaacttcgcagacgtcagttgacctgcactgaagagatggctcaacgtggactgccaccagctcatgacccatgggagccaaagcccgactgggcacataccgggagtcattctagcgaagcaggaaagaaagatgtcagtggccctctgcgggagctccgccctcggctttgtcacctgcgcaaaggaccacagggctacgggtttaacctgcactctgataaatcccggccaggacagtacatccggtcagtggaccctgggagccccgcagcccgatcaggattgagggctcaggacagattaattgaggtcaatgggcaaaacgtggaagggctccgccatgccgaagtggtggcttccattaaggcgcgtgaagacgaagctaggttgctcgtcgtggatccagaaaccgacgagcattttaagcgactccgagtcacacctacagaagagcacgttgagggaccgttaccaagccctgtcaccaacggcacaagtcccgctcaactcaacggcggttctgcttgctctagccgctctgatcttcccggatcggataaggacaccgaggatggatctgcctggaaacaagacccctttcaggagtctggactgcatctctctccgacggccgcagaagccaaagaaaaagcaagggccatgagagtgaacaaaagagctccgcagatggactggaatcgcaagagggaaatcttctccaatttttag

SEQ ID NO: 47159 - DNA, 2174 bp, Artificial Sequence
  derived and/or modified sequence
gaggcgacgggagccgaacaggagccgccgctgaagccaccgccgggtgcccagcgccgccgccgcccccgagctcccccgcgcccctgcccgcgggcggccggtgggcagcgggcgccatggccgcgccggagccgctgcggccgcgcctgtgccgcttggtgcgcggagagcagggctacggcttccacctgcacggcgagaagggccgccgcgggcagttcatccggcgcgtggaacccggttcccccgccgaggccgccgcgctgcgcgctggggaccgcctggtcgaggtcaacggcgtcaacgtggagggcgagacgcaccaccaggtggtgcaaaggatcaaggctgtggaggggcagactcggctgctggtggtggaccaggagacagatgaggagctccgccggcggcagctgacctgtaccgaggagatggcccagcgagggctcccacccgcccacgacccctgggagccgaagccagactgggcacacaccggcagccacagctccgaagctggcaagaaggatgtcagtgggcccctgagggagctgcgccctcggctctgccacctgcgaaagggacctcagggctatgggttcaacctgcatagtgacaagtcccggcccggccagtacatccgctctgtggacccgggctcacctgccgcccgctctggcctccgcgcccaggaccggctcattgaggtgaacgggcagaatgtggagggactgcgccatgctgaggtggtggccagcatcaaggcacgggaggacgaggcccggctgctggtcgtggaccccgagacagatgaacacttcaagcggcttcgggtcacacccaccgaggagcacgtggaaggtcctctgccgtcacccgtcaccaatggaaccagccctgcccagctcaatggtggctctgcgtgctcgtcccgaagtgacctgcctggttccgacaaggacactgaggatggcagtgcctggaagcaagatcccttccaggagagcggcctccacctgagccccacggcggccgaggccaaggagaaggctcgagccatgcgagtcaacaagcgcgcgccacagatggactggaacaggaagcgtgaaatcttcagcaacttctgagccccttcctgcctgtctcgggaccctgggacccctcccgcacggaccttgggcctcagcctgccccgagctcccccagcctcagtggactggagggtggtcctgccattgcccagaaatcagccccagccccggtgagcccccatcctgcccctgcccaccaggtactgggggcctgtggcagcaagatagggggagagagacccagagatgtgagagagagtcagagacagagacagagagagagagagagagacacagagagagacagagagagagcgagcgagcgcgcggcagccgcggggcgagggcctttgctgctctgccggggcctgctgactgaaaggaatttgtgtttttgctttttttccaaaaagatctccagctccacacatgtttccacttaataccagagacccccccccttcccctcccccttcccctcccccttgggacgcgctctaaataattgcaataaaacaaacctttctctgcaaaccatttcctccccgccccctcccctcagcagcggccgtcctgagtgggagtccctgggacttcccagtggccaagttggggcgcccagcctcttcgtggggaccttgggtaaggccagggaggcctgatgtggccgtaggagctgcccctgcccacctgccctggtgtgggggtccctaggccacaccctgctccccacccagctaccctgtgcgcctgtgccctgctgggggcctgggctctccgaggggcctgaggatggaggccccacgtccccgaggagggcggcctctggacaggcccctcattccgcgcggcagctcccaggcctggggaacgtaggtgtgtgagagcggcacccgggaaggacgcctggcctctggctcagccctgcttggcgggctcccccgtggacaccctgttgactttgcacttccctcccgggccccgcacccccgaaccgaccaccgatcgaccggcaccgctgttgcctcgtaagccatagcgcatgcgcgctctcaggataaacaggccctgcctggg

SEQ ID NO: 47160 - protein, 335 aa, Artificial Sequence
  derived and/or modified sequence
MGPLSAPPCTQHITWKGLLLTASLLNFWNLPITAQVTIEALPPKVSEGKDVLLLVHNLPQNLAGYIWYKGQLMDLYHYITSYVVDGQINIYGPAYTGRETVYSNASLLIQNVTREDAGSYTLHIIKRGDRTRGVTGYFTFNLYLKLPKPYITINNSKPRENKDVLAFTCEPKSENYTYIWWLNGQSLPVSPRVKRPIENRILILPSVTRNETGPYECEIRDRDGGMRSDPVTLNVLYGPDLPSIYPSFTYYRSGENLYLSCFAESNPPAEYFWTINGKFQQSGQKLSIPQITTKHRGLYTCSVRNSATGKESSKSMTVEVSAPSGIGRLPLLNPI

SEQ ID NO: 47161 - DNA, 1008 bp, Artificial Sequence
  derived and/or modified sequence
atgggaccgctgagcgcccctccttgtacccaacacatcacctggaagggactgctgttgaccgcctccttactgaacttttggaatcttcctattaccgctcaggttaccattgaggccctgcctccaaaagtatccgaaggtaaggatgtactcctactcgttcacaatcttcctcagaatctcgccggttacatctggtacaaggggcagctcatggacctatatcattacatcacaagctacgtggtggacggccagataaatatctacggcccagcctatactggacgtgagactgtctactcgaatgccagcctgctcattcagaatgtgacacgggaggatgccggtagttacacactgcatatcatcaaacgaggcgaccgaacaaggggggtgaccgggtactttaccttcaacctgtatctgaaactgcccaagccctatatcacaatcaataattctaagcctcgagaaaataaggacgttctggcctttacatgcgagccaaagagcgagaactatacctacatttggtggcttaatggtcaatctctcccagtctctcccagagtgaagaggcctattgaaaaccgcatcctcattctcccctcagtgactagaaacgaaacaggtccctacgaatgtgaaattcgcgacagagatggagggatgcggagtgatcccgtgaccctgaacgttctgtacggccctgatcttccgagcatttacccttcttttacgtactatagaagtggtgagaacctctacctctcctgctttgcagaaagcaacccaccagcagaatatttttggacaatcaatggcaaattccagcagtcaggccagaaactgagcattccccaaattacgactaagcaccgcggtctttatacgtgttccgttaggaacagtgccaccggaaaagagtcctcaaaatccatgaccgtggaggtgagcgccccatccggcatagggcggctgcccctgctgaaccccatttag

SEQ ID NO: 47162 - DNA, 1008 bp, Artificial Sequence
  derived and/or modified sequence
atgggccccttaagcgcgcctccatgcactcagcacatcacctggaaaggacttcttcttactgcctctttacttaatttctggaatctgcccatcaccgcacaggtcaccatcgaggccctccctccgaaggtttctgaagggaaagacgtgctgctgctcgtgcacaatctgcctcagaatctggctggctatatatggtataagggtcagctcatggatctgtaccattacattacttcctacgtcgttgacggccagatcaatatctacggtcctgcatacaccgggcgggaaacagtctactcaaatgcctccttgctcatacagaacgttaccagagaggatgccggaagctacaccctgcacatcatcaagaggggcgatcgcaccaggggagtgactgggtactttacctttaacctgtaccttaaactgccaaagccctacattactattaataactccaagcccagagaaaataaggatgtcctggcttttacatgcgagcccaaatccgagaattatacctatatctggtggcttaatggacagagcctgcccgtatccccacgggttaaacgaccaattgagaatagaattcttatcctaccaagcgttactcggaacgagacggggccctacgagtgtgagatccgggatagggacggcggcatgaggtccgatccggtaaccctcaatgttctctacggacccgacctcccatccatttatcctagctttacttactatcgcagtggcgagaatttatatctcagttgtttcgcagaaagcaatcccccagccgaatacttctggactatcaatggaaaatttcagcaaagcggtcagaaactttcgattccacagataacgactaaacacagaggcctgtacacctgcagtgtccgcaactctgccaccgggaaggaatctagcaaatccatgacagtcgaagtgtccgccccaagcggcattgggcgtctgcctctactgaatcctatttag

SEQ ID NO: 47163 - DNA, 1008 bp, Artificial Sequence
  derived and/or modified sequence
atgggcccactgagcgctccaccctgcacacaacacatcacttggaaaggactactcctgaccgcttcacttctgaatttctggaatttgccaataaccgcccaggttactattgaggctcttccccccaaagtgtcagaggggaaggacgttttgctattagtgcacaatctacctcagaatcttgccgggtacatttggtacaagggacagcttatggatctctatcattatatcacctcgtacgtggtggatgggcagataaatatctacggaccggcctacactggacgggagaccgtgtactcgaacgccagccttttaattcagaacgtcactcgggaggacgccggctcctacactctgcacattatcaaaaggggggaccgcactagaggggtcacagggtattttacattcaacctctatcttaaacttcctaagccctacataacgattaacaattcaaaacccagagaaaataaggatgtcctggcttttacatgtgagccaaaatccgaaaactacacctatatttggtggttaaatggacagagcttgccggtaagtccacgcgtgaagcgcccaattgagaatagaatcctgattttgccatccgtcacgaggaacgaaaccggcccctacgagtgtgagatccgagatagggatggaggtatgagatccgaccccgtgacacttaatgtgctttacggaccagacctaccctctatttacccatcattcacgtattaccggagcggcgaaaacctatatctgtcgtgcttcgcagagtccaacccgcctgcagagtatttctggaccattaatggtaaattccagcagagcggacagaaactgtcaatcccacaaatcactaccaaacatagggggctctatacatgttccgtgcgcaattctgccacgggaaaagaaagcagcaagagtatgacggtcgaggtgagcgccccgtccggcatagggaggctccccctgctgaatccaatttag

SEQ ID NO: 47164 - DNA, 1008 bp, Artificial Sequence
  derived and/or modified sequence
atgggccccctgagcgccccaccctgcacccagcacatcacctggaagggcctgctgctgacagccagcctgctgaacttctggaacctgcccatcacagcccaggtgaccatcgaggccctgccccccaaggtgtctgagggcaaggatgtgctgctgctggtgcacaacctgccccagaacctggccggctacatctggtacaagggccagctgatggacctgtaccactacatcaccagctatgtggtggatggccagatcaacatctacggccctgcctacacaggccgggagaccgtgtacagcaatgccagcctgctgatccagaatgtgaccagagaagatgctggcagctacaccctgcacatcatcaagagaggagacaggacccggggcgtgacaggctacttcaccttcaacctgtacctgaagctgcccaagccctacatcaccatcaacaacagcaagccccgggagaacaaggatgtgctggccttcacctgtgagcccaagtctgagaactacacctacatctggtggctgaatggccagagcctgcctgtgagcccccgggtgaagaggcccatcgagaaccgcatcctgatcctgcccagcgtgaccagaaatgagaccggcccctatgaatgtgagatccgggacagagatggcggcatgagaagtgaccctgtgaccctgaatgtgctgtatggccctgacctgcccagcatctaccccagcttcacctactacagaagtggagaaaatctctacctgagctgctttgctgagagcaaccccccagctgagtacttctggaccatcaacgggaagttccagcagagcggccagaagctgagcatcccccagatcaccaccaagcaccggggcctgtacacctgcagcgtgaggaacagcgccaccgggaaggagagcagcaagtccatgacagtggaggtgtctgcccccagcggcatcggccgcctgcccctgctgaaccccatctag

SEQ ID NO: 47165 - DNA, 1008 bp, Artificial Sequence
  derived and/or modified sequence
atgggccccctgagcgcccccccctgcacccagcacatcacctggaaaggcttgttgctcacagcctcactccttaacttctggaacctgcccataacggctcaagtgacaatcgaagccctgccaccaaaggtgagtgagggcaaggatgtgctgctgctagtccataacctacctcaaaacctcgccggctacatctggtataaaggacagctgatggacctatatcattatattaccagctatgtggtggacggtcagattaacatctatggtccagcttacaccggcagagaaaccgtgtacagtaacgccagcttgctcattcagaacgtgacgcgagaggatgcaggaagctatacccttcatatcataaagagaggtgatcgcactcgtggcgtcactgggtactttacatttaatctgtatctgaagcttccgaagccatacattactattaataactccaagccacgcgaaaataaagatgttttggccttcacgtgcgagcctaaatcggaaaactacacttatatctggtggctcaacggacagagcctgcctgtgtctcctcgggtcaaacgaccaattgagaaccggattctcatactgccgtcagtcacccgaaacgagacaggcccctatgagtgcgagatccgggatagagatggcggtatgagatcagaccccgtcacactgaatgtcctgtacggccccgatctcccctcaatctacccctcattcacgtattataggagtggagaaaatctctacctgtcctgcttcgccgagagcaaccctccagcggagtacttctggactatcaacggtaagttccagcagtccggccagaagctgagcatcccccagataacaacgaaacaccgaggtctgtatacatgcagtgtccgcaattccgcaacaggaaaggaatcatcaaagtcaatgacagtggaggtgagcgccccttctgggatcggccggctgccactgcttaaccctatctag

SEQ ID NO: 47166 - DNA, 1008 bp, Artificial Sequence
  derived and/or modified sequence
atgggccccctgagcgcccccccctgcacccagcacatcacctggaagggtttacttcttactgcttccctgctgaacttctggaacctgcctataaccgcccaggtcacgatagaggccttaccgccgaaggtatccgagggcaaggatgtgcttctactggtgcacaacttaccccagaatctagcaggatatatctggtataagggacagctaatggatctctaccactacatcactagttatgtggtggatggacaaataaatatttatggaccggcctatactggccgcgaaaccgtgtatagtaatgctagccttctgattcagaacgtgactcgcgaagacgccgggtcctatactcttcacatcatcaagagaggtgatcgaacgaggggggtgactggttactttacatttaacctctacttgaaactgcccaaaccatacatcactatcaataattccaagccccgtgagaacaaggacgtcctcgcgtttacctgcgaaccgaaatctgagaattacacatacatttggtggttaaacggacagtctctgccagtgagtccacgcgttaaaaggcccattgagaataggatcctgatcctccccagcgtgacccgcaacgagacggggccttacgaatgcgagatccgagatagggacggggggatgcggagtgaccctgtcaccctcaatgtcctctacggaccagacctgcccagcatctatccctctttcacctattatagaagtggggagaacctgtatctctcatgttttgccgagtcaaatccgcctgccgagtacttctggactattaacggaaaatttcagcagagcggccagaagcttagcatccctcagattaccacaaaacatcgaggcttatatacatgtagtgtgcggaactctgccactgggaaagagtcctcaaagtcaatgacagtagaggtgtctgcgccaagcggaatcggccgcctgcccctgctcaaccccatttag

SEQ ID NO: 47167 - DNA, 1008 bp, Artificial Sequence
  derived and/or modified sequence
atgggccccctgagcgcccccccctgcacccagcacatcacctggaagggcctgcttctgacagcttcgctcctcaatttctggaatttaccaattaccgcacaggtcactattgaggcactccctccgaaggtctccgaaggcaaagatgtccttctactcgtacataatctccctcagaaccttgccgggtacatatggtataaaggccaactcatggacttgtatcactatatcacaagctatgtcgtcgatgggcagattaacatttacgggcccgcatacacaggtcgagagacggtctacagcaatgcatctcttctgatccagaatgttacacgcgaggacgccgggtcttacacgctgcacattataaagcggggcgaccgaactagaggggtgacaggttattttacgtttaacttgtatctcaagctgcctaagccttacatcacaatcaataattccaaaccaagggaaaataaggacgtgcttgcattcacctgcgaaccaaaatcagaaaactacacgtacatctggtggctgaatggacagtcactgcccgtgagccctcgggttaaacgccccatcgaaaaccggatcctaatactcccgagtgtgacacgaaacgaaacaggtccatacgaatgcgagattagagacagagacgggggaatgaggtccgatccagtaacactcaacgtgctctatgggcctgatctaccctcaatctacccttcatttacctactatagatcaggcgaaaacttgtacctatcttgtttcgccgaatcgaaccctcctgcagagtatttctggacgataaatggtaaattccagcaatctggtcagaagttatctataccccagattacaactaaacaccgtggattgtatacttgttctgttcgcaactcagcaactggcaaagaaagctccaagtcgatgaccgtggaggtctccgcccccagcgggattggtcgtcttcctctcctcaaccccatttag

SEQ ID NO: 47168 - DNA, 1626 bp, Artificial Sequence
  derived and/or modified sequence
ccctggagagaggctcagcacagaaggaggaaggacagcacagcctacagccgtgctcaggaagtttctggatcctaggctcagctccacagaggagaacacgcaggcgcagagaccatggggcccctctcagcccctccctgcacacagcacatcacctggaaggggctcctgctcacagcatcacttttaaacttctggaacctgcctatcactgctcaagtcacgattgaagccctgccacccaaagtttccgaggggaaggatgttcttctacttgtccacaatttgcctcagaatcttgctggctacatctggtacaaaggacaactgatggacctctaccattacattacatcatatgtagtagacggtcaaataaatatatatgggcctgcatacactggacgagaaacagtatattccaatgcatccctgctgatccagaatgtcacccgggaagacgcaggatcctacaccttacacatcataaagcgaggtgataggactagaggagtaactggatatttcaccttcaacttatacctgaagctgcccaagccctacatcaccatcaacaactcaaaacccagggagaataaggatgtcttagccttcacctgtgaacctaagagtgagaactacacctacatttggtggctaaatggtcagagcctcccggtcagtcccagggtaaagcgacccattgaaaacaggatcctcattctacccagtgtcacgagaaatgaaacaggaccctatgaatgtgaaatacgggaccgagatggtggcatgcgcagtgacccagtcaccctgaatgtcctctatggtccagacctccccagcatttacccttcattcacctattaccgttcaggagaaaacctctacttgtcctgcttcgcggaatctaacccaccggcagagtatttttggacaattaatgggaagtttcagcaatcaggacaaaagctctctatcccccaaattactacaaagcatagagggctctatacttgctctgttcgtaactcagctactggcaaggaaagctccaaatccatgacagtcgaagtctctgctccttcaggaataggacgtcttcctctccttaatccaatatagcagccgtgaagtcatttctgtatttcaggaagactggcagacagttgctttgattcttcctcaaactacttacaatcacctacagtccaaaattgctttttcttcaaggagatttatggaaaagactctgacaaggactcttgaatacaagttcctgataacttcaagatcataccactggactaagaactttcaaaattttaatgaacaggctgataccttcatgaaattctagacaaagaagaaaaaaactccatgttattggactaaataatcaaaagcataatgttttcataattttctatttgaaaatgtgctgattctttgaatgttttattctccagatttatgaactttttttcttgagcaattggtaaagtatacttttgtaaacaaaaattgaaacatttgcttttgctctctatctgagtgccccagaattgggaaactattcatgagtattcatatgtttatggtaataaagttatctgcacaagttca

SEQ ID NO: 47169 - DNA, 1766 bp, Artificial Sequence
  derived and/or modified sequence
gagaagtgctcctgccctggagagaggctcagcacagaaggaggaaggacagcacagcctacagccgtgctcaggaagtttctggatcctaggctcagctccacagaggagaacacgcaggcgcagagaccatggggcccctctcagcccctccctgcacacagcacatcacctggaaggggctcctgctcacagcatcacttttaaacttctggaacctgcctatcactgctcaagtcacgattgaagccctgccacccaaagtttccgaggggaaggatgttcttctacttgtccacaatttgcctcagaatcttgctggctacatctggtacaaaggacaactgatggacctctaccattacattacatcatatgtagtagacggtcaaataaatatatatgggcctgcatacactggacgagaaacagtatattccaatgcatccctgctgatccagaatgtcacccgggaagacgcaggatcctacaccttacacatcataaagcgaggtgataggactagaggagtaactggatatttcaccttcaacttatacctgaagctgcccaagccctacatcaccatcaacaactcaaaacccagggagaataaggatgtcttagccttcacctgtgaacctaagagtgagaactacacctacatttggtggctaaatggtcagagcctcccggtcagtcccagggtaaagcgacccattgaaaacaggatcctcattctacccagtgtcacgagaaatgaaacaggaccctatgaatgtgaaatacgggaccgagatggtggcatgcgcagtgacccagtcaccctgaatgtcctctatggtccagacctccccagcatttacccttcattcacctattaccgttcaggagaaaacctctacttgtcctgcttcgcggaatctaacccaccggcagagtatttttggacaattaatgggaagtttcagcaatcaggacaaaagctctctatcccccaaattactacaaagcatagagggctctatacttgctctgttcgtaactcagctactggcaaggaaagctccaaatccatgacagtcgaagtctctgctccttcaggaataggacgtcttcctctccttaatccaatatagcagccgtgaagtcatttctgtatttcaggaagactggcagatggagtttcgctcttgttgcccatgctggagtgcaatggcacaatcttggctcaccgcaacctccgcctcctgtgttcaagtgattctcctgcttcagcctcccgagtactgggattacaggcatgcaccaacacgcccagctaattttgtattttcagtagagacagggtgtcttcatgttggtcaggctggtctcaaactcccgacctcaggtgatccgtacgcctcagcctctcaaagtactgggattacaggcctgagccaccgcacctggcccacacatttttacataccaagagatcctttaatccacccaaaggctgacgttagctgcatctgtaacacaactttttcctcaaatatatggagttttttttaggcttccacttctatacttccctattctcactccctgttttaatttaacatagacatgcaatgctagataatagaattgctctctaccagctgaacatttgggagcctgtgcagtttctggcccttcttgttgcacatagataaatacatccggtgttatagagactcagttgtaaaaatcaataaatgtgctgcctggttaaaatg

SEQ ID NO: 47170 - DNA, 1526 bp, Artificial Sequence
  derived and/or modified sequence
ggacagcacagcctacagccgtgctcaggaagtttctggatcctaggctcagctccacagaggagaacacgcaggcgcagagaccatggggcccctctcagcccctccctgcacacagcacatcacctggaaggggctcctgctcacagcatcacttttaaacttctggaacctgcctatcactgctcaagtcacgattgaagccctgccacccaaagtttccgaggggaaggatgttcttctacttgtccacaatttgcctcagaatcttgctggctacatctggtacaaaggacaactgatggacctctaccattacattacatcatatgtagtagacggtcaaataaatatatatgggcctgcatacactggacgagaaacagtatattccaatgcatccctgctgatccagaatgtcacccgggaagacgcaggatcctacaccttacacatcataaagcgaggtgataggactagaggagtaactggatatttcaccttcaacttatacctgaagctgcccaagccctacatcaccatcaacaactcaaaacccagggagaataaggatgtcttagccttcacctgtgaacctaagagtgagaactacacctacatttggtggctaaatggtcagagcctcccggtcagtcccagggtaaagcgacccattgaaaacaggatcctcattctacccagtgtcacgagaaatgaaacaggaccctatgaatgtgaaatacgggaccgagatggtggcatgcgcagtgacccagtcaccctgaatgtcctctatggtccagacctccccagcatttacccttcattcacctattaccgttcaggagaaaacctctacttgtcctgcttcgcggaatctaacccaccggcagagtatttttggacaattaatgggaagtttcagcaatcaggacaaaagctctctatcccccaaattactacaaagcatagagggctctatacttgctctgttcgtaactcagctactggcaaggaaagctccaaatccatgacagtcgaagtctctgctccttcaggaataggacgtcttcctctccttaatccaatatagcagccgtgaagtcatttctgtatttcaggaagactggcaggagatttatggaaaagactctgacaaggactcttgaatacaagttcctgataacttcaagatcataccactggactaagaactttcaaaattttaatgaacaggctgataccttcatgaaattctagacaaagaagaaaaaaactccatgttattggactaaataatcaaaagcataatgttttcataattttctatttgaaaatgtgctgattctttgaatgttttattctccagatttatgaactttttttcttgagcaattggtaaagtatacttttgtaaacaaaaattgaaacatttgcttttgctctctatctgagtgccccagaattgggaaactattcatgagtattcatatgtttatggtaataaagttatctgcacaagttca

SEQ ID NO: 47171 - DNA, 1008 bp, Artificial Sequence
  derived and/or modified sequence
atgggccctctctccgcccctccttgtacccagcacatcacctggaaggggctgctgctgaccgcgtccctcctgaatttctggaatctgccaatcactgcgcaggtcactattgaggcgttacctcccaaggtctccgaaggcaaagacgttttgctgctcgttcataacctccctcagaatcttgcaggatatatctggtacaagggacagctgatggatctgtatcactacattaccagctatgtggttgacgggcagatcaacatctatggccctgcttatacagggcgagaaaccgtatactccaacgccagtctgttgatccagaacgtgactcgagaagacgcaggcagttatacattacatattattaagcgcggagaccgcacacgtggagtaacaggatattttacattcaatctgtacctcaaattacccaagccatacattacaatcaacaacagtaaacccagagagaataaggacgtacttgcgtttacatgtgagcccaagagcgagaactacacatacatttggtggctgaatggccagagtctccctgttagtcccagggtgaaaaggccaatcgagaatagaattctcatccttccaagcgtcactcgcaatgagacgggaccctacgaatgcgaaattcgagatcgggatgggggaatgaggtctgaccccgtcaccctgaatgtgctgtatggacccgatctgccaagcatctatccgtcattcacttactacaggagcggggagaacttgtacctctcctgtttcgccgagagcaacccacccgcagaatacttttggacaatcaacggaaaattccagcagtccggtcagaagctgtccataccccagatcactaccaaacatagaggcctatatacctgttcggtccgaaattcagcgacagggaaggagagcagcaagagcatgacagtggaggtgagcgccccatcagggattggccgactgcccctgctgaacccaatatag

SEQ ID NO: 47172 - DNA, 1008 bp, Artificial Sequence
  derived and/or modified sequence
atgggccctttaagtgcacctccttgtacgcaacacatcacatggaaggggcttctactgacagcctccttgctgaatttctggaacctgcccatcactgcccaagttacaatagaggctctgccccctaaggtctcagaaggaaaggacgtgttgctgctggtgcacaatcttcctcaaaatctcgctggatacatctggtataagggccagctgatggatttgtatcattacattacttcgtatgttgtggacggccagatcaatatttacgggcctgcttacacgggccgagagacggtctactcaaacgcaagtttgctcatccagaacgttactcgcgaggacgctggctcttatacgctccatataatcaaaaggggcgatcgtacacgaggggtgaccggatactttacgtttaatctgtatctgaagctgcccaagccttatattaccattaacaactccaagcctcgcgagaataaggatgtgctggcgtttacatgtgaaccaaagagtgagaactacacttatatctggtggttaaatgggcaatctctgcctgtgtcaccaagagtaaagaggcccattgaaaaccgcatcctgatactgccgtctgtgacccggaatgagactggaccatatgagtgtgagatccgggaccgagacggaggtatgcgctccgatcccgtgacattaaatgtcctttatgggccagacctgcccagcatctacccctcttttacctactatagatccggtgaaaatttatatctgtcttgctttgcggaatctaatccaccagctgagtatttttggacaatcaatggaaagttccagcaatcgggccagaaactgagtatcccccagattacaacaaagcatcggggattgtacacttgtagtgtccgcaacagcgcaaccggcaaggagagtagtaagtccatgacggttgaggtgtcagcccctagcgggattggacgcctacctctgctcaacccgatctag

SEQ ID NO: 47173 - DNA, 1008 bp, Artificial Sequence
  derived and/or modified sequence
atggggcctctttcagcacctccctgcacccaacatatcacttggaaggggctgctcttgaccgcaagtctgctgaacttctggaatctgccaatcaccgcccaggtgaccattgaggcactgccacccaaggtgagtgaaggcaaggacgtgctgttgcttgttcacaatcttccacagaatttggcaggttatatttggtacaaaggtcagctaatggacctgtaccactatattacatcatatgttgtagatggtcagattaacatatatggcccagcttacacgggtagggagaccgtctactcgaatgcttcgcttctaatccagaatgtgacaagggaggacgcagggagttataccctgcacattatcaaacgaggtgaccgtaccaggggcgttaccggttactttacattcaacctgtacctaaagctgcccaaaccatacattacgatcaacaacagcaagcctagagaaaataaggatgtcttggccttcacatgtgaacctaagtctgagaattacacctatatatggtggttgaatgggcagtcacttcctgtcagtcccagggtaaaacggccaattgaaaacaggattctcattcttccttctgtgacacgcaacgagacaggcccatatgagtgtgaaattagggaccgagatggtggcatgcgatcagatccagttaccttgaatgtgttgtacgggccagatctgccttccatttacccaagctttacatattaccggtctggggaaaacctttatctctcctgctttgccgagtctaacccccctgcggaatacttttggactatcaacgggaagttccaacagtcaggacagaagctcagcatcccccagattaccaccaaacaccggggactgtacacttgctccgtgaggaatagtgccactggcaaggaatcctcaaaatcaatgacagttgaagtctccgctccatccggcattggacggctccccctgctgaaccccatctag

SEQ ID NO: 47174 - DNA, 1008 bp, Artificial Sequence
  derived and/or modified sequence
atgggccccctgagcgcccccccctgcacccagcacatcacctggaagggcctgctgctgaccgccagcctgctgaacttctggaacctgcccatcaccgcccaggtgaccatcgaggccctgccccccaaggtgagcgagggcaaggacgtgctgctgctggtgcacaacctgccccagaacctggccggctacatctggtacaagggccagctgatggacctgtaccactacatcaccagctacgtggtggacggccagatcaacatctacggccccgcctacaccggcagagagaccgtgtacagcaacgccagcctgctgatccagaacgtgaccagagaggacgccggcagctacaccctgcacatcatcaagagaggcgacagaaccagaggcgtgaccggctacttcaccttcaacctgtacctgaagctgcccaagccctacatcaccatcaacaacagcaagcccagagagaacaaggacgtgctggccttcacctgcgagcccaagagcgagaactacacctacatctggtggctgaacggccagagcctgcccgtgagccccagagtgaagagacccatcgagaacagaatcctgatcctgcccagcgtgaccagaaacgagaccggcccctacgagtgcgagatcagagacagagacggcggcatgagaagcgaccccgtgaccctgaacgtgctgtacggccccgacctgcccagcatctaccccagcttcacctactacagaagcggcgagaacctgtacctgagctgcttcgccgagagcaacccccccgccgagtacttctggaccatcaacggcaagttccagcagagcggccagaagctgagcatcccccagatcaccaccaagcacagaggcctgtacacctgcagcgtgagaaacagcgccaccggcaaggagagcagcaagagcatgaccgtggaggtgagcgcccccagcggcatcggcagactgcccctgctgaaccccatctag

SEQ ID NO: 47175 - protein, 389 aa, Artificial Sequence
  derived and/or modified sequence
MKTGHFEIVTMLLATMILVDIFQVKAEVLDMADNAFDDEYLKCTDRMEIKYVPQLLKEEKASHQQLDTVWENAKAKWAARKTQIFLPMNFKDNHGIALMAYISEAQEQTPFYHLFSEAVKMAGQSREDYIYGFQFKAFHFYLTRALQLLRKPCEASSKTVVYRTSQGTSFTFGGLNQARFGHFTLAYSAKPQAANDQLTVLSIYTCLGVDIENFLDKESERITLIPLNEVFQVSQEGAGNNLILQSINKTCSHYECAFLGGLKTENCIENLEYFQPIYVYNPGEKNQKLEDHSEKNWKLEDHGEKNQKLEDHGVKILEPTQIPGMKIPEPFPLPEDKSQGNINNPTPGPVPVPGPKSHPSASSGKLLLPQFGMVIILISVSAINLFVAL

SEQ ID NO: 47176 - DNA, 1170 bp, Artificial Sequence
  derived and/or modified sequence
atgaagacagggcacttcgaaatcgtgaccatgctcttagctacgatgatccttgtcgatattttccaggtgaaggcggaggtccttgacatggcagataatgcgttcgacgatgagtatctcaagtgcactgaccggatggagatcaagtacgtgccgcagctcctcaaggaggagaaggcatcccatcagcaactggacactgtgtgggagaatgctaaagctaagtgggcagccagaaaaactcagatctttctcccaatgaactttaaggataatcacggaatcgccctcatggcttatatctcagaggctcaggagcaaactcccttctatcatctgttcagcgaggccgtgaagatggccggtcagagtagggaagactacatctatggattccagttcaaggccttccacttttacttgacgagggccttacagttactccgtaagccttgtgaggctagctccaaaaccgtggtgtaccggacatctcagggcacatcctttacttttggcggccttaatcaggctcgctttggacattttaccctggcttactcagccaagccgcaggcagccaatgaccaattgactgtcctgagcatatatacatgccttggggttgatattgaaaacttcttggataaagagagcgagaggattactctcatccccttgaacgaagtgttccaggtgtcacaagaaggcgccggcaacaatttgatcctccagtcaatcaataaaacctgttcccactacgagtgtgcatttctgggtgggctcaaaaccgagaattgcatcgagaacttggagtactttcaaccaatctacgtgtacaacccgggagaaaaaaatcagaaattggaggaccacagtgaaaaaaactggaagttggaggaccacggtgaaaaaaaccaaaagctcgaggaccacggggttaagattctcgaacctacccaaatcccagggatgaagatcccagaaccctttcctctgccagaggacaagagtcaaggtaatatcaacaacccaaccccaggacccgtgcctgtgccaggccctaaatcccaccctagcgcttccagcggaaaattgttgctccctcaattcggaatggtcattattctgattagcgtgagcgccattaatctgtttgtggccctgtag

SEQ ID NO: 47177 - DNA, 1561 bp, Artificial Sequence
  derived and/or modified sequence
ctcactgtcaacaacatcccatcctgaagacttgcttaccacaactgagagtggggagtcagtttgaggcctagcatcacttaaacttcctccaaaggcacaaaagccagaagagaaaaatgaagacgggacattttgaaatagtcaccatgctgctggcaaccatgattctagtggacattttccaggtgaaggctgaagtgttagacatggcagataatgcatttgatgatgaatacctgaaatgtacggacaggatggaaattaaatacgttccccaactgctaaaggaggaaaaagcaagccaccagcaattagatactgtgtgggaaaatgcaaaagccaaatgggcagcccgaaagactcaaatctttctccctatgaattttaaggataaccatggaatagccctgatggcatatatttccgaagctcaagagcaaactcccttttaccatctgttcagtgaagctgtgaagatggctggccaatctcgagaagattatatctatggcttccagttcaaagctttccacttttacctcacaagagccctgcagttgctgagaaaaccttgtgaggccagttccaaaactgtggtatatagaacaagccagggcacttcatttacatttggagggctaaaccaagccaggtttggccattttaccttggcatattcagccaaacctcaggctgctaatgaccagctcactgtgttatccatctacacatgccttggagttgacattgaaaattttcttgataaagaaagtgaaagaattactttaatacctctgaatgaggtttttcaagtgtcacaggagggggctggcaataaccttatccttcaaagcataaacaagacctgcagccattatgagtgtgcatttctaggtggactaaaaaccgaaaactgtattgagaacctagaatattttcaacccatctatgtctacaaccctggtgagaaaaaccagaagcttgaagaccatagtgagaaaaactggaagcttgaagaccatggtgagaaaaaccagaagcttgaagaccatggtgtgaaaatccttgaacccacccaaatacctggaatgaaaattccagaaccttttccactacctgaagataaaagtcaaggaaatatcaacaatcctactccaggtccagttcctgttccaggtcccaaaagccatccttctgcatcctcgggcaaactgctgcttccacagtttgggatggtcatcattttaatcagtgtttctgctataaatctctttgttgctctgtagtttgatgcattgtttatctttcttattctttacttgaaataactatagggatccacaggagatcaaaaggaatgatgtattttttacgtgttggccaaagtcactggataaaatgagaattgtatatttgttattcattttgcaaattcagaaagttggtccagatatatgtcacagaacttttcacttgtatactactcttacaatggaaaaaaatcccgaaaactgtatacttctgattaaattcaataaaagattttgattagatattt

SEQ ID NO: 47178 - DNA, 1170 bp, Artificial Sequence
  derived and/or modified sequence
atgaagacaggccactttgagatcgtgaccatgctgctggccaccatgatcctggtggacatcttccaggtgaaggccgaggtgctggacatggctgacaatgcctttgatgatgagtacctgaagtgcacagacaggatggagatcaagtatgtgccccagctgctgaaggaggagaaggccagccaccagcagctggacacagtgtgggagaatgccaaggccaagtgggccgccaggaagacccagatcttcctgcccatgaacttcaaggacaaccacggcatcgccctgatggcctacatcagcgaggcccaggagcagacccccttctaccacctgttcagcgaggccgtgaagatggccggccagagccgggaggactacatctacggcttccagttcaaggccttccacttctacctgacccgggccctgcagctgctgaggaagccctgtgaggccagcagcaagacagtggtgtaccgcaccagccagggcaccagcttcaccttcggcggcctgaaccaggcccgcttcggccacttcaccctggcctacagcgccaagccccaggccgccaatgaccagctgactgtgctgagcatctacacctgcctgggcgtggacatcgagaacttcctggacaaggagagcgagcgcatcaccctcatccccctgaatgaggtgttccaggtgtcccaggagggcgccggcaacaacctgatcctgcagagcatcaacaagacctgcagccactatgaatgtgccttcctgggcggcctgaagacagagaactgcatcgagaacctggagtacttccagcccatctacgtgtacaaccctggagagaagaaccagaagctggaggaccacagcgagaagaactggaagctggaggaccacggggagaagaaccagaagctggaggaccacggcgtgaagatcctggagcccacccagatccctggcatgaagatccctgagcccttccccctgcctgaggacaagagccagggcaacatcaacaaccccaccccaggccctgtgcctgtgcccggccccaagagccaccccagcgccagcagcggcaagctgctgctgccccagtttggcatggtgatcatcctgatctctgtgtctgccatcaacctgtttgtggccctgtag

SEQ ID NO: 47179 - DNA, 1170 bp, Artificial Sequence
  derived and/or modified sequence
atgaagaccggccacttcgagatcgtgaccatgctgctggccaccatgatcctggtagatattttccaggtaaaggctgaggtgctcgacatggccgacaacgcttttgatgacgagtacctcaaatgcaccgaccgtatggaaattaagtatgtgccacaacttcttaaggaggagaaagcttcccatcagcaactggatacagtctgggaaaacgccaaagcgaaatgggctgcgaggaagacccaaattttcctgccaatgaattttaaagataaccatgggatcgcactgatggcatatatctcagaagcccaggaacagaccccgttctatcatcttttttccgaagccgtcaagatggcaggtcagtcacgcgaggattacatctatgggtttcaatttaaggccttccacttctacctcaccagggccctgcagctcctcaggaagccctgcgaagcatcttcaaagaccgtggtgtacaggaccagtcaaggaacctcttttacatttggtggactcaaccaggccaggtttgggcatttcactcttgcatactccgcaaaaccacaagcagccaacgatcaactcactgtgctctctatctatacgtgcctcggagttgacatcgaaaattttttggacaaagagtctgagaggataacattgattccgctgaacgaggtgttccaagtaagtcaggagggagccggtaataatctgatcctgcaaagcattaataagacctgtagtcactacgaatgcgctttcctggggggcctcaaaactgagaattgtatcgaaaatctcgaatatttccagccaatatacgtttataatccaggagaaaaaaaccaaaagctggaggatcactctgagaaaaattggaagttggaagatcatggggagaaaaaccagaagttagaagatcacggtgtgaagatcctggagcccacccagatacctggtatgaaaatcccggaaccatttcctctgccggaagataagagtcagggaaatataaataatcccacacccggccccgtgcccgtaccaggaccgaagtctcaccccagcgcttcctccggcaaactgctacttccacagttcgggatggtgatcatactgatttccgtatctgctattaacctgtttgttgccctttag

SEQ ID NO: 47180 - DNA, 1170 bp, Artificial Sequence
  derived and/or modified sequence
atgaaaacaggacacttcgaaatagtcaccatgctcttggctacaatgattttggtggatatcttccaagtcaaagcagaagtgttagatatggcagacaacgcattcgatgacgaatatctgaagtgcactgataggatggagattaaatacgttcctcagctcctgaaggaagaaaaagcgtctcaccaacaactcgacacggtgtgggagaacgccaaggccaagtgggccgctaggaaaactcagatctttctgcccatgaactttaaggacaaccatggaattgccctgatggcatatatcagcgaggcccaggagcagacccctttttaccacctcttttcagaagctgtcaagatggccggacagagtcgagaagactacatttacggctttcagttcaaggcttttcacttctacctgacgcgagcactgcagcttctgcgaaagccttgcgaggcttcttccaagacagtagtatatagaacgagtcaggggacatcgtttacattcggcggtttaaaccaagctcgcttcggacatttcacgctggcttacagcgctaagcctcaggcagccaatgaccaactcaccgtcttgtccatatacacgtgcctcggtgtggacatcgaaaatttcttggataaggaaagtgaaagaatcaccctcatacctcttaacgaagtgttccaagtctcccaagaaggcgcaggtaataatctgattctgcagtcaattaacaagacatgctcccattacgagtgcgctttcctgggaggcttgaaaactgagaattgtatcgaaaatttggaatactttcagcccatttacgtctacaaccccggtgaaaagaaccaaaagttagaggatcatagcgagaagaattggaagttagaggatcatggggaaaaaaatcagaagctcgaggatcatggagtgaaaattttggaacccacgcagattcccggtatgaagattcctgagcctttccctttacccgaagataaaagccaagggaatatcaacaacccaacccccggaccggtgccagtgccaggcccaaagtctcatccatccgcctcaagtggaaagctcttgttgcctcagttcgggatggtgattatcttgattagcgtgagcgccattaacctgtttgtagcgctgtag

SEQ ID NO: 47181 - DNA, 1170 bp, Artificial Sequence
  derived and/or modified sequence
atgaagaccggccacttcgagatcgtgaccatgctgctggccaccatgatcctggtggacatcttccaggtgaaggccgaggtgctggacatggccgacaacgccttcgacgacgagtacctgaagtgcaccgacagaatggagatcaagtacgtgccccagctgctgaaggaggagaaggccagccaccagcagctggacaccgtgtgggagaacgccaaggccaagtgggccgccagaaagacccagatcttcctgcccatgaacttcaaggacaaccacggcatcgccctgatggcctacatcagcgaggcccaggagcagacccccttctaccacctgttcagcgaggccgtgaagatggccggccagagcagagaggactacatctacggcttccagttcaaggccttccacttctacctgaccagagccctgcagctgctgagaaagccctgcgaggccagcagcaagaccgtggtgtacagaaccagccagggcaccagcttcaccttcggcggcctgaaccaggccagattcggccacttcaccctggcctacagcgccaagccccaggccgccaacgaccagctgaccgtgctgagcatctacacctgcctgggcgtggacatcgagaacttcctggacaaggagagcgagagaatcaccctgatccccctgaacgaggtgttccaggtgagccaggagggcgccggcaacaacctgatcctgcagagcatcaacaagacctgcagccactacgagtgcgccttcctgggcggcctgaagaccgagaactgcatcgagaacctggagtacttccagcccatctacgtgtacaaccccggcgagaagaaccagaagctggaggaccacagcgagaagaactggaagctggaggaccacggcgagaagaaccagaagctggaggaccacggcgtgaagatcctggagcccacccagatccccggcatgaagatccccgagcccttccccctgcccgaggacaagagccagggcaacatcaacaaccccacccccggccccgtgcccgtgcccggccccaagagccaccccagcgccagcagcggcaagctgctgctgccccagttcggcatggtgatcatcctgatcagcgtgagcgccatcaacctgttcgtggccctgtag

SEQ ID NO: 47182 - protein, 367 aa, Artificial Sequence
  derived and/or modified sequence
MKTGHFEIVTMLLATMILVDIFQVKAEVLDMADNAFDDEYLKCTDRMEIKYVPQLLKEEKASHQQLDTVWENAKAKWAARKTQIFLPMNFKDNHGIALMAYISEAQEQTPFYHLFSEAVKMAGQSREDYIYGFQFKAFHFYLTRALQLLRKPCEASSKTVVYRTSQGTSFTFGGLNQARFGHFTLAYSAKPQAANDQLTVLSIYTCLGVDIENFLDKESERITLIPLNEVFQVSQEGAGNNLILQSINKTCSHYECAFLGGLKTENCIENLEYFQPIYVYNPGEKNQKLEDHSEKNWKLEDHGEKNQKLEDHGVKILEPTQIPAPGPVPVPGPKSHPSASSGKLLLPQFGMVIILISVSAINLFVAL

SEQ ID NO: 47183 - DNA, 1104 bp, Artificial Sequence
  derived and/or modified sequence
atgaagacgggccatttcgaaattgtgacaatgcttcttgccaccatgatcctggtcgacatatttcaggtgaaggccgaagtgttggacatggccgacaacgcattcgacgatgaatacctgaagtgcactgatagaatggagattaaatatgtcccccagttgctgaaggaggagaaggctagccatcagcagctcgatactgtatgggagaacgctaaggccaagtgggcagcaagaaagactcagatcttcctccctatgaattttaaagacaaccacgggattgctcttatggcttacatcagcgaagcccaggaacagacgcctttctatcacctattcagcgaggctgtgaagatggccggccagtcacgggaagattacatatatggttttcagtttaaggctttccatttctacttgacccgagctctgcagctgttgcgaaagccctgtgaggcctctagtaagaccgtggtatatcgaaccagtcagggaacttcattcacgtttggaggcctcaaccaggccaggtttggacactttaccttagcatacagtgccaagccacaggctgccaacgaccaacttaccgtgctgagtatttatacgtgcttaggagtcgacatcgaaaacttcctagataaggagtccgaacgtattacactcattcccctgaacgaggtcttccaagtctcccaagagggtgccggcaacaatttgattctgcagtccattaataagacatgcagtcactatgaatgtgcattcttaggcgggctgaagaccgagaactgtattgagaacctggaatacttccagcctatatacgtgtacaatcctggagagaaaaaccaaaaactcgaggatcacagcgagaaaaattggaaactcgaggatcatggagaaaaaaatcagaaactagaggaccacggagtgaaaatcctggaaccaacgcagatacctgccccagggccagtcccagtccctggtccaaagtcccacccgtctgcctcctccggcaagctcctgttaccacagttcggaatggtgattatcctgatttccgtgtccgctattaacctgtttgtcgcactttag

SEQ ID NO: 47184 - DNA, 1517 bp, Artificial Sequence
  derived and/or modified sequence
agtgaggaggttatacccggaggtctcgacgctcgctcgtgctgctcgtgttgccgctgggtacgtttgctgccagtgctgatccagccggaggcgaagagaagcactttgggggcaaaagaagagaaaaatgaagacgggacattttgaaatagtcaccatgctgctggcaaccatgattctagtggacattttccaggtgaaggctgaagtgttagacatggcagataatgcatttgatgatgaatacctgaaatgtacggacaggatggaaattaaatacgttccccaactgctaaaggaggaaaaagcaagccaccagcaattagatactgtgtgggaaaatgcaaaagccaaatgggcagcccgaaagactcaaatctttctccctatgaattttaaggataaccatggaatagccctgatggcatatatttccgaagctcaagagcaaactcccttttaccatctgttcagtgaagctgtgaagatggctggccaatctcgagaagattatatctatggcttccagttcaaagctttccacttttacctcacaagagccctgcagttgctgagaaaaccttgtgaggccagttccaaaactgtggtatatagaacaagccagggcacttcatttacatttggagggctaaaccaagccaggtttggccattttaccttggcatattcagccaaacctcaggctgctaatgaccagctcactgtgttatccatctacacatgccttggagttgacattgaaaattttcttgataaagaaagtgaaagaattactttaatacctctgaatgaggtttttcaagtgtcacaggagggggctggcaataaccttatccttcaaagcataaacaagacctgcagccattatgagtgtgcatttctaggtggactaaaaaccgaaaactgtattgagaacctagaatattttcaacccatctatgtctacaaccctggtgagaaaaaccagaagcttgaagaccatagtgagaaaaactggaagcttgaagaccatggtgagaaaaaccagaagcttgaagaccatggtgtgaaaatccttgaacccacccaaatacctgctccaggtccagttcctgttccaggtcccaaaagccatccttctgcatcctcgggcaaactgctgcttccacagtttgggatggtcatcattttaatcagtgtttctgctataaatctctttgttgctctgtagtttgatgcattgtttatctttcttattctttacttgaaataactatagggatccacaggagatcaaaaggaatgatgtattttttacgtgttggccaaagtcactggataaaatgagaattgtatatttgttattcattttgcaaattcagaaagttggtccagatatatgtcacagaacttttcacttgtatactactcttacaatggaaaaaaatcccgaaaactgtatacttctgattaaattcaataaaagattttgattagatatttcagaattgcca

SEQ ID NO: 47185 - DNA, 1104 bp, Artificial Sequence
  derived and/or modified sequence
atgaagacaggccactttgagatcgtgaccatgctgctggccaccatgatcctggtggacatcttccaggtgaaggccgaggtgctggacatggctgacaatgcctttgatgatgagtacctgaagtgcacagacaggatggagatcaagtatgtgccccagctgctgaaggaggagaaggccagccaccagcagctggacacagtgtgggagaatgccaaggccaagtgggccgccaggaagacccagatcttcctgcccatgaacttcaaggacaaccacggcatcgccctgatggcctacatcagcgaggcccaggagcagacccccttctaccacctgttcagcgaggccgtgaagatggccggccagagccgggaggactacatctacggcttccagttcaaggccttccacttctacctgacccgggccctgcagctgctgaggaagccctgtgaggccagcagcaagacagtggtgtaccgcaccagccagggcaccagcttcaccttcggcggcctgaaccaggcccgcttcggccacttcaccctggcctacagcgccaagccccaggccgccaatgaccagctgactgtgctgagcatctacacctgcctgggcgtggacatcgagaacttcctggacaaggagagcgagcgcatcaccctcatccccctgaatgaggtgttccaggtgtcccaggagggcgccggcaacaacctgatcctgcagagcatcaacaagacctgcagccactatgaatgtgccttcctgggcggcctgaagacagagaactgcatcgagaacctggagtacttccagcccatctacgtgtacaaccctggagagaagaaccagaagctggaggaccacagcgagaagaactggaagctggaggaccacggggagaagaaccagaagctggaggaccacggcgtgaagatcctggagcccacccagatcccagcccctggccctgtgcctgtgcccggccccaagagccaccccagcgccagcagcggcaagctgctgctgccccagtttggcatggtgatcatcctgatctctgtgtctgccatcaacctgtttgtggccctgtag

SEQ ID NO: 47186 - DNA, 1104 bp, Artificial Sequence
  derived and/or modified sequence
atgaagaccggccacttcgagatcgtgaccatgctgctggccaccatgatcttagtggacatcttccaggtcaaggctgaggtgctggatatggccgacaacgccttcgatgatgaatacctgaagtgcactgatcgcatggagatcaaatatgtgcctcagctcctgaaggaagagaaggcgtcgcatcagcagcttgacaccgtgtgggaaaatgccaaggcaaagtgggcagcaaggaagacacagatcttccttcccatgaatttcaaggacaaccacggtattgccctgatggcctatatttccgaagctcaggaacagacacccttttatcatctattttccgaagcggttaaaatggcaggtcagtctagagaagactatatatacggcttccaattcaaagcttttcacttctatctgacaagagctctgcagttattacggaaaccctgtgaggccagttcgaagactgtggtgtataggacctcacagggcacaagcttcacattcggcggcctgaaccaggcccggttcggccatttcaccctagcgtactctgctaagcctcaggcggctaatgaccagttgactgtactatctatctacacctgtctgggggttgatattgagaatttccttgacaaagaatcagagaggataacactcattcccctgaatgaggtcttccaggttagtcaggagggagccgggaacaatctgattttacagtccatcaataagacctgctcgcattacgagtgtgcctttctgggggggctcaagaccgagaactgtatcgaaaacctggaatactttcagccgatctacgtgtataaccctggagaaaagaaccagaaattggaggatcatagcgagaagaattggaagcttgaagaccacggagagaagaaccaaaagctggaggaccacggggtgaaaattttagagccaacacagatccccgcacctggcccggtgcccgttcccgggccaaagagccatccgtccgcctccagcgggaagttgttgctgcctcagttcggaatggtgatcatattaatcagtgtaagcgccatcaacctgttcgttgccctctag

SEQ ID NO: 47187 - DNA, 1104 bp, Artificial Sequence
  derived and/or modified sequence
atgaagactgggcatttcgagatcgtgaccatgttgctcgctaccatgatcctggtagacatttttcaggtgaaagctgaggttctcgatatggcggacaatgcctttgacgacgaatacttgaagtgcacagatcggatggaaattaagtacgtgccccagctgctcaaagaagaaaaagcatctcaccagcagctggacaccgtctgggaaaacgcgaaggccaaatgggccgcacggaaaacccagatcttcctccccatgaattttaaagacaatcatggcatcgctttgatggcctatataagcgaagcccaagagcagacgcccttctatcacctgttttcagaagccgtgaaaatggccggtcaaagcagagaggattatatctacggattccagttcaaagcatttcacttctacttaacacgggcattacaactgctccggaaaccttgtgaggcatcgagcaagacggtggtttacagaacaagccaaggcacgtcgttcacgtttggcggtctgaaccaggccaggttcggtcactttacattagcctactcggccaaaccgcaagctgcgaatgatcagctgacagtactctccatctacacctgtctcggcgtcgacatcgagaatttcctggacaaggagtctgagcgcataacgctgatccccttgaatgaggtctttcaggtttctcaggaaggcgctggtaataacctaatcctgcagagtattaacaagacatgttcccattatgagtgcgcattcctgggaggactaaagaccgaaaactgcatagagaacctggagtactttcagcccatctatgtctacaatcccggagagaagaatcagaaattagaagatcattccgagaagaattggaaactggaagaccatggtgagaagaatcagaagctagaggatcacggcgttaagatcctggagcctacccagattcccgctccaggcccagtgccggtccccggtccaaagagccatccatctgccagttccgggaagctgctgctaccccagttcgggatggtgatcatattaatctccgttagcgccattaatctttttgttgcattgtag

SEQ ID NO: 47188 - DNA, 1104 bp, Artificial Sequence
  derived and/or modified sequence
atgaagaccggccacttcgagatcgtgaccatgctgctggccaccatgatcctggtggacatcttccaggtgaaggccgaggtgctggacatggccgacaacgccttcgacgacgagtacctgaagtgcaccgacagaatggagatcaagtacgtgccccagctgctgaaggaggagaaggccagccaccagcagctggacaccgtgtgggagaacgccaaggccaagtgggccgccagaaagacccagatcttcctgcccatgaacttcaaggacaaccacggcatcgccctgatggcctacatcagcgaggcccaggagcagacccccttctaccacctgttcagcgaggccgtgaagatggccggccagagcagagaggactacatctacggcttccagttcaaggccttccacttctacctgaccagagccctgcagctgctgagaaagccctgcgaggccagcagcaagaccgtggtgtacagaaccagccagggcaccagcttcaccttcggcggcctgaaccaggccagattcggccacttcaccctggcctacagcgccaagccccaggccgccaacgaccagctgaccgtgctgagcatctacacctgcctgggcgtggacatcgagaacttcctggacaaggagagcgagagaatcaccctgatccccctgaacgaggtgttccaggtgagccaggagggcgccggcaacaacctgatcctgcagagcatcaacaagacctgcagccactacgagtgcgccttcctgggcggcctgaagaccgagaactgcatcgagaacctggagtacttccagcccatctacgtgtacaaccccggcgagaagaaccagaagctggaggaccacagcgagaagaactggaagctggaggaccacggcgagaagaaccagaagctggaggaccacggcgtgaagatcctggagcccacccagatccccgcccccggccccgtgcccgtgcccggccccaagagccaccccagcgccagcagcggcaagctgctgctgccccagttcggcatggtgatcatcctgatcagcgtgagcgccatcaacctgttcgtggccctgtag

SEQ ID NO: 47189 - protein, 838 aa, Artificial Sequence
  derived and/or modified sequence
MGELFRSEEMTLAQLFLQSEAAYCCVSELGELGKVQFRDLNPDVNVFQRKFVNEVRRCEEMDRKLRFVEKEIRKANIPIMDTGENPEVPFPRDMIDLEANFEKIENELKEINTNQEALKRNFLELTELKFILRKTQQFFDEAELHHQQMADPDLLEESSSLLEPSEMGRGTPLRLGFVAGVINRERIPTFERMLWRVCRGNVFLRQAEIENPLEDPVTGDYVHKSVFIIFFQGDQLKNRVKKICEGFRASLYPCPETPQERKEMASGVNTRIDDLQMVLNQTEDHRQRVLQAAAKNIRVWFIKVRKMKAIYHTLNLCNIDVTQKCLIAEVWCPVTDLDSIQFALRRGTEHSGSTVPSILNRMQTNQTPPTYNKTNKFTYGFQNIVDAYGIGTYREINPAPYTIITFPFLFAVMFGDFGHGILMTLFAVWMVLRESRILSQKNENEMFSTVFSGRYIILLMGVFSMYTGLIYNDCFSKSLNIFGSSWSVRPMFTYNWTEETLRGNPVLQLNPALPGVFGGPYPFGIDPIWNIATNKLTFLNSFKMKMSVILGIIHMLFGVSLSLFNHIYFKKPLNIYFGFIPEIIFMTSLFGYLVILIFYKWTAYDAHTSENAPSLLIHFINMFLFSYPESGYSMLYSGQKGIQCFLVVVALLCVPWMLLFKPLVLRRQYLRRKHLGTLNFGGIRVGNGPTEEDAEIIQHDQLSTHSEDADEFDFGDTMVHQAIHTIEYCLGCISNTASYLRLWALSLAHAQLSEVLWTMVIHIGLSVKSLAGGLVLFFFFTAFATLTVAILLIMEGLSAFLHALRLHWVEFQNKFYSGTGFKFLPFSFEHIREGKFEE

SEQ ID NO: 47190 - DNA, 2517 bp, Artificial Sequence
  derived and/or modified sequence
atgggagaactctttagaagcgaagagatgaccctggctcagctgtttctccaatcggaagcagcttactgctgcgtttctgagctgggcgagttgggtaaggtccagtttagggacctgaatccagacgtgaacgtgtttcagagaaaatttgtgaatgaggtccggaggtgtgaggaaatggaccgcaagctgaggttcgttgagaaagagatccgaaaagcaaatattccgataatggacacaggggagaacccggaggtgcctttccctcgagatatgattgatttggaggccaatttcgaaaaaattgaaaacgaactgaaggagatcaacacaaatcaagaagcgcttaagagaaactttctggagctgaccgagcttaagttcatactgagaaagacccagcagtttttcgatgaagcagagctgcatcatcagcagatggcagatcccgacctgctagaagaatcttcttcgctgcttgaaccgtctgagatgggacgaggcactccccttagactcgggtttgttgcaggggtgatcaatcgagagagaattccaactttcgagcgcatgctgtggagagtctgccgcggaaacgtttttctccggcaggccgaaattgagaacccactcgaagatccagtgaccggagactatgtgcataaatctgtatttatcatattttttcagggagatcagctgaaaaatagggtcaagaaaatctgtgaaggattccgcgcaagtctttatccttgtcctgaaacaccccaagaaaggaaggaaatggcttccggagtcaatacccgaatcgatgacttgcagatggtccttaatcaaactgaggatcatcggcagagagtgctgcaggctgcagctaagaatatccgggtttggtttataaaggtccgaaagatgaaagcaatctatcacactctcaatttatgcaatatcgatgtgactcagaagtgcttaatcgccgaggtgtggtgtcctgtgaccgacttagattccatccaattcgcactgagacggggcacagaacattcagggagcaccgtccctagcatcttaaaccggatgcagactaatcagacccccccaacatataacaagacgaacaagttcacctacgggtttcagaatatcgtagacgcgtacggcattgggacttaccgagagataaaccctgccccttatacgatcatcacatttcctttcctgttcgcggttatgtttggcgacttcggacatgggatactcatgaccctctttgccgtgtggatggttcttcgagagagcagaatcctatcacagaagaacgaaaacgaaatgttttctaccgtgttctccgggaggtatattattctgctgatgggggttttcagtatgtatactggactgatctacaatgattgtttttccaaatccctgaacatattcggttcctcctggagcgtcagaccaatgtttacatacaattggacggaagagaccctaagaggcaatcccgtgctccagctcaatcctgctctgcccggagtattcggcggcccctatcctttcggcatcgacccgatatggaatatcgctactaacaaattgacgttcctcaattccttcaagatgaagatgtccgtcatcctgggcatcattcacatgctgttcggagtgtcactctcactctttaatcatatatactttaaaaaaccattgaatatatactttgggtttatccccgagattatttttatgacctccctttttgggtacctcgttatactcatattctacaagtggacagcatatgacgcgcatacttctgaaaacgccccttcactccttatacacttcatcaatatgtttctgtttagttacccggaatcaggttacagcatgctgtatagtggacaaaaaggtatacagtgttttttggtggtagtggccctattatgcgtaccatggatgttactctttaagccactcgtgttgagacggcagtacctcaggagaaaacacttgggcaccttgaattttggaggcatacgagttggcaatggtccgaccgaggaagacgcagagataatccagcatgaccaattgtccactcattctgaggatgccgacgagttcgactttggcgatactatggtgcatcaggctatccatacaattgaatactgcctgggttgcatcagcaacaccgcaagctatttgaggctgtgggccctctccttggcccacgcacagttatccgaggtcctgtggacaatggtgattcacataggcctctccgtgaagtccctcgcagggggcttggtgctgtttttcttttttaccgcattcgctaccctcacagttgctatcctcctgatcatggaggggttgagcgccttccttcatgcattgaggttacattgggttgaattccagaataagttttacagtgggactgggtttaaatttctgccctttagctttgagcatatccgcgagggcaagtttgaggagtag

SEQ ID NO: 47191 - DNA, 2517 bp, Artificial Sequence
  derived and/or modified sequence
atgggagagctgttccgctctgaggagatgaccctggcccagctgttcctgcagagcgaggccgcctactgctgcgtgtctgagctgggggagctgggcaaggtgcagttccgggacctgaacccagatgtgaatgtgttccagaggaagtttgtgaatgaggtgcggcgctgtgaggagatggacaggaagctgcgctttgtggagaaggagatcaggaaggccaacatccccatcatggacaccggggagaaccctgaggtgcccttcccccgggacatgattgacctggaggccaactttgagaagattgaaaatgagctgaaggagatcaacaccaaccaggaggccctgaagaggaacttcctggagctgacagagctgaagttcatcctgaggaagacccagcagttctttgatgaggccgagctgcaccaccagcagatggctgaccctgacctgctggaggagagcagcagcctgctggagcccagcgagatgggccggggcacccccctgcggctgggctttgtggccggggtcatcaaccgggagcgcatccccacctttgagaggatgctgtggagggtgtgcagaggaaatgtgttcctgcggcaggccgagattgagaaccccctggaggaccctgtgactggagactatgtgcacaagtctgtgttcatcatcttcttccagggcgaccagctgaagaacagagtgaagaagatctgtgagggcttccgggccagcctgtacccctgcccagagaccccccaggagaggaaggagatggccagcggcgtgaacaccagaattgatgacctgcagatggtgctgaaccagacagaggaccaccggcagagggtgctgcaggccgccgccaagaacatccgggtgtggttcatcaaggtgaggaagatgaaggccatctaccacaccctgaacctgtgcaacattgatgtgacccagaagtgcctgattgctgaggtgtggtgccctgtgacagacctggacagcatccagtttgccctgcggcggggcacagagcacagcggcagcacagtgcccagcatcctgaacaggatgcagaccaaccagaccccacccacctacaacaagaccaacaagttcacctacggcttccagaacatcgtggatgcctacggcatcggcacctaccgggagatcaacccagccccctacaccatcatcaccttccccttcctgtttgctgtgatgtttggagactttggacatggcatcctgatgaccctgtttgctgtgtggatggtgctgcgggagagccgcatcctgagccagaagaatgaaaatgagatgttcagcacagtgttcagcggccgctacatcatcctgctgatgggcgtcttctccatgtacacaggcctcatctacaatgactgcttcagcaagagcctgaacatcttcggcagctcctggagcgtgcggcccatgttcacctacaactggacagaggagaccctgcggggcaaccctgtgctgcagctgaacccagccctgcccggggtgtttggaggcccctacccctttggaattgaccccatctggaacatcgccaccaacaagctgaccttcctgaacagcttcaagatgaagatgtctgtcatcctgggcatcatccacatgctgtttggagtgtccctgagcctcttcaaccacatctacttcaagaagcccctgaacatctacttcggcttcatccctgagatcatcttcatgaccagcctgtttggctacctggtgatcctgatcttctacaagtggacagcctatgatgcccacaccagtgaaaatgcccccagcctgctgatccacttcatcaacatgttcctgttctcctacccagagagcggctacagcatgctgtacagcggccagaagggcatccagtgcttcctggtggtggtggccctgctgtgtgtgccctggatgctgctcttcaagcccctggtgctgcggcggcagtacctgcggaggaagcacctgggcaccctgaactttggaggcatccgggtgggcaatggccccacagaggaggatgctgagatcatccagcacgaccagctgagcacccacagtgaagatgctgatgaatttgattttggagacaccatggtgcaccaggccatccacaccatcgagtactgcctgggctgcatcagcaacacagccagctacctgcggctgtgggccctgagcctggcccacgcccagctgtctgaggtgctgtggaccatggtgatccacatcggcctgtctgtgaagagcctggccggcggcctggtgctcttcttcttcttcaccgcctttgccaccctgactgtggccatcctgctgatcatggagggcctgagcgccttcctgcacgccctgcggctgcactgggtggagttccagaacaagttctacagcggcaccggcttcaagttcctgcccttctcctttgagcacatccgggagggcaagtttgaggagtag

SEQ ID NO: 47192 - DNA, 2517 bp, Artificial Sequence
  derived and/or modified sequence
atgggcgagctgttccggagcgaggagatgaccctggcccagctgttcctgcagtcagaggctgcatactgctgcgtgagcgaattgggcgagctgggtaaagtgcagttcagggatctgaaccccgacgtaaatgtgttccagaggaagtttgtgaatgaggtgaggcggtgtgaagaaatggatcgcaaacttcgctttgtagagaaggaaattagaaaagccaacatccccattatggacaccggtgagaatccggaagtcccgtttccacgggatatgatagatttggaggccaattttgaaaagattgagaatgaactcaaggaaatcaacactaatcaagaggccctgaagcgcaatttcctagagttaaccgaactcaagttcatacttcgcaagactcagcagttcttcgatgaggctgaacttcaccatcaacaaatggcagacccagatctcttggaagagtcttcatcactgctcgagccctctgagatgggcaggggcaccccgcttagacttgggtttgtggccggcgttataaatcgggaaaggatccctacattcgaaagaatgttgtggagggtgtgcagagggaatgttttcctgagacaggcagagatagagaatccacttgaggacccagtgacgggggattacgtccacaagtcggtgttcattattttttttcaaggcgaccagctgaagaaccgcgtgaagaaaatctgcgaagggttccgtgcttctttgtacccttgccctgagacaccccaggagaggaaggaaatggcctcgggagtcaacacgcggatcgatgatctgcagatggtcttaaaccagaccgaggatcatcggcaaagggttctgcaggccgcagccaagaacattagagtgtggttcataaaggtcagaaagatgaaggctatctaccatactctaaatttatgtaatattgatgttacccaaaaatgtctgattgctgaagtctggtgtcctgtgacagatctcgattcgatccaattcgctcttcgacgaggcaccgagcacagcggaagcactgtgccatcgatcctgaatagaatgcagacgaaccaaactccgccaacgtacaataaaaccaataagtttacgtacggatttcagaatatcgtggacgcctacgggatcggaacctaccgggaaatcaatccagctccgtatactattatcacctttcctttcctatttgctgttatgttcggagacttcggtcacggtatattaatgacgctctttgcagtgtggatggtacttcgcgagagcagaattctcagccagaagaatgagaatgaaatgttctcaaccgtgttcagtggaagatacattatcctccttatgggagtctttagcatgtataccggattgatatacaatgactgcttctcaaaaagccttaatattttcggctcgagctggtctgtcaggccgatgttcacctataattggactgaggaaaccttaagaggaaatccggtgcttcaattgaatccagctctacccggcgtgtttggtggaccttacccttttgggattgatcctatatggaacatcgctactaacaaactgacttttttgaacagcttcaaaatgaagatgtctgtcattctgggaattattcacatgctgttcggtgtcagcctgagtctgttcaatcacatttactttaagaagcccctgaatatctactttgggttcattcctgagatcattttcatgacaagcctctttggctatctggttatccttatattttacaaatggacggcctatgatgcacacacaagcgagaacgctcccagtttactaatccattttatcaatatgttcttgttctcctacccagagagcggatactccatgctctattcagggcagaaaggaatacaatgctttctagtagttgtggccctgctgtgtgtgccatggatgttgctgtttaaacctctggtcctgcggcggcagtacctgcgacggaaacatcttggaacattgaatttcgggggaatcagagtgggaaatggccctactgaggaggacgccgagatcatccagcacgaccagttgtctactcattcagaggacgcagacgagtttgactttggcgataccatggttcatcaagctatccacacaatcgagtactgcttaggctgcatcagtaataccgccagctatctccgtttgtgggccctctctctggcacacgcacagctgtctgaagttctttggacgatggtaattcacatcggcctctcagtgaaaagcctcgctggcggcctggtactatttttctttttcacagcctttgcaacacttaccgtcgccattctcttgatcatggagggcctcagtgcttttttacatgctctccgacttcattgggtcgagttccagaataagttctactccggcacaggttttaaatttctgcctttcagcttcgagcacatccgcgaggggaagtttgaggagtag

SEQ ID NO: 47193 - DNA, 2517 bp, Artificial Sequence
  derived and/or modified sequence
atgggtgaattattccgttcagaagagatgactctggcccagctctttcttcagtcggaagccgcttattgctgtgtgtctgaactgggggagttgggtaaggtgcagttccgggaccttaatccagatgtgaacgtgttccaacgtaaattcgtaaacgaggtgcgcaggtgcgaggaaatggatcgaaaacttcggtttgtcgagaaagagatccggaaagccaatatcccaattatggacacaggcgaaaaccctgaggttccattccctagggacatgatcgaccttgaggcaaatttcgaaaaaatcgagaatgagcttaaggaaatcaacaccaaccaggaggcacttaagcgcaactttttggagttgacagagctgaagttcatcctgagaaagacccagcagttttttgacgaggctgagctccaccaccagcagatggctgaccctgatctgcttgaagaatctagctcactccttgagccctccgagatgggcagaggtacccctctccgattgggctttgtggcaggcgtgatcaacagggagcgaatcccaacttttgaaagaatgctgtggcgggtctgtcgcggaaatgtgtttttacggcaagccgaaatagagaatcccctggaagaccctgtgaccggggattatgtgcacaaatccgtctttattatcttttttcaaggagaccagctgaaaaatagggtcaagaagatctgtgaaggcttccgagcatctctttacccctgtcccgaaaccccacaggaaaggaaagagatggcctcaggcgtgaacacccgcattgacgacctccaaatggtgttgaaccagactgaggatcatcggcagcgggtgctccaagccgcagcaaaaaacatacgggtttggttcatcaaagtgcgaaagatgaaagctatctaccacaccctgaatctatgcaacatcgatgtcactcagaaatgcctgatagctgaggtgtggtgtccagtcactgatctggactcgatccaatttgcacttagacgcggaactgagcacagtggctctactgtcccatcaattctgaatcgaatgcagactaaccagacccccccaacctacaacaaaactaataagttcacttatggctttcagaatattgtggatgcctacggaattggcacctatagggagattaacccagctccatatactatcattaccttcccattcctattcgcggtgatgttcggcgacttcggccacggcattttaatgaccttgttcgctgtatggatggtgctaagagaatcacgaatcttgtctcaaaaaaacgagaacgagatgttctccacagtgttctccggtcggtacattattctgcttatgggtgtattctcaatgtacaccgggctgatttacaacgactgcttctctaaatcattaaacattttcggaagctcctggtctgtgaggcccatgttcacttacaactggactgaggagactttacgtggtaatccagtcttacagctcaacccggctctgcccggtgtgtttggcggaccctaccctttcggaatcgatcccatttggaacatcgccaccaacaagctgacattcctgaattcctttaagatgaagatgagcgttattcttggcatcatccatatgctcttcggcgtaagtcttagcctgtttaatcacatctactttaagaaaccgttaaacatatactttggattcatcccggagattatctttatgacgagcctgtttggatacctggtcatattgatcttttacaagtggaccgcatacgacgcccacacgtcagagaatgcccctagcctcctgatccattttatcaatatgtttttgttctcctacccggagagcggctactcaatgctctacagcgggcaaaaaggaatacagtgcttcctggtggtcgtagcgctcctttgtgtcccctggatgctgctctttaaaccgctcgtccttcgacgtcagtatctgcgcaggaagcacctaggaactctgaacttcgggggtatcagagtcgggaacggtccaaccgaagaagatgctgaaatcatccagcacgaccaactgagtacacactcagaagatgccgacgagtttgatttcggtgacacaatggtacaccaagctatacacactatcgagtactgcctgggatgtattagtaacaccgcatcgtatctgcgcctgtgggctctgtccttggctcacgctcagctgagcgaggtgctttggactatggtgattcatattggcctcagcgtgaagagcctcgcaggtggtctcgtgttatttttctttttcacggctttcgccacattaactgtggcaatattgcttataatggagggtctttccgcatttctccacgccctgcgactgcactgggttgagtttcaaaataagttctattctgggacaggcttcaagtttctgcctttcagcttcgagcacattcgggaggggaagttcgaggagtag

SEQ ID NO: 47194 - DNA, 4142 bp, Artificial Sequence
  derived and/or modified sequence
ggcggcgcaggggcggggctttacggacgcaagcacgtcgaagcgctgctcctggagccgcggagggtgcgggtttggctgcggtggtttctgtggcggttgctgtggcggagtttggaggttggagagaaatccaggtactcactagactggtaccttctgccaccatgggggagcttttccggagtgaagaaatgacactggcccagctttttctacagtcagaggctgcttattgttgtgtcagtgaattaggagaacttggaaaggttcagtttcgtgacttaaatccagatgtgaatgttttccaacggaaatttgtgaatgaagttagaagatgtgaagaaatggatcgaaagcttcgatttgttgagaaagagataagaaaagctaacattccgattatggacaccggtgaaaacccagaggttcccttcccccgggacatgattgacttagaggccaattttgagaagattgaaaatgaactgaaggaaatcaacacaaaccaggaagctctgaagagaaacttcctggaactgaccgaattaaaatttatacttcgcaaaactcagcaattttttgatgaggctgaattgcatcatcagcagatggcggatccagacttgttggaagagtcctcatccctcttggagccaagtgagatgggaagaggcactcctttaagacttggcttcgtggctggtgtcattaaccgggagcgcatccctacttttgagcgcatgctttggcgggtatgccggggaaatgtgttcctgcgacaggctgaaatcgagaaccccctggaggatcctgtgactggcgactacgtgcacaagtctgtgtttatcattttcttccaaggcgatcagctgaaaaacagagtcaagaaaatctgtgaagggttccgagcctcactctatccctgtcctgagacaccacaggagaggaaggaaatggcttctggagtgaataccaggattgatgatctccaaatggttctgaatcaaacggaggatcaccgccagagggttctgcaggcagctgctaagaacatccgtgtctggttcatcaaagtgcggaagatgaaggccatctatcacaccctgaacctgtgcaacatagatgtgactcagaaatgcttgattgcagaggtctggtgccctgtcaccgaccttgactccatccagtttgcactcagaaggggcacggaacacagtggttccactgtaccttccattttgaacaggatgcagacaaaccagactcccccaacctataacaaaaccaacaagtttacctatggctttcagaacatagtagatgcttatggaattggaacttaccgagagataaatccagctccgtatactattatcacgttcccttttctatttgctgtgatgtttggagacttcggtcatggcattttaatgaccctttttgctgtgtggatggtactgagggagagccggatcctttcccagaagaatgagaatgagatgtttagcactgtgttcagtggtcgatacattattttattgatgggtgtgttctccatgtacactggcctcatctacaatgattgcttttccaagtctcttaatatctttgggtcatcctggagtgtacggccgatgtttacttataattggactgaagagacgcttcgggggaaccctgttctacagctgaacccagccctccctggagtgtttggtggaccatacccttttggcattgatccaatttggaacattgctaccaataaactgacgttcttgaactcctttaagatgaagatgtctgttatccttggtatcatccatatgctgtttggagtcagcctgagtctgttcaaccatatctatttcaagaagcccctgaatatctactttggatttattcctgaaataatcttcatgacctctttgtttggctatttggttatccttattttttacaagtggacggcctatgatgctcatacctctgagaatgcaccaagccttctgatccatttcataaacatgttcctcttttcctacccagagtctggttattcaatgttgtattctggacagaaaggaattcagtgtttcctggtagtggttgcactactgtgtgtaccttggatgctgctgtttaaaccattggtccttcgccgtcagtatttgaggagaaagcatttgggaactctcaactttggtgggatcagggtgggcaacggaccgacagaggaggatgctgagattattcagcatgaccagctctccacccactcagaggacgcagacgagtttgactttggggacaccatggtccaccaggccatccacaccatcgagtactgcctgggctgcatctccaacactgcctcctacttgcggctctgggccctcagcctcgctcatgcgcagctgtctgaggtgctttggaccatggtgatccacatcggcctgagcgtgaagagcttggcgggaggtttggtgctgttcttcttcttcactgcctttgccaccctgaccgtggccatcctcctgatcatggagggcctctcggcctttctccacgcactgcgcttacactgggttgagttccagaataaattctacagcgggaccggtttcaagttcttacccttctccttcgagcatattcgggaagggaagtttgaagagtgagtccctgtgagggccgtgtgccccatgctaccctccccgcctccctccacagtgatcagctgtgcctctctgcctgttggttgtgatctgtgggcaccagctcattcgtgtcaccctgtctgtgagtcatttagatagaatagtcctccttgggtctcccaccacccctagctttgtgtgtagtgtagtgattttctggctgtcactcatactcactgggcaccagccttgccctcttagcctccatccatccagacagcccttcccacctcctggtggtgagccagtctgcattcccacgccatcccaaagccctttcatcttccccgtgcattgtagatggaaggagcacccatgccattcacatctagactttgagttccctgcatctgccaccgtagtttctagcaggagtagtggggggagtaatacagattcttccctagaaggggacactggtaacatgtcccactcttggattagcaggggtgggtccaggaagatgatatttgcgtcttttgcccacccccctggcattcagctggacccaactaggccatcatgagtggcttctccctgtcatccccaggggtcataggatatctacaccgcctttctgaccccaccctgcactcccatcctttcctctctccccgttcatgccctgcactacatagcacagccgggatgcttggaacagaggccttggctgctccgcagtgcacagggcttccctctctcggggttggcttcttcccaggccttgcatgggccctgcccacaagcacaccctcaggccgagggtgcagactgatgctcttccctgatggagaccctgagatcttccccacccccaatcatgatgtcttcagtgtgggactggggtcctcttggttctgcctgcagcctgcctggctccgcccctagtgccccctcctcaccacactggccccaggtctcaggaggggtgtcctgggcagggaaggtcagtgtcactgatggtttgctgtttggaagccattggcagggctgccgtgcatgtggctgtgagggctgcacagtcctgccaaggggcttcctccttgtcaccccgaaccttgtaatcgtgtgctggcgtggcagccctggctaagttaatccccaccgctttcagtggtagaaagaattccctgagtgggccaggctggtgccctcctcctaccctggcttttctgagtgagctgcctggagccctcatcccctctcccaggctgggctggccctgggcggggccactgtgtgctggcccactgtgacctgacccgaccttgtgcagcccccctgccctggtgtcctgggttttcgtgatgatctttgctctgtttccagtggggtttgaagcagagttcagggaaccctgcccaaggtcctcctgttcagacattcctatgttgaataaagtatgtttgacttccccgg

SEQ ID NO: 47195 - DNA, 2517 bp, Artificial Sequence
  derived and/or modified sequence
atgggcgagctgttcagaagcgaggagatgaccctggcccagctgttcctgcagagcgaggccgcctactgctgcgtgagcgagctgggcgagctgggcaaggtgcagttcagagacctgaaccccgacgtgaacgtgttccagagaaagttcgtgaacgaggtgagaagatgcgaggagatggacagaaagctgagattcgtggagaaggagatcagaaaggccaacatccccatcatggacaccggcgagaaccccgaggtgcccttccccagagacatgatcgacctggaggccaacttcgagaagatcgagaacgagctgaaggagatcaacaccaaccaggaggccctgaagagaaacttcctggagctgaccgagctgaagttcatcctgagaaagacccagcagttcttcgacgaggccgagctgcaccaccagcagatggccgaccccgacctgctggaggagagcagcagcctgctggagcccagcgagatgggcagaggcacccccctgagactgggcttcgtggccggcgtgatcaacagagagagaatccccaccttcgagagaatgctgtggagagtgtgcagaggcaacgtgttcctgagacaggccgagatcgagaaccccctggaggaccccgtgaccggcgactacgtgcacaagagcgtgttcatcatcttcttccagggcgaccagctgaagaacagagtgaagaagatctgcgagggcttcagagccagcctgtacccctgccccgagaccccccaggagagaaaggagatggccagcggcgtgaacaccagaatcgacgacctgcagatggtgctgaaccagaccgaggaccacagacagagagtgctgcaggccgccgccaagaacatcagagtgtggttcatcaaggtgagaaagatgaaggccatctaccacaccctgaacctgtgcaacatcgacgtgacccagaagtgcctgatcgccgaggtgtggtgccccgtgaccgacctggacagcatccagttcgccctgagaagaggcaccgagcacagcggcagcaccgtgcccagcatcctgaacagaatgcagaccaaccagaccccccccacctacaacaagaccaacaagttcacctacggcttccagaacatcgtggacgcctacggcatcggcacctacagagagatcaaccccgccccctacaccatcatcaccttccccttcctgttcgccgtgatgttcggcgacttcggccacggcatcctgatgaccctgttcgccgtgtggatggtgctgagagagagcagaatcctgagccagaagaacgagaacgagatgttcagcaccgtgttcagcggcagatacatcatcctgctgatgggcgtgttcagcatgtacaccggcctgatctacaacgactgcttcagcaagagcctgaacatcttcggcagcagctggagcgtgagacccatgttcacctacaactggaccgaggagaccctgagaggcaaccccgtgctgcagctgaaccccgccctgcccggcgtgttcggcggcccctaccccttcggcatcgaccccatctggaacatcgccaccaacaagctgaccttcctgaacagcttcaagatgaagatgagcgtgatcctgggcatcatccacatgctgttcggcgtgagcctgagcctgttcaaccacatctacttcaagaagcccctgaacatctacttcggcttcatccccgagatcatcttcatgaccagcctgttcggctacctggtgatcctgatcttctacaagtggaccgcctacgacgcccacaccagcgagaacgcccccagcctgctgatccacttcatcaacatgttcctgttcagctaccccgagagcggctacagcatgctgtacagcggccagaagggcatccagtgcttcctggtggtggtggccctgctgtgcgtgccctggatgctgctgttcaagcccctggtgctgagaagacagtacctgagaagaaagcacctgggcaccctgaacttcggcggcatcagagtgggcaacggccccaccgaggaggacgccgagatcatccagcacgaccagctgagcacccacagcgaggacgccgacgagttcgacttcggcgacaccatggtgcaccaggccatccacaccatcgagtactgcctgggctgcatcagcaacaccgccagctacctgagactgtgggccctgagcctggcccacgcccagctgagcgaggtgctgtggaccatggtgatccacatcggcctgagcgtgaagagcctggccggcggcctggtgctgttcttcttcttcaccgccttcgccaccctgaccgtggccatcctgctgatcatggagggcctgagcgccttcctgcacgccctgagactgcactgggtggagttccagaacaagttctacagcggcaccggcttcaagttcctgcccttcagcttcgagcacatcagagagggcaagttcgaggagtag

SEQ ID NO: 47196 - protein, 837 aa, Artificial Sequence
  derived and/or modified sequence
MGELFRSEEMTLAQLFLQSEAAYCCVSELGELGKVQFRDLNPDVNVFQRKFVNEVRRCEEMDRKLRFVEKEIRKANIPIMDTGENPEVPFPRDMIDLEANFEKIENELKEINTNQEALKRNFLELTELKFILRKTQQFFDEMADPDLLEESSSLLEPSEMGRGTPLRLGFVAGVINRERIPTFERMLWRVCRGNVFLRQAEIENPLEDPVTGDYVHKSVFIIFFQGDQLKNRVKKICEGFRASLYPCPETPQERKEMASGVNTRIDDLQMVLNQTEDHRQRVLQAAAKNIRVWFIKVRKMKAIYHTLNLCNIDVTQKCLIAEVWCPVTDLDSIQFALRRGTEHSGSTVPSILNRMQTNQTPPTYNKTNKFTYGFQNIVDAYGIGTYREINPAPYTIITFPFLFAVMFGDFGHGILMTLFAVWMVLRESRILSQKNENEMFSTVFSGRYIILLMGVFSMYTGLIYNDCFSKSLNIFGSSWSVRPMFTYNWTEETLRGNPVLQLNPALPGVFGGPYPFGIDPIWNIATNKLTFLNSFKMKMSVILGIIHMLFGVSLSLFNHIYFKKPLNIYFGFIPEIIFMTSLFGYLVILIFYKWTAYDAHTSENAPSLLIHFINMFLFSYPESGYSMLYSGQKGIQCFLVVVALLCVPWMLLFKPLVLRRQYLRRKHLGTLNFGGIRVGNGPTEEDAEIIQHDQLSTHSEDADEPSEDEVFDFGDTMVHQAIHTIEYCLGCISNTASYLRLWALSLAHAQLSEVLWTMVIHIGLSVKSLAGGLVLFFFFTAFATLTVAILLIMEGLSAFLHALRLHWVEFQNKFYSGTGFKFLPFSFEHIREGKFEE

SEQ ID NO: 47197 - protein, 837 aa, Artificial Sequence
  derived and/or modified sequence
MGELFRSEEMTLAQLFLQSEAAYCCVSELGELGKVQFRDLNPDVNVFQRKFVNEVRRCEEMDRKLRFVEKEIRKANIPIMDTGENPEVPFPRDMIDLEANFEKIENELKEINTNQEALKRNFLELTELKFILRKTQQFFDEMADPDLLEESSSLLEPSEMGRGTPLRLGFVAGVINRERIPTFERMLWRVCRGNVFLRQAEIENPLEDPVTGDYVHKSVFIIFFQGDQLKNRVKKICEGFRASLYPCPETPQERKEMASGVNTRIDDLQMVLNQTEDHRQRVLQAAAKNIRVWFIKVRKMKAIYHTLNLCNIDVTQKCLIAEVWCPVTDLDSIQFALRRGTEHSGSTVPSILNRMQTNQTPPTYNKTNKFTYGFQNIVDAYGIGTYREINPAPYTIITFPFLFAVMFGDFGHGILMTLFAVWMVLRESRILSQKNENEMFSTVFSGRYIILLMGVFSMYTGLIYNDCFSKSLNIFGSSWSVRPMFTYNWTEETLRGNPVLQLNPALPGVFGGPYPFGIDPIWNIATNKLTFLNSFKMKMSVILGIIHMLFGVSLSLFNHIYFKKPLNIYFGFIPEIIFMTSLFGYLVILIFYKWTAYDAHTSENAPSLLIHFINMFLFSYPESGYSMLYSGQKGIQCFLVVVALLCVPWMLLFKPLVLRRQYLRRKHLGTLNFGGIRVGNGPTEEDAEIIQHDQLSTHSEDADEPSTSGQFDFGDTMVHQAIHTIEYCLGCISNTASYLRLWALSLAHAQLSEVLWTMVIHIGLSVKSLAGGLVLFFFFTAFATLTVAILLIMEGLSAFLHALRLHWVEFQNKFYSGTGFKFLPFSFEHIREGKFEE

SEQ ID NO: 47198 - DNA, 2514 bp, Artificial Sequence
  derived and/or modified sequence
atgggcgagctgtttaggagcgaggaaatgaccctggcacagctctttctccagtcagaggccgcttattgctgcgtgtccgaacttggcgaactaggtaaggttcagttccgcgatctgaatcctgatgtcaacgtttttcagagaaagtttgttaacgaagtgcgaagatgtgaagagatggaccggaagcttagatttgtggaaaaggagattcggaaggctaacattcccataatggatacaggggagaacccagaggtcccctttccacgagacatgatagatcttgaggctaactttgagaagatcgagaacgaactcaaggagattaatacgaatcaagaggccctgaaaagaaacttcctggagttaactgagctgaagtttattcttaggaagacccagcaatttttcgatgagatggctgaccctgacctacttgaggaaagttcctctctacttgaaccttcagaaatgggccgcgggaccccccttagactgggtttcgtggccggggtgataaaccgcgaacgcattcctacattcgaacgaatgctgtggcgggtctgcagaggcaatgtgttcctcagacaggcggagattgaaaacccactagaggatccagtgacaggtgattatgtccacaaatcagtgttcattatttttttccaaggagaccaactgaaaaacagggtcaagaaaatatgtgaagggtttcgagcctctctttatccctgtcctgagaccccacaggaaagaaaggaaatggcgtccggagtaaatacacgaatcgatgatctgcagatggtcttgaatcagaccgaggaccatcggcagcgtgtgctgcaggctgccgcaaaaaatatccgcgtctggtttataaaagttaggaaaatgaaggccatttatcacacactgaatctatgtaacatcgatgtgacccagaagtgcctgatcgcggaggtctggtgcccagttaccgatcttgatagcatccagtttgccctgcggcgtgggacagagcactccgggtccacagttccctcaatattaaatcgtatgcagactaaccagaccccaccgacatataacaaaaccaacaaatttacgtacggctttcagaacattgtggacgcatacggaattggtacttaccgggaaattaacccggctccgtataccattataacatttcccttcttgttcgcagtgatgtttggcgactttggtcacggcattctgatgacgctgttcgcagtgtggatggttctgcgcgaatctaggattctaagtcaaaaaaatgaaaacgaaatgttttcaactgtcttttccggccggtatataattctgttgatgggcgtctttagtatgtacactggcctaatctacaatgattgtttcagtaagtctttgaatatcttcgggagctcatggtcagtcaggccaatgtttacctataactggacagaagagacactgcgcgggaacccagtcctgcagcttaacccagccctaccgggcgtttttggaggtccctaccctttcggaatcgaccccatttggaacatcgccaccaacaaattaacatttctgaacagttttaagatgaagatgtccgtgattttagggatcatccacatgttgttcggagtgagtttatctctcttcaatcatatctacttcaagaagcccctaaacatatacttcggattcattcctgagattatattcatgacgagcttgttcgggtacctagtaatcttgatattctataaatggaccgcttatgacgctcacacatccgaaaacgccccatctctcctaattcatttcattaacatgtttcttttcagctacccagaaagcggctactccatgctttactctggtcagaaggggattcaatgcttcttggtggtagtcgcactgctctgcgtcccttggatgctccttttcaagccgcttgttcttaggaggcagtatctgagacggaagcacttagggactctgaattttggagggatccgggtgggcaatgggcctacagaagaagatgccgagatcattcaacacgatcagctcagcacccactcagaagacgccgacgaaccctccgaggatgaggtgtttgactttggggacacaatggtacatcaggccattcacactattgagtactgtcttgggtgcattagcaacactgcttcctacctccgcttgtgggccctgtcactcgcccatgcccagttaagcgaggttttatggactatggtaattcacatcggcctgagcgtcaaaagtttagcgggcggcctggtcctttttttcttctttacggcgttcgcaacccttaccgtggctattctgctgataatggagggactgagcgccttcctgcacgccttgaggcttcactgggtggagtttcagaataagttctatagcggcacgggcttcaaatttctcccctttagttttgagcatatacgcgaaggcaaattcgaggagtag

SEQ ID NO: 47199 - DNA, 2514 bp, Artificial Sequence
  derived and/or modified sequence
atgggcgagctgttcagatcagaggaaatgacacttgcgcaactgttcctgcagtctgaagctgcatactgctgtgtttccgaactcggagagctcggcaaagtccaattccgcgatctcaaccccgatgtgaacgtgtttcagcgcaaattcgtgaatgaagtccgcagatgtgaggagatggatagaaagctccgtttcgttgaaaaagagataaggaaggcaaatattcctattatggatacaggtgagaaccccgaagtaccctttcctagggatatgatcgatctcgaagctaatttcgaaaagatagaaaatgagctgaaagaaattaacacaaaccaggaggcattaaaacgaaatttcctggaactgactgagttgaaatttatattgcgaaaaacccagcagttttttgatgagatggctgatcctgaccttctggaggagagtagctcactgctggagccctccgaaatgggccggggaactcctctccgactcggttttgttgccggcgttatcaatcgggaaagaatccctactttcgagcggatgctctggcgggtgtgccgaggcaacgtgttcctgcggcaggcggagatagagaatcccctcgaggatcctgtgaccggagactatgtccacaagagtgttttcataatatttttccaaggagatcagctcaaaaatcgggttaaaaagatctgcgaaggcttcagggcttccctgtacccttgccccgaaacgcctcaagagcggaaagagatggcgtccggagtaaatacgagaatcgacgatttacagatggtgctgaatcagacagaggatcaccggcagcgagtcttacaggctgcagctaaaaatatacgggtgtggttcatcaaggtaagaaaaatgaaagcaatctatcatacattgaacctctgtaacatagatgttacacagaaatgtctaatcgcagaagtctggtgtccagttaccgatctggatagcatccagttcgccctgcggcggggtacagaacatagcggctcaaccgttccttccattctcaatcgtatgcagacaaatcaaacccctccgacatacaacaagaccaataagttcacttatgggttccaaaacatagtcgacgcctacggcattggcacatacagagagattaatccggctccttacaccataattacattcccgtttttgtttgccgtaatgttcggcgactttggacacggcattctgatgacgctgttcgcggtctggatggtactgcgcgaatcaagaatcttgtcacagaagaacgagaatgagatgttttccaccgtcttttctgggcggtacataatcctcctgatgggcgtcttttccatgtatactggcttaatttacaacgattgcttcagcaagtccctcaacatatttggtagcagttggtctgttcgacccatgtttacttacaattggacggaggaaactctcagaggcaatcctgtattgcagctgaatcccgccctgccaggtgtattcggcggcccttatccttttggcatcgaccctatttggaatattgcaacaaataagcttacatttcttaactcatttaagatgaaaatgtccgtgatcttaggaattattcacatgctgttcggtgttagcctctccctgttcaaccacatctatttcaagaagccgctgaatatttactttggcttcataccggagataattttcatgacaagccttttcggatatctggtgatcttgattttctataagtggacggcatatgacgcccacacctctgaaaacgctcctagtttgttgatccactttattaatatgtttctgttttcttacccagagtccggttattccatgctttattccggccagaaaggcatccagtgcttcctagtcgtggtcgcgctgctttgtgtcccatggatgttgctctttaagcctctggtgcttcgaagacaatatttgaggcgtaaacaccttggaacacttaatttcggaggcatacgggtgggtaatggtccaaccgaggaggacgccgagattattcagcatgaccagcttagtacccatagtgaagatgctgatgagccatcaacaagcgggcagttcgatttcggcgatactatggtgcaccaggcgatccacactatcgagtattgtctgggatgcataagcaacacagccagctatttacgtctgtgggccctgtctctggcacacgctcagctctcggaggtgctgtggactatggtgatccatattggactgagtgtgaagtctctggccggcgggctggtgctttttttcttctttacagcgtttgccaccctaactgtggccatactgctgatcatggaaggactgagcgctttcctgcacgcactgcgtcttcattgggtggaatttcagaataagttctactccgggacaggctttaaattcctcccattctctttcgagcacattcgcgagggcaagtttgaagagtag

SEQ ID NO: 47200 - DNA, 2514 bp, Artificial Sequence
  derived and/or modified sequence
atgggagagctgttccgctctgaggagatgaccctggcccagctgttcctgcagagcgaggccgcctactgctgcgtgtctgagctgggggagctgggcaaggtgcagttccgggacctgaacccagatgtgaatgtgttccagaggaagtttgtgaatgaggtgcggcgctgtgaggagatggacaggaagctgcgctttgtggagaaggagatcaggaaggccaacatccccatcatggacaccggggagaaccctgaggtgcccttcccccgggacatgattgacctggaggccaactttgagaagattgaaaatgagctgaaggagatcaacaccaaccaggaggccctgaagaggaacttcctggagctgacagagctgaagttcatcctgaggaagacccagcagttctttgatgagatggctgaccctgacctgctggaggagagcagcagcctgctggagcccagcgagatgggccggggcacccccctgcggctgggctttgtggccggggtcatcaaccgggagcgcatccccacctttgagaggatgctgtggagggtgtgcagaggaaatgtgttcctgcggcaggccgagattgagaaccccctggaggaccctgtgactggagactatgtgcacaagagcgtcttcatcatcttcttccagggcgaccagctgaagaacagagtgaagaagatctgtgagggcttccgggccagcctgtacccctgcccagagaccccccaggagaggaaggagatggccagcggcgtgaacaccagaattgatgacctgcagatggtgctgaaccagacagaggaccaccggcagagggtgctgcaggccgccgccaagaacatccgggtgtggttcatcaaggtgaggaagatgaaggccatctaccacaccctgaacctgtgcaacattgatgtgacccagaagtgcctgattgctgaggtgtggtgccctgtgacagacctggacagcatccagtttgccctgcggcggggcacagagcacagcggcagcacagtgcccagcatcctgaacaggatgcagaccaaccagaccccacccacctacaacaagaccaacaagttcacctacggcttccagaacatcgtggatgcctatggaattggcacctaccgggagatcaacccagccccctacaccatcatcaccttccccttcctgtttgctgtgatgtttggagactttggccacggcatcctgatgaccctgtttgctgtgtggatggtgctgcgggagagccgcatcctgagccagaagaatgaaaatgagatgttcagcaccgtcttcagcggccgctacatcatcctgctgatgggcgtcttctccatgtacacaggcctcatctacaatgactgcttcagcaagagcctgaacatcttcggcagctcctggagcgtgcggcccatgttcacctacaactggacagaggagaccctgcggggcaaccctgtgctgcagctgaacccagccctgcccggggtgtttggaggcccctaccccttcggcatcgaccccatctggaacatcgccaccaacaagctgaccttcctgaacagcttcaagatgaagatgtctgtcatcctgggcatcatccacatgctgtttggagtgtccctgagcctcttcaaccacatctacttcaagaagcccctgaacatctacttcggcttcatccctgagatcatcttcatgaccagcctgtttggctacctggtgatcctgatcttctacaagtggacagcctatgatgcccacaccagtgaaaatgcccccagcctgctgatccacttcatcaacatgttcctgttctcctacccagagagcggctacagcatgctgtacagcggccagaagggcatccagtgcttcctggtggtggtggccctgctgtgtgtgccctggatgctgctcttcaagcccctggtgctgcggcggcagtacctgcggaggaagcacctgggcaccctgaactttggaggcatccgggtgggcaatggccccacagaagaagatgctgagatcatccagcacgaccagctgagcacccacagtgaagatgctgatgagcccagtgaagatgaggtgtttgattttggagacaccatggtgcaccaggccatccacaccatcgagtactgcctgggctgcatcagcaacacagccagctacctgcggctgtgggccctgagcctggcccacgcccagctgtctgaggtgctgtggaccatggtgatccacatcggcctgtctgtgaagagcctggccggcggcctggtgctcttcttcttcttcaccgcctttgccaccctgactgtggccatcctgctgatcatggagggcctgagcgccttcctgcacgccctgcggctgcactgggtggagttccagaacaagttctacagcggcaccggcttcaagttcctgcccttctcctttgagcacatccgggagggcaagtttgaggagtag

SEQ ID NO: 47201 - DNA, 2514 bp, Artificial Sequence
  derived and/or modified sequence
atgggagagctgttccgctctgaggagatgaccctggcccagctgttcctgcagagcgaggccgcctactgctgcgtgtctgagctgggggagctgggcaaggtgcagttccgggacctgaacccagatgtgaatgtgttccagaggaagtttgtgaatgaggtgcggcgctgtgaggagatggacaggaagctgcgctttgtggagaaggagatcaggaaggccaacatccccatcatggacaccggggagaaccctgaggtgcccttcccccgggacatgattgacctggaggccaactttgagaagattgaaaatgagctgaaggagatcaacaccaaccaggaggccctgaagaggaacttcctggagctgacagagctgaagttcatcctgaggaagacccagcagttctttgatgagatggctgaccctgacctgctggaggagagcagcagcctgctggagcccagcgagatgggccggggcacccccctgcggctgggctttgtggccggggtcatcaaccgggagcgcatccccacctttgagaggatgctgtggagggtgtgcagaggaaatgtgttcctgcggcaggccgagattgagaaccccctggaggaccctgtgactggagactatgtgcacaagagcgtcttcatcatcttcttccagggcgaccagctgaagaacagagtgaagaagatctgtgagggcttccgggccagcctgtacccctgcccagagaccccccaggagaggaaggagatggccagcggcgtgaacaccagaattgatgacctgcagatggtgctgaaccagacagaggaccaccggcagagggtgctgcaggccgccgccaagaacatccgggtgtggttcatcaaggtgaggaagatgaaggccatctaccacaccctgaacctgtgcaacattgatgtgacccagaagtgcctgattgctgaggtgtggtgccctgtgacagacctggacagcatccagtttgccctgcggcggggcacagagcacagcggcagcacagtgcccagcatcctgaacaggatgcagaccaaccagaccccacccacctacaacaagaccaacaagttcacctacggcttccagaacatcgtggatgcctatggaattggcacctaccgggagatcaacccagccccctacaccatcatcaccttccccttcctgtttgctgtgatgtttggagactttggccacggcatcctgatgaccctgtttgctgtgtggatggtgctgcgggagagccgcatcctgagccagaagaatgaaaatgagatgttcagcaccgtcttcagcggccgctacatcatcctgctgatgggcgtcttctccatgtacacaggcctcatctacaatgactgcttcagcaagagcctgaacatcttcggcagctcctggagcgtgcggcccatgttcacctacaactggacagaggagaccctgcggggcaaccctgtgctgcagctgaacccagccctgcccggggtgtttggaggcccctaccccttcggcatcgaccccatctggaacatcgccaccaacaagctgaccttcctgaacagcttcaagatgaagatgtctgtcatcctgggcatcatccacatgctgtttggagtgtccctgagcctcttcaaccacatctacttcaagaagcccctgaacatctacttcggcttcatccctgagatcatcttcatgaccagcctgtttggctacctggtgatcctgatcttctacaagtggacagcctatgatgcccacaccagtgaaaatgcccccagcctgctgatccacttcatcaacatgttcctgttctcctacccagagagcggctacagcatgctgtacagcggccagaagggcatccagtgcttcctggtggtggtggccctgctgtgtgtgccctggatgctgctcttcaagcccctggtgctgcggcggcagtacctgcggaggaagcacctgggcaccctgaactttggaggcatccgggtgggcaatggccccacagaagaagatgctgagatcatccagcacgaccagctgagcacccacagtgaagatgctgatgagcccagcaccagcggccagtttgattttggagacaccatggtgcaccaggccatccacaccatcgagtactgcctgggctgcatcagcaacacagccagctacctgcggctgtgggccctgagcctggcccacgcccagctgtctgaggtgctgtggaccatggtgatccacatcggcctgtctgtgaagagcctggccggcggcctggtgctcttcttcttcttcaccgcctttgccaccctgactgtggccatcctgctgatcatggagggcctgagcgccttcctgcacgccctgcggctgcactgggtggagttccagaacaagttctacagcggcaccggcttcaagttcctgcccttctcctttgagcacatccgggagggcaagtttgaggagtag

SEQ ID NO: 47202 - DNA, 2514 bp, Artificial Sequence
  derived and/or modified sequence
atgggcgagctgttccggagcgaggagatgaccctggcccagctgttcttgcagtccgaggctgcctactgttgtgtatccgagcttggagagctcggtaaagtacagttcagagatctaaatcccgacgtgaacgtgtttcagcggaagtttgtgaatgaggtccgtcggtgcgaggagatggaccgaaagctgcgcttcgtggagaaggagatcagaaaggcaaatatcccgattatggacaccggcgagaacccggaagtcccgtttccgcgagacatgatcgatctcgaggctaactttgaaaagatcgaaaatgaacttaaggaaattaacacaaatcaagaagcgctgaagcgaaactttctagaactcacagagttgaagttcattctgaggaaaacccagcagttctttgatgagatggctgacccagatctccttgaggagagctctagtcttctcgagccctccgaaatgggtagaggaacgcctttgaggcttgggttcgtggccggagtgattaatagggagcgaataccaacatttgagcggatgttgtggcgcgtttgtcggggcaacgtcttcctgaggcaggctgagatagagaacccactcgaggacccagtaaccggtgattacgtgcacaagtcagtgtttatcatattctttcagggggaccagcttaagaatcgcgtcaagaaaatatgcgaaggatttagagcatcgctgtacccatgtcccgagacgcctcaggagagaaaggaaatggcaagcggcgtaaacactaggattgatgacctccaaatggtcctgaatcagacagaagaccatagacaacgagttctccaggccgccgccaagaatatcagggtgtggttcattaaggttcgcaagatgaaagctatctaccataccctgaatctttgcaatatcgatgttacccaaaagtgcctgattgcagaagtctggtgtcctgtgacagatctggattctattcaattcgctctcaggagggggacagagcacagtggatctacagttccatctattttgaacaggatgcagacaaatcaaacaccaccgacatacaataagacaaataaatttacatatggattccagaatatagtcgatgcatacggtattggaacttaccgcgagattaatccagccccttatacaatcattacctttccctttttattcgccgtcatgttcggcgattttgggcacggtatacttatgaccttgttcgcggtctggatggtgcttcgtgagtccagaatcctgtcccagaagaacgagaatgagatgttctcaactgtcttctccggaagatatattatcttgttgatgggcgtcttttcaatgtatacagggttaatatataacgactgcttttcaaagagtctgaatatcttcggttcatcgtggagcgtgcgtccaatgtttacgtacaattggaccgaggagacactgagagggaaccccgtgctgcaattgaacccagctctacccggggtcttcgggggcccttatcccttcggaatagacccgatttggaacatcgctacaaacaaactgactttcctgaatagttttaagatgaagatgagcgtgattttaggtatcattcacatgctattcggcgtgtctctcagtctcttcaatcacatctattttaagaagccccttaatatctattttggcttcatcccggaaatcatattcatgacatcactcttcggatacctagtgatcttgattttttacaagtggacagcgtacgatgcacatacttccgagaatgccccttctctgctgatccactttattaatatgttcctgttctcctacccggaaagcggatatagtatgctgtattcagggcagaaggggatccagtgtttccttgtagtggtggccctcctgtgtgtgccctggatgctgcttttcaagcccctggtgctccgacgacaatacttgcgtcgcaaacatctcgggacgctgaattttggaggcatccgcgtcggaaacggacctactgaggaagatgctgagattatccagcatgaccagttaagcacccacagcgaagacgctgacgagccttctgaagacgaagtctttgattttggcgacacaatggtccatcaggcaatccacaccattgagtactgtctcggctgcatctctaacaccgcatcatacttaagattgtgggccctgagcttagcccatgcacagctgagcgaggtgctgtggactatggtgatacatatcggcttgagcgtgaaatccctggctggggggttggtcttattctttttcttcacggctttcgctactctcacagtggccatcctgcttattatggagggattaagtgcctttctgcacgctctacgcctgcactgggtcgagttccaaaacaaattctactctggcacaggttttaagttcctgcccttctcttttgagcatatcagggagggcaaatttgaggagtag

SEQ ID NO: 47203 - DNA, 2514 bp, Artificial Sequence
  derived and/or modified sequence
atgggcgagctgttccggagcgaggagatgaccctggcccagctgttcctgcaatctgaagcagcttattgctgcgtttcggaacttggtgagctggggaaggtgcagttccgcgatttaaatcccgacgttaacgtcttccagcgtaaattcgttaatgaggttaggagatgcgaagaaatggacaggaaactgcgatttgtggaaaaggaaatccgaaaagcgaacatacctatcatggatacaggagagaatcctgaagtacctttccctcgagacatgattgatttagaagctaattttgaaaagattgaaaacgagctaaaagagatcaatactaatcaggaggcgttgaagcgaaactttctcgagctgaccgagctaaagtttattctgaggaagacgcagcaattcttcgacgaaatggctgaccctgacttactcgaagagagcagtagtcttttggagccatcagagatgggccgaggtacaccccttcggctcgggtttgtcgccggcgttattaatagggaacgaattcccacttttgagaggatgctctggcgcgtatgtaggggaaatgtgttcctccgccaggccgagattgagaatccactggaggaccccgttacaggagactatgtccacaaatctgtgttcattatattttttcagggtgatcagcttaaaaatcgggtgaagaaaatctgcgagggctttagggccagtctctatccgtgtcccgaaactccccaggagcgcaaagaaatggcctcaggggtcaacactaggattgatgacctgcagatggtgctgaatcaaactgaggatcacaggcaaagggtactgcaggccgccgcgaaaaacattagagtgtggttcataaaggtcaggaaaatgaaagccatctaccacacactgaacttgtgtaacattgatgtgacccagaaatgtttgatagcggaggtgtggtgtcccgtgacggatctggactcaattcaattcgcgctgcgcagaggcaccgaacactcgggctctacagttcccagcatacttaaccgaatgcagactaatcaaacacctcctacctataacaaaacaaacaaattcacctatggcttccagaacatcgtggacgcatacgggattggtacatacagagaaattaacccggctccatacaccatcattaccttcccctttctattcgctgttatgttcggagatttcgggcatggcatactgatgaccctgttcgccgtctggatggtgctgcgggaatcgcggattctcagtcagaaaaatgaaaacgaaatgttctctactgttttctccggcaggtatattatcttattgatgggggtgtttagcatgtatacaggcttaatctacaacgattgtttctctaagtctctaaacatttttggaagctcatggtctgtgagacctatgttcacttacaattggacagaagagactttaaggggtaaccccgtgctgcaactgaatcctgcactgcctggcgtgtttggaggaccatacccctttgggatcgatcccatttggaacatcgcaacgaataagctgacttttcttaattcattcaagatgaagatgagtgtgatactgggtattatccatatgttgttcggagttagccttagcctgttcaatcacatctactttaaaaaacctttaaacatctatttcggcttcatccctgagatcatttttatgacttccctcttcgggtacctcgtaattctgatcttttacaaatggacagcctacgatgcccatacttctgagaacgcccctagcctcctaatccacttcattaacatgttcctgttttcttacccggagtccggatattctatgctctactccggacagaaagggatccaatgtttcctggtggtcgtggccctgctgtgcgtcccctggatgctgctattcaaacctttagtgctgcgaaggcaatatttgcgccggaagcacctgggtaccctgaacttcggcggcattagggttggtaacggccctaccgaggaagacgctgagataatccagcatgatcagctaagtacccacagtgaagatgctgatgagccctccacctccggtcagtttgactttggcgacactatggttcatcaagcgatccatacgatcgaatattgtctgggttgcatttcaaataccgcaagttatcttcgcttatgggcgctcagcttagcccacgcccagttgtctgaggtgttgtggaccatggtgatccatattggtctgtcggtgaaaagcctggcaggaggccttgtcctgttcttcttttttacggcatttgccacactgacagtggctatcctgctcatcatggaggggctctctgccttcctgcatgccctgaggctccattgggtggaattccagaataagttctacagcggtaccgggtttaaattccttccattttcatttgaacatatacgagagggcaagttcgaggaatag

SEQ ID NO: 47204 - DNA, 2514 bp, Artificial Sequence
  derived and/or modified sequence
atgggggaactgttccgctctgaggagatgactctggcccagctgttcctccagtcagaggccgcatattgttgtgttagcgagctgggggaactcggcaaagtgcagttccgggacctcaaccccgatgtgaacgtgttccaacgtaagttcgtcaacgaggtgcgtcggtgcgaagagatggaccgcaagctaaggtttgtagagaaggagattcgcaaagctaacatccccatcatggacacgggagagaatcctgaagttccattcccaagggacatgatcgacttggaggcgaatttcgagaagatcgaaaacgaactgaaagagattaatactaaccaggaagccttaaagcggaatttcctcgaactcacagaactgaagttcatcttaagaaaaacgcagcagtttttcgatgaaatggccgatcctgacctcctagaggaaagctcctccctcctggagccatccgagatgggcaggggaacacctctgagacttgggtttgtggcaggggtaatcaaccgcgaaaggatccccacgttcgagcgaatgctgtggagggtgtgccggggaaatgtctttcttcgccaggctgagatcgaaaaccctctggaggaccccgtcacaggggactatgtccacaagtccgtgtttatcatttttttccagggagatcagctcaaaaacagggtcaaaaaaatttgcgaaggctttagggcctccctttacccgtgcccagaaacgcctcaggagcggaaggagatggcctctggggtaaatactagaatagatgatcttcaaatggtccttaaccagacagaggaccatcgacaacgggtgttacaagcagccgctaagaatatacgggtctggttcatcaaggtgaggaagatgaaggcaatttaccacactcttaacttgtgcaacatagatgtgactcagaagtgcctaattgccgaagtatggtgccctgtcaccgatctggattcgatccagtttgcacttcggcgagggactgagcactctggctccactgttccgagcatactgaatagaatgcagactaatcagaccccacccacttataacaaaacaaacaagttcacctacggattccagaacattgtcgatgcctacggcataggaacttatcgtgagattaatcccgcaccatatacaataattaccttcccatttctcttcgctgttatgtttggagattttgggcacgggattctcatgactctgtttgcggtctggatggtactccgggagagtaggatccttagccagaaaaacgagaatgagatgtttagcacagttttttcaggccgatacattatattattgatgggagtcttttctatgtacactggccttatttacaacgactgctttagtaaatcccttaacatctttgggagcagctggtcggtacggcctatgtttacatacaattggaccgaggagacactgagaggaaatcctgttcttcagcttaacccagccttgcccggtgtattcgggggtccctacccttttggcatagaccctatttggaatattgctaccaacaaactcactttcctcaacagcttcaagatgaaaatgtctgttattctgggcatcatacacatgctgttcggcgtcagcctatcgctttttaatcatatctatttcaagaagcctctgaacatctacttcgggttcattcctgagatcatttttatgacgtctctgttcgggtacttagtcatcctgattttctacaaatggaccgcttacgatgcccatacttctgaaaatgcgccttcactcctcatccatttcatcaacatgttcctgttctcctacccagaatctgggtacagcatgctgtacagtggccagaaaggcatacagtgtttcctggtggtggtcgccttattgtgcgtcccatggatgctgttgttcaagccactagtcctgagacgtcaataccttaggcgcaagcatctgggtacactaaactttgggggaatccgggtaggcaacggccctaccgaggaggacgcggaaataatccagcacgatcagctctccacacactctgaagatgctgatgagcctagcgaagacgaggtctttgattttggtgacaccatggtccaccaggccattcacaccatcgaatactgcctaggctgcattagcaataccgcgtcctacctgaggctgtgggctctctcattggcccacgctcaactgtcagaagtgttgtggactatggtcatccacatcggcctcagtgtgaagagcctggcaggagggctggttctcttttttttctttacggccttcgctactctcaccgtggctatactcttaataatggagggcctgtctgctttcctccacgctctgcggttgcattgggtggagttccagaataagttctactcagggaccggtttcaagttcctgccctttagcttcgagcatattcgtgaaggaaaattcgaagaatag

SEQ ID NO: 47205 - DNA, 2514 bp, Artificial Sequence
  derived and/or modified sequence
atgggcgagcttttccggagtgaggagatgaccctcgcccagctgttcctccagtccgaggcggcttattgctgcgtgtctgaactgggcgagcttggcaaagtgcaattccgtgaccttaacccggacgttaatgtctttcagcgcaaattcgtgaacgaagtgcggagatgcgaggaaatggatcgcaaattgcggttcgtggaaaaggagatcagaaaggctaacattcctatcatggacacgggcgaaaatccagaagtcccctttccccgagatatgatcgatctggaggctaactttgaaaagattgaaaatgaactcaaggagatcaatactaaccaggaggctttaaagagaaactttctggaacttacagagctgaagtttatactgaggaagacccagcagttctttgatgagatggctgatcccgatctgctggaggaatcttctagcctgcttgagcctagcgagatgggacggggaactcctttacgactgggctttgtggcgggagtcatcaaccgggaaaggatccccacattcgagagaatgctttggcgcgtgtgccgcggaaacgtcttcctcagacaggcagaaatcgagaaccctctggaggaccccgtaacgggagactacgtgcataagagtgtgtttatcatttttttccaaggcgatcagctgaagaaccgagtaaaaaaaatctgcgaggggtttagggcgtctttgtacccatgtccagaaacgccgcaagaaagaaaagaaatggcctccggcgtgaacactcgtattgatgatctccaaatggtgctgaaccagaccgaggatcatcgccagagagtactgcaggccgctgcaaagaatattcgtgtttggtttattaaagttcgaaaaatgaaagctatttatcataccctaaatttgtgcaacattgatgtgacacagaaatgtttgatcgccgaagtttggtgtcccgtcacggatctggacagtatccagttcgcgttacgccgaggaacggagcacagtggatcgacggtccctagtattctgaataggatgcaaaccaaccaaaccccacctacttacaataagaccaacaaattcacttacggctttcagaacattgtggacgcatatgggatagggacatatcgtgaaatcaacccagcgccatatacaatcattaccttcccatttctgtttgcagtgatgtttggagatttcggacacgggatattgatgactctatttgccgtgtggatggtgctccgggagtcccgaatcctgtctcaaaaaaacgagaatgagatgttctcaaccgtgttcagcggaaggtacatcattttactgatgggtgttttcagcatgtatactggtctgatttataacgactgtttctctaaatccctgaacatctttggcagttcatggagcgtgcgaccaatgtttacttataactggaccgaggagacactacgcggaaaccccgttctgcaactcaacccagcgttgcctggtgtgttcggaggcccataccccttcggtattgatcccatttggaatatcgcaacaaacaagcttacctttctcaattcgtttaagatgaagatgtctgtgattctgggcatcatccacatgctattcggcgtttcactgagtttgttcaaccatatttatttcaagaagcctctgaatatttactttggcttcatcccggagatcattttcatgacgagtctattcggctatctggttattttgattttctacaagtggactgcttacgacgcccacaccagcgagaatgccccttcgttactgattcactttattaatatgttcctcttttcctatccggagagcggatactcgatgttatactccggacagaaagggattcagtgctttctggtcgtggtggctctcctgtgcgttccgtggatgttactgtttaagcctctggttttgcgcaggcagtacctacgcaggaagcatctaggaacactgaactttggcggaatccgagtcggcaatggtcctacagaagaggatgcagaaatcatccaacatgatcagctcagtacccactccgaagacgccgacgaaccctccacttcaggccagtttgactttggcgatacaatggtgcaccaggcaattcataccatcgagtactgtctggggtgtataagtaatactgccagttatctgcggctctgggccttgagtttggctcatgctcagctgtccgaagtcctgtggactatggtgattcacatcggccttagcgtcaagtcattggcaggtggtctggtactattcttcttttttacagccttcgccaccctgaccgttgctatcctccttatcatggaggggctttctgcattccttcatgcactcaggcttcactgggtcgagtttcagaacaagttctactccgggaccggttttaagtttctgcccttctcttttgagcatatccgggaggggaagttcgaggagtag

SEQ ID NO: 47206 - DNA, 4139 bp, Artificial Sequence
  derived and/or modified sequence
ggcggcgcaggggcggggctttacggacgcaagcacgtcgaagcgctgctcctggagccgcggagggtgcgggtttggctgcggtggtttctgtggcggttgctgtggcggagtttggaggttggagagaaatccaggtactcactagactggtaccttctgccaccatgggggagcttttccggagtgaagaaatgacactggcccagctttttctacagtcagaggctgcttattgttgtgtcagtgaattaggagaacttggaaaggttcagtttcgtgacttaaatccagatgtgaatgttttccaacggaaatttgtgaatgaagttagaagatgtgaagaaatggatcgaaagcttcgatttgttgagaaagagataagaaaagctaacattccgattatggacaccggtgaaaacccagaggttcccttcccccgggacatgattgacttagaggccaattttgagaagattgaaaatgaactgaaggaaatcaacacaaaccaggaagctctgaagagaaacttcctggaactgaccgaattaaaatttatacttcgcaaaactcagcaattttttgatgagatggcggatccagacttgttggaagagtcctcatccctcttggagccaagtgagatgggaagaggcactcctttaagacttggcttcgtggctggtgtcattaaccgggagcgcatccctacttttgagcgcatgctttggcgggtatgccggggaaatgtgttcctgcgacaggctgaaatcgagaaccccctggaggatcctgtgactggcgactacgtgcacaagtctgtgtttatcattttcttccaaggcgatcagctgaaaaacagagtcaagaaaatctgtgaagggttccgagcctcactctatccctgtcctgagacaccacaggagaggaaggaaatggcttctggagtgaataccaggattgatgatctccaaatggttctgaatcaaacggaggatcaccgccagagggttctgcaggcagctgctaagaacatccgtgtctggttcatcaaagtgcggaagatgaaggccatctatcacaccctgaacctgtgcaacatagatgtgactcagaaatgcttgattgcagaggtctggtgccctgtcaccgaccttgactccatccagtttgcactcagaaggggcacggaacacagtggttccactgtaccttccattttgaacaggatgcagacaaaccagactcccccaacctataacaaaaccaacaagtttacctatggctttcagaacatagtagatgcttatggaattggaacttaccgagagataaatccagctccgtatactattatcacgttcccttttctatttgctgtgatgtttggagacttcggtcatggcattttaatgaccctttttgctgtgtggatggtactgagggagagccggatcctttcccagaagaatgagaatgagatgtttagcactgtgttcagtggtcgatacattattttattgatgggtgtgttctccatgtacactggcctcatctacaatgattgcttttccaagtctcttaatatctttgggtcatcctggagtgtacggccgatgtttacttataattggactgaagagacgcttcgggggaaccctgttctacagctgaacccagccctccctggagtgtttggtggaccatacccttttggcattgatccaatttggaacattgctaccaataaactgacgttcttgaactcctttaagatgaagatgtctgttatccttggtatcatccatatgctgtttggagtcagcctgagtctgttcaaccatatctatttcaagaagcccctgaatatctactttggatttattcctgaaataatcttcatgacctctttgtttggctatttggttatccttattttttacaagtggacggcctatgatgctcatacctctgagaatgcaccaagccttctgatccatttcataaacatgttcctcttttcctacccagagtctggttattcaatgttgtattctggacagaaaggaattcagtgtttcctggtagtggttgcactactgtgtgtaccttggatgctgctgtttaaaccattggtccttcgccgtcagtatttgaggagaaagcatttgggaactctcaactttggtgggatcagggtgggcaacggaccgacagaggaggatgctgagattattcagcatgaccagctctccacccactcagaggacgcagacgagccttccgaggacgaagtgtttgactttggggacaccatggtccaccaggccatccacaccatcgagtactgcctgggctgcatctccaacactgcctcctacttgcggctctgggccctcagcctcgctcatgcgcagctgtctgaggtgctttggaccatggtgatccacatcggcctgagcgtgaagagcttggcgggaggtttggtgctgttcttcttcttcactgcctttgccaccctgaccgtggccatcctcctgatcatggagggcctctcggcctttctccacgcactgcgcttacactgggttgagttccagaataaattctacagcgggaccggtttcaagttcttacccttctccttcgagcatattcgggaagggaagtttgaagagtgagtccctgtgagggccgtgtgccccatgctaccctccccgcctccctccacagtgatcagctgtgcctctctgcctgttggttgtgatctgtgggcaccagctcattcgtgtcaccctgtctgtgagtcatttagatagaatagtcctccttgggtctcccaccacccctagctttgtgtgtagtgtagtgattttctggctgtcactcatactcactgggcaccagccttgccctcttagcctccatccatccagacagcccttcccacctcctggtggtgagccagtctgcattcccacgccatcccaaagccctttcatcttccccgtgcattgtagatggaaggagcacccatgccattcacatctagactttgagttccctgcatctgccaccgtagtttctagcaggagtagtggggggagtaatacagattcttccctagaaggggacactggtaacatgtcccactcttggattagcaggggtgggtccaggaagatgatatttgcgtcttttgcccacccccctggcattcagctggacccaactaggccatcatgagtggcttctccctgtcatccccaggggtcataggatatctacaccgcctttctgaccccaccctgcactcccatcctttcctctctccccgttcatgccctgcactacatagcacagccgggatgcttggaacagaggccttggctgctccgcagtgcacagggcttccctctctcggggttggcttcttcccaggccttgcatgggccctgcccacaagcacaccctcaggccgagggtgcagactgatgctcttccctgatggagaccctgagatcttccccacccccaatcatgatgtcttcagtgtgggactggggtcctcttggttctgcctgcagcctgcctggctccgcccctagtgccccctcctcaccacactggccccaggtctcaggaggggtgtcctgggcagggaaggtcagtgtcactgatggtttgctgtttggaagccattggcagggctgccgtgcatgtggctgtgagggctgcacagtcctgccaaggggcttcctccttgtcaccccgaaccttgtaatcgtgtgctggcgtggcagccctggctaagttaatccccaccgctttcagtggtagaaagaattccctgagtgggccaggctggtgccctcctcctaccctggcttttctgagtgagctgcctggagccctcatcccctctcccaggctgggctggccctgggcggggccactgtgtgctggcccactgtgacctgacccgaccttgtgcagcccccctgccctggtgtcctgggttttcgtgatgatctttgctctgtttccagtggggtttgaagcagagttcagggaaccctgcccaaggtcctcctgttcagacattcctatgttgaataaagtatgtttgacttccccgg

SEQ ID NO: 47207 - DNA, 3046 bp, Artificial Sequence
  derived and/or modified sequence
ggcggcgcaggggcggggctttacggacgcaagcacgtcgaagcgctgctcctggagccgcggagggtgcgggtttggctgcggtggtttctgtggcggttgctgtggcggagtttggaggttggagagaaatccaggtactcactagactggtaccttctgccaccatgggggagcttttccggagtgaagaaatgacactggcccagctttttctacagtcagaggctgcttattgttgtgtcagtgaattaggagaacttggaaaggttcagtttcgtgacttaaatccagatgtgaatgttttccaacggaaatttgtgaatgaagttagaagatgtgaagaaatggatcgaaagcttcgatttgttgagaaagagataagaaaagctaacattccgattatggacaccggtgaaaacccagaggttcccttcccccgggacatgattgacttagaggccaattttgagaagattgaaaatgaactgaaggaaatcaacacaaaccaggaagctctgaagagaaacttcctggaactgaccgaattaaaatttatacttcgcaaaactcagcaattttttgatgagatggcggatccagacttgttggaagagtcctcatccctcttggagccaagtgagatgggaagaggcactcctttaagacttggcttcgtggctggtgtcattaaccgggagcgcatccctacttttgagcgcatgctttggcgggtatgccggggaaatgtgttcctgcgacaggctgaaatcgagaaccccctggaggatcctgtgactggcgactacgtgcacaagtctgtgtttatcattttcttccaaggcgatcagctgaaaaacagagtcaagaaaatctgtgaagggttccgagcctcactctatccctgtcctgagacaccacaggagaggaaggaaatggcttctggagtgaataccaggattgatgatctccaaatggttctgaatcaaacggaggatcaccgccagagggttctgcaggcagctgctaagaacatccgtgtctggttcatcaaagtgcggaagatgaaggccatctatcacaccctgaacctgtgcaacatagatgtgactcagaaatgcttgattgcagaggtctggtgccctgtcaccgaccttgactccatccagtttgcactcagaaggggcacggaacacagtggttccactgtaccttccattttgaacaggatgcagacaaaccagactcccccaacctataacaaaaccaacaagtttacctatggctttcagaacatagtagatgcttatggaattggaacttaccgagagataaatccagctccgtatactattatcacgttcccttttctatttgctgtgatgtttggagacttcggtcatggcattttaatgaccctttttgctgtgtggatggtactgagggagagccggatcctttcccagaagaatgagaatgagatgtttagcactgtgttcagtggtcgatacattattttattgatgggtgtgttctccatgtacactggcctcatctacaatgattgcttttccaagtctcttaatatctttgggtcatcctggagtgtacggccgatgtttacttataattggactgaagagacgcttcgggggaaccctgttctacagctgaacccagccctccctggagtgtttggtggaccatacccttttggcattgatccaatttggaacattgctaccaataaactgacgttcttgaactcctttaagatgaagatgtctgttatccttggtatcatccatatgctgtttggagtcagcctgagtctgttcaaccatatctatttcaagaagcccctgaatatctactttggatttattcctgaaataatcttcatgacctctttgtttggctatttggttatccttattttttacaagtggacggcctatgatgctcatacctctgagaatgcaccaagccttctgatccatttcataaacatgttcctcttttcctacccagagtctggttattcaatgttgtattctggacagaaaggaattcagtgtttcctggtagtggttgcactactgtgtgtaccttggatgctgctgtttaaaccattggtccttcgccgtcagtatttgaggagaaagcatttgggaactctcaactttggtgggatcagggtgggcaacggaccgacagaggaggatgctgagattattcagcatgaccagctctccacccactcagaggacgcagacgagccttccacctcgggacagtttgactttggggacaccatggtccaccaggccatccacaccatcgagtactgcctgggctgcatctccaacactgcctcctacttgcggctctgggccctcagcctcgctcatgcgcagctgtctgaggtgctttggaccatggtgatccacatcggcctgagcgtgaagagcttggcgggaggtttggtgctgttcttcttcttcactgcctttgccaccctgaccgtggccatcctcctgatcatggagggcctctcggcctttctccacgcactgcgcttacactgggttgagttccagaataaattctacagcgggaccggtttcaagttcttacccttctccttcgagcatattcgggaagggaagtttgaagagtgagtccctgtgagggccgtgtgccccatgctaccctccccgcctccctccacagtgatcagctgtgcctctctgcctgttggttgtgatctgtgggcaccagctcattcgtgtcaccctgtctgtgagtcatttagatagaatagtcctccttgggtctcccaccacccctagctttgtgtgtagtgtagtgattttctggctgtcactcatactcactgggcaccagccttgccctcttagcctccatccatccagacagcccttcccacctcctggtggtgagccagtctgcattcccacgccatcccaaagccctttcatcttccccgtgcattgtagatggaaggagcacccatgccattcac

SEQ ID NO: 47208 - DNA, 2514 bp, Artificial Sequence
  derived and/or modified sequence
atgggcgagctgttcagaagcgaggagatgaccctggcccagctgttcctgcagagcgaggccgcctactgctgcgtgagcgagctgggcgagctgggcaaggtgcagttcagagacctgaaccccgacgtgaacgtgttccagagaaagttcgtgaacgaggtgagaagatgcgaggagatggacagaaagctgagattcgtggagaaggagatcagaaaggccaacatccccatcatggacaccggcgagaaccccgaggtgcccttccccagagacatgatcgacctggaggccaacttcgagaagatcgagaacgagctgaaggagatcaacaccaaccaggaggccctgaagagaaacttcctggagctgaccgagctgaagttcatcctgagaaagacccagcagttcttcgacgagatggccgaccccgacctgctggaggagagcagcagcctgctggagcccagcgagatgggcagaggcacccccctgagactgggcttcgtggccggcgtgatcaacagagagagaatccccaccttcgagagaatgctgtggagagtgtgcagaggcaacgtgttcctgagacaggccgagatcgagaaccccctggaggaccccgtgaccggcgactacgtgcacaagagcgtgttcatcatcttcttccagggcgaccagctgaagaacagagtgaagaagatctgcgagggcttcagagccagcctgtacccctgccccgagaccccccaggagagaaaggagatggccagcggcgtgaacaccagaatcgacgacctgcagatggtgctgaaccagaccgaggaccacagacagagagtgctgcaggccgccgccaagaacatcagagtgtggttcatcaaggtgagaaagatgaaggccatctaccacaccctgaacctgtgcaacatcgacgtgacccagaagtgcctgatcgccgaggtgtggtgccccgtgaccgacctggacagcatccagttcgccctgagaagaggcaccgagcacagcggcagcaccgtgcccagcatcctgaacagaatgcagaccaaccagaccccccccacctacaacaagaccaacaagttcacctacggcttccagaacatcgtggacgcctacggcatcggcacctacagagagatcaaccccgccccctacaccatcatcaccttccccttcctgttcgccgtgatgttcggcgacttcggccacggcatcctgatgaccctgttcgccgtgtggatggtgctgagagagagcagaatcctgagccagaagaacgagaacgagatgttcagcaccgtgttcagcggcagatacatcatcctgctgatgggcgtgttcagcatgtacaccggcctgatctacaacgactgcttcagcaagagcctgaacatcttcggcagcagctggagcgtgagacccatgttcacctacaactggaccgaggagaccctgagaggcaaccccgtgctgcagctgaaccccgccctgcccggcgtgttcggcggcccctaccccttcggcatcgaccccatctggaacatcgccaccaacaagctgaccttcctgaacagcttcaagatgaagatgagcgtgatcctgggcatcatccacatgctgttcggcgtgagcctgagcctgttcaaccacatctacttcaagaagcccctgaacatctacttcggcttcatccccgagatcatcttcatgaccagcctgttcggctacctggtgatcctgatcttctacaagtggaccgcctacgacgcccacaccagcgagaacgcccccagcctgctgatccacttcatcaacatgttcctgttcagctaccccgagagcggctacagcatgctgtacagcggccagaagggcatccagtgcttcctggtggtggtggccctgctgtgcgtgccctggatgctgctgttcaagcccctggtgctgagaagacagtacctgagaagaaagcacctgggcaccctgaacttcggcggcatcagagtgggcaacggccccaccgaggaggacgccgagatcatccagcacgaccagctgagcacccacagcgaggacgccgacgagcccagcgaggacgaggtgttcgacttcggcgacaccatggtgcaccaggccatccacaccatcgagtactgcctgggctgcatcagcaacaccgccagctacctgagactgtgggccctgagcctggcccacgcccagctgagcgaggtgctgtggaccatggtgatccacatcggcctgagcgtgaagagcctggccggcggcctggtgctgttcttcttcttcaccgccttcgccaccctgaccgtggccatcctgctgatcatggagggcctgagcgccttcctgcacgccctgagactgcactgggtggagttccagaacaagttctacagcggcaccggcttcaagttcctgcccttcagcttcgagcacatcagagagggcaagttcgaggagtag

SEQ ID NO: 47209 - DNA, 2514 bp, Artificial Sequence
  derived and/or modified sequence
atgggcgagctgttcagaagcgaggagatgaccctggcccagctgttcctgcagagcgaggccgcctactgctgcgtgagcgagctgggcgagctgggcaaggtgcagttcagagacctgaaccccgacgtgaacgtgttccagagaaagttcgtgaacgaggtgagaagatgcgaggagatggacagaaagctgagattcgtggagaaggagatcagaaaggccaacatccccatcatggacaccggcgagaaccccgaggtgcccttccccagagacatgatcgacctggaggccaacttcgagaagatcgagaacgagctgaaggagatcaacaccaaccaggaggccctgaagagaaacttcctggagctgaccgagctgaagttcatcctgagaaagacccagcagttcttcgacgagatggccgaccccgacctgctggaggagagcagcagcctgctggagcccagcgagatgggcagaggcacccccctgagactgggcttcgtggccggcgtgatcaacagagagagaatccccaccttcgagagaatgctgtggagagtgtgcagaggcaacgtgttcctgagacaggccgagatcgagaaccccctggaggaccccgtgaccggcgactacgtgcacaagagcgtgttcatcatcttcttccagggcgaccagctgaagaacagagtgaagaagatctgcgagggcttcagagccagcctgtacccctgccccgagaccccccaggagagaaaggagatggccagcggcgtgaacaccagaatcgacgacctgcagatggtgctgaaccagaccgaggaccacagacagagagtgctgcaggccgccgccaagaacatcagagtgtggttcatcaaggtgagaaagatgaaggccatctaccacaccctgaacctgtgcaacatcgacgtgacccagaagtgcctgatcgccgaggtgtggtgccccgtgaccgacctggacagcatccagttcgccctgagaagaggcaccgagcacagcggcagcaccgtgcccagcatcctgaacagaatgcagaccaaccagaccccccccacctacaacaagaccaacaagttcacctacggcttccagaacatcgtggacgcctacggcatcggcacctacagagagatcaaccccgccccctacaccatcatcaccttccccttcctgttcgccgtgatgttcggcgacttcggccacggcatcctgatgaccctgttcgccgtgtggatggtgctgagagagagcagaatcctgagccagaagaacgagaacgagatgttcagcaccgtgttcagcggcagatacatcatcctgctgatgggcgtgttcagcatgtacaccggcctgatctacaacgactgcttcagcaagagcctgaacatcttcggcagcagctggagcgtgagacccatgttcacctacaactggaccgaggagaccctgagaggcaaccccgtgctgcagctgaaccccgccctgcccggcgtgttcggcggcccctaccccttcggcatcgaccccatctggaacatcgccaccaacaagctgaccttcctgaacagcttcaagatgaagatgagcgtgatcctgggcatcatccacatgctgttcggcgtgagcctgagcctgttcaaccacatctacttcaagaagcccctgaacatctacttcggcttcatccccgagatcatcttcatgaccagcctgttcggctacctggtgatcctgatcttctacaagtggaccgcctacgacgcccacaccagcgagaacgcccccagcctgctgatccacttcatcaacatgttcctgttcagctaccccgagagcggctacagcatgctgtacagcggccagaagggcatccagtgcttcctggtggtggtggccctgctgtgcgtgccctggatgctgctgttcaagcccctggtgctgagaagacagtacctgagaagaaagcacctgggcaccctgaacttcggcggcatcagagtgggcaacggccccaccgaggaggacgccgagatcatccagcacgaccagctgagcacccacagcgaggacgccgacgagcccagcaccagcggccagttcgacttcggcgacaccatggtgcaccaggccatccacaccatcgagtactgcctgggctgcatcagcaacaccgccagctacctgagactgtgggccctgagcctggcccacgcccagctgagcgaggtgctgtggaccatggtgatccacatcggcctgagcgtgaagagcctggccggcggcctggtgctgttcttcttcttcaccgccttcgccaccctgaccgtggccatcctgctgatcatggagggcctgagcgccttcctgcacgccctgagactgcactgggtggagttccagaacaagttctacagcggcaccggcttcaagttcctgcccttcagcttcgagcacatcagagagggcaagttcgaggagtag

SEQ ID NO: 47210 - protein, 189 aa, Artificial Sequence
  derived and/or modified sequence
MALVRGGWLWRQSSILRRWKRNWFALWLDGTLGYYHDETAQDEEDRVLIHFNVRDIKIGPECHDVQPPEGRSRDGLLTVNLREGGRLHLCAETKDDALAWKTALLEANSTPVRVYSPYQDYYEVVPPNAHEATYVRSYYGPPYAGPGVTHVIVREDPCYSAGAPLAMGMLAGAATGAALGSLMWSPCWF

SEQ ID NO: 47211 - protein, 208 aa, Artificial Sequence
  derived and/or modified sequence
MSPAAPVPPDSALESPFEEMALVRGGWLWRQSSILRRWKRNWFALWLDGTLGYYHDETAQDEEDRVLIHFNVRDIKIGPECHDVQPPEGRSRDGLLTVNLREGGRLHLCAETKDDALAWKTALLEANSTPVRVYSPYQDYYEVVPPNAHEATYVRSYYGPPYAGPGVTHVIVREDPCYSAGAPLAMGMLAGAATGAALGSLMWSPCWF

SEQ ID NO: 47212 - protein, 117 aa, Artificial Sequence
  derived and/or modified sequence
MALVRGGWLWRQSSILRRWKRNWFALWLDGTLGYYHDETAQDEEDRVLIHFNVRDIKIGPECHDVQPPEGRSRDGLLTVNLREGGRLHLCAETKDDALAWKTALLEANSTPVRVYSP

SEQ ID NO: 47213 - protein, 163 aa, Artificial Sequence
  derived and/or modified sequence
MALVRGGWLWRQSSILRRWKRNWFALWLDGTLGYYHDETAQDEEDRVLIHFNVRDIKIGPECHDVQPPEGRSRDGLLTVNLREGGRLHLCAETKDDALAWKTALLEANSTPVRVYSPYQDYYEVVPPNAHEATYVRSYYGPPYAGPGVTHVIVREDPCYSAGA

SEQ ID NO: 47214 - protein, 159 aa, Artificial Sequence
  derived and/or modified sequence
MALVRGGWLWRQSSILRRWKRNWFALWLDGTLGYYHDETAQDEEDRVLIHFNVRDIKIGPECHDVQPPEGRSRDGLLTVNLREGGRLHLCAETKDDALAWKTALLEANSTPMIRLKLIHPHNKYLLSCYSAGAPLAMGMLAGAATGAALGSLMWSPCWF

SEQ ID NO: 47215 - protein, 154 aa, Artificial Sequence
  derived and/or modified sequence
MALVRGGWLWRQSSILRRWKRNWFALWLDGTLGYYHDETAQDEEDRVLIHFNVRDIKIGPECHDVQPPEGRSRDGLLTVNLREGGRLHLCAETKDDALAWKTALLEANSTPVRVYSPYQDYYEVVPPNAHEATYVRSYYGPPYAGPGVTHVIVR

SEQ ID NO: 47216 - DNA, 627 bp, Artificial Sequence
  derived and/or modified sequence
atgtcacccgcagctccggtcccccctgacagcgctcttgaatcacctttcgaagagatggcacttgtgcggggaggatggctttggcgacaatccagcattctgaggagatggaaacggaattggttcgcactgtggctcgacgggacactgggctactatcacgacgagactgcccaggatgaagaggatcgcgttctgatccactttaatgtccgggatatcaaaattggaccggaatgccatgatgttcaacccccagagggccggtccagagatggactgctgacagttaacctacgcgagggcggcaggcttcacttgtgtgccgaaacaaaggatgatgcgctggcttggaagaccgccctgctggaagcaaattcaactccggtccgcgtgtacagtccctatcaggactactatgaggtggtgcctccgaatgcgcacgaggctacttacgtcaggtcctactacggtcccccttatgccgggcccggcgtcactcacgtcattgtgagagaggatccatgctattcagcaggggccccgctggccatgggaatgctggccggggcagcaaccggcgccgccctcggatcattaatgtggtccccgtgctggttctag

SEQ ID NO: 47217 - DNA, 627 bp, Artificial Sequence
  derived and/or modified sequence
atgagccctgctgcccctgtgcccccagattctgccctggagagcccctttgaggagatggccctggtgcggggcggctggctgtggaggcagagcagcatcctgcggcgctggaagaggaactggtttgccctgtggctggatggcaccctgggctactaccatgatgaaacagcccaggatgaagaagatagagtgctgatccacttcaacgtgcgggacatcaagattggccctgagtgccatgatgtgcagcccccagagggccgcagcagagatggcctgctgactgtgaacctgcgggagggcggccgcctgcacctgtgtgccgagaccaaggatgatgccctggcctggaagacagccctgctggaggccaacagcacccctgtgcgggtgtacagcccctaccaggactactatgaggtggtgcccccaaatgcccacgaggccacctacgtgcgcagctactacggccccccctatgccggccctggggtgacccacgtgattgtgcgggaggacccctgctacagcgctggggcccccctggccatgggcatgctggccggggccgccaccggggccgccctgggcagcctgatgtggagcccctgctggttctag

SEQ ID NO: 47218 - DNA, 627 bp, Artificial Sequence
  derived and/or modified sequence
atgagccccgccgcccccgtgccccccgacagcgccctggagagcccttttgaggagatggccctggtacgcgggggttggctttggcgtcaaagttcgatcctacggcgatggaaacgaaattggtttgcactgtggctcgacggaaccctcggatactatcatgacgaaacagcacaggatgaggaggatcgagtgcttatacattttaacgtgcgggacattaagatcgggccagagtgccacgacgtgcagccaccggagggccgtagtagggatgggctgctgaccgtgaacctgagagagggggggcgattacacctttgcgccgaaaccaaagacgatgcattggcctggaagacagcgctgttggaggcaaattccacgccagtgagggtatactccccctatcaggactactacgaggtggtgccacctaatgctcatgaggccacttacgttagaagctattatggcccaccttacgccggcccgggggtgactcatgttattgttcgcgaagatccctgctactctgctggcgcaccgttagctatgggtatgctggcaggggcggctacgggtgcagccctagggtccctaatgtggtcgccctgctggttctag

SEQ ID NO: 47219 - DNA, 2016 bp, Artificial Sequence
  derived and/or modified sequence
actccccctccctggggtgggcaggtccggagggcggggcccgggggcagctgggctctcaggcgctgcgggaggagagaaatgccccaggctctccggggcacacaaagcgcaggcgcagcgggttgggtggcagcagcatcgagtagcggccgcttaggcagcaacatccgcaacaagtgtagacaaggtcccgcctgactccgctctggaaagtccttttgaagaaatggccctggtgaggggcggctggctgtggagacagagctccatcctccgccgctggaagcggaactggtttgccctgtggctggacgggaccctgggatactaccacgatgagacagcgcaggacgaggaggaccgtgtgctcatccacttcaatgtccgtgacataaagatcggcccagagtgccatgatgtgcagcccccagagggccggagccgagatggcctgctgactgtgaacctacgggaaggcggccgcctgcacctctgtgcggagaccaaggatgatgccctagcatggaagacagcactgctggaggcaaactccaccccggtgcgcgtctacagcccgtaccaagactactacgaggtggtgccccccaatgcacacgaggccacgtatgtccgcagctactacggaccgccctacgcaggccctggcgtgacgcacgtgatagtgcgggaggatccctgctacagcgccggcgcccctctggccatgggcatgcttgcgggagccgccactggggcggcgctgggctcgctcatgtggtcgccctgctggttctgagccctgggactcggagcactgacccctgcgcttggattgctagactcctcttcctcctggaccccatcctctaccatccaagccctgtcccactttggccctatcctctccattagctccttccgggtttggaccattccccccactccctacccttaatccccacatgggaagaagctatcatcacaggtacaaacatcgcttgaagtcttcacatctaccactagacacccccaaaatctgttatagacatttatggatacatttcctctaaacacaacagggcacagcaaatacgacttcatttggcttcgagttccccaggcgctgtagacacaacatgaatcgggctctctgctctctccttagggagctcgagtcctggtggggagaacaggagtaaacaaggacttgacaaagctgaagagttatcagtcctttgacaaggacaggtggggcagggagcaagacaggtaggctggaagaacagttattggcaagtatgcagagccgtgaacgtcatggcatgtccaaggaattaaatgggagttcatttgggctggggtggaggctgggatcagaccgtggtgggccttcaagctaaggagcttcctaggtgaaaggggagatgtgagccttctctggagggaagtttcatgattgcatctataatgaatatattgcctgttttgtgaatactgacacatgtccatacctaaaacactcctgagtcaagtcccatccttcccacaaacagcttcctggctggtacccatgataacaattgagctgaacctggggacccctggttggggaacaggtgagttctatttgagacttccagccctagaaagctgcctccgtccagaaatgcctctcacaccaggagctcggccctctctttgtagctgtgactgtcaccctctcaggctttgtctcatccttcattctgaataagatggcagtgttctcctctggggcctgatccacctctacaccagcccaggaagccccatctgtgcctgccctcaggtggtccaccagtctccccctttggttcccttccagtctcttccccctttctatcccaatcaccaatagaaatgctaacatccctgcctggtagccagactagcccactaaagctcccctgtaaatgggggctccattagttctgctgccgagactaataaagatttggttggctctagcagtaa

SEQ ID NO: 47220 - DNA, 2275 bp, Artificial Sequence
  derived and/or modified sequence
aagagaggaaggcttaaagagccagactgcgcagccaggactggggtgatgggcgctgtcctgccaggccaaagaatgaagatgtagccccgcccccaacctagggaggaggaccagcccggttcctgtcctgcccccgcaacctcgccccgattccactccgggaacctcggcgatgctgagccaagaccacttctgaatcagggatgacttgtctagtgaacctagggtcagagccatcagttggaaaggctgggaggagcctggagaaagagggcgaccttccttgggatctgtgcgctccctccttgcctccccctccagcctcccacttggtagcaccttcctgatccccttatctctaaggcgctcagggaaatgccccgctgcgggagccttctgggaaatgctgccctggccacccaggaaccatgagccctgcagccccggtcccgcctgactccgctctggaaagtccttttgaagaaatggccctggtgaggggcggctggctgtggagacagagctccatcctccgccgctggaagcggaactggtttgccctgtggctggacgggaccctgggatactaccacgatgagacagcgcaggacgaggaggaccgtgtgctcatccacttcaatgtccgtgacataaagatcggcccagagtgccatgatgtgcagcccccagagggccggagccgagatggcctgctgactgtgaacctacgggaaggcggccgcctgcacctctgtgcggagaccaaggatgatgccctagcatggaagacagcactgctggaggcaaactccaccccggtgcgcgtctacagcccgtaccaagactactacgaggtggtgccccccaatgcacacgaggccacgtatgtccgcagctactacggaccgccctacgcaggccctggcgtgacgcacgtgatagtgcgggaggatccctgctacagcgccggcgcccctctggccatgggcatgcttgcgggagccgccactggggcggcgctgggctcgctcatgtggtcgccctgctggttctgagccctgggactcggagcactgacccctgcgcttggattgctagactcctcttcctcctggaccccatcctctaccatccaagccctgtcccactttggccctatcctctccattagctccttccgggtttggaccattccccccactccctacccttaatccccacatgggaagaagctatcatcacaggtacaaacatcgcttgaagtcttcacatctaccactagacacccccaaaatctgttatagacatttatggatacatttcctctaaacacaacagggcacagcaaatacgacttcatttggcttcgagttccccaggcgctgtagacacaacatgaatcgggctctctgctctctccttagggagctcgagtcctggtggggagaacaggagtaaacaaggacttgacaaagctgaagagttatcagtcctttgacaaggacaggtggggcagggagcaagacaggtaggctggaagaacagttattggcaagtatgcagagccgtgaacgtcatggcatgtccaaggaattaaatgggagttcatttgggctggggtggaggctgggatcagaccgtggtgggccttcaagctaaggagcttcctaggtgaaaggggagatgtgagccttctctggagggaagtttcatgattgcatctataatgaatatattgcctgttttgtgaatactgacacatgtccatacctaaaacactcctgagtcaagtcccatccttcccacaaacagcttcctggctggtacccatgataacaattgagctgaacctggggacccctggttggggaacaggtgagttctatttgagacttccagccctagaaagctgcctccgtccagaaatgcctctcacaccaggagctcggccctctctttgtagctgtgactgtcaccctctcaggctttgtctcatccttcattctgaataagatggcagtgttctcctctggggcctgatccacctctacaccagcccaggaagccccatctgtgcctgccctcaggtggtccaccagtctccccctttggttcccttccagtctcttccccctttctatcccaatcaccaatagaaatgctaacatccctgcctggtagccagactagcccactaaagctcccctgtaaatgggggctccattagttctgctgccgagactaataaagatttggttggctctagcagtaa

SEQ ID NO: 47221 - DNA, 1049 bp, Artificial Sequence
  derived and/or modified sequence
acttctacagatctagaaactgagaccaggacagagggccagggaggagggatatggccaaagttaccaagctgaggctggaatccaggctcctggtccccacccccaccccacaccaatggctgccctgctgaccccacagtgacagtgctcccattctcttcctgagcagagaatggggaggaggccgaggccgcctggcccttgtttactaaccctccctcaaacgtttcctgggtggctccccagggacggcagggctgggggcttctctccagggagctgctgctgaggcctgtgtctcccgtggctcctctgacaggtcccgcctgactccgctctggaaagtccttttgaagaaatggccctggtgaggggcggctggctgtggagacagagctccatcctccgccgctggaagcggaactggtttgccctgtggctggacgggaccctgggatactaccacgatgagacagcgcaggacgaggaggaccgtgtgctcatccacttcaatgtccgtgacataaagatcggcccagagtgccatgatgtgcagcccccagagggccggagccgagatggcctgctgactgtgaacctacgggaaggcggccgcctgcacctctgtgcggagaccaaggatgatgccctagcatggaagacagcactgctggaggcaaactccaccccggtgcgcgtctacagcccgtaccaagactactacgaggtggtgccccccaatgcacacgaggccacgtatgtccgcagctactacggaccgccctacgcaggccctggcgtgacgcacgtgatagtgcgggaggatccctgctacagcgccggcgcccctctggccatgggcatgcttgcgggagccgccactggggcggcgctgggctcgctcatgtggtcgccctgctggttctgagccctgggactcggagcactgacccctgcgcttggattgctagactcctcttcctcctggaccccatcctctaccatccaagccctgtcccactttggccctatcctctccattagct

SEQ ID NO: 47222 - DNA, 567 bp, Artificial Sequence
  derived and/or modified sequence
aaagcgcaggcgcagcgggttgggtggcagcagcatcgagtagcggccgcttaggcagcaacatccgcaacaagtgtagacaagacattctgatttaattgttacggagtgtggcctggtatcggaagttctcaaagctcctgccggcataacggtttgaagccaggactgctgggtgtcccgcctgactccgctctggaaagtccttttgaagaaatggccctggtgaggggcggctggctgtggagacagagctccatcctccgccgctggaagcggaactggtttgccctgtggctggacgggaccctgggatactaccacgatgagacagcgcaggacgaggaggaccgtgtgctcatccacttcaatgtccgtgacataaagatcggcccagagtgccatgatgtgcagcccccagagggccggagccgagatggcctgctgactgtgaacctacgggaaggcggccgcctgcacctctgtgcggagaccaaggatgatgccctagcatggaagacagcactgctggaggcaaactccaccccggtgcgcgtctacagcccg

SEQ ID NO: 47223 - DNA, 685 bp, Artificial Sequence
  derived and/or modified sequence
ggcaagtgagtcgccctcaggaacagagggcacctacctggattccagtgcaagctacatcatgtacatggatgagtcatttgctaaccctcagtttgtccatctgtaaaacaggagtaaggattcccttcctaacagggttagagtggggacaaggtcccgcctgactccgctctggaaagtccttttgaagaaatggccctggtgaggggcggctggctgtggagacagagctccatcctccgccgctggaagcggaactggtttgccctgtggctggacgggaccctgggatactaccacgatgagacagcgcaggacgaggaggaccgtgtgctcatccacttcaatgtccgtgacataaagatcggcccagagtgccatgatgtgcagcccccagagggccggagccgagatggcctgctgactgtgaacctacgggaaggcggccgcctgcacctctgtgcggagaccaaggatgatgccctagcatggaagacagcactgctggaggcaaactccaccccggtgcgcgtctacagcccgtaccaagactactacgaggtggtgccccccaatgcacacgaggccacgtatgtccgcagctactacggaccgccctacgcaggccctggcgtgacgcacgtgatagtgcgggaggatccctgctacagcgccggcgccc

SEQ ID NO: 47224 - DNA, 656 bp, Artificial Sequence
  derived and/or modified sequence
aacatccgcaacaagtgtagacaaggtgggtgcatcaaggggaggggctggaaaaggagtctgcacctgaccctcttgtctgatctgtgtcaagaccgtggagaggggagggagcggcaagaggaacagacaaggctgggccttccagcccaggtcccgcctgactccgctctggaaagtccttttgaagaaatggccctggtgaggggcggctggctgtggagacagagctccatcctccgccgctggaagcggaactggtttgccctgtggctggacgggaccctgggatactaccacgatgagacagcgcaggacgaggaggaccgtgtgctcatccacttcaatgtccgtgacataaagatcggcccagagtgccatgatgtgcagcccccagagggccggagccgagatggcctgctgactgtgaacctacgggaaggcggccgcctgcacctctgtgcggagaccaaggatgatgccctagcatggaagacagcactgctggaggcaaactccaccccggtgcgcgtctacagcccgtaccaagactactacgaggtggtgccccccaatgcacacgaggccacgtatgtccgcagctactacggaccgccctacgcaggccctggcgtgacgcacgtgatagtgcggga

SEQ ID NO: 47225 - DNA, 627 bp, Artificial Sequence
  derived and/or modified sequence
atgtcaccagctgcgccagtccctccggactctgcgctggaatcgcccttcgaagaaatggcgcttgtgagaggaggctggttgtggagacaaagctcaattctaaggcgttggaagcggaactggtttgctttgtggctcgacggtaccctcggctattatcacgacgagactgcccaggatgaggaagatagagttctgattcattttaacgtcagggatatcaaaattgggccagaatgccatgacgttcaacctcctgaaggcagatcgagagacggtctgctcacagttaatttaagagagggcggaagactacacttatgtgcagagaccaaggacgatgccctcgcctggaagactgcactgctggaggcaaactctaccccagtgcgagtttacagcccttatcaggattactacgaagtagtgccaccgaatgcccacgaagcaacctacgtgagaagctactatggacccccttatgcaggcccaggcgtaactcatgttatcgtccgcgaggatccctgctactctgccggagcgcctctggcgatggggatgttagccggtgcagctacaggcgctgcgttggggtctctgatgtggtcaccgtgctggttttag

SEQ ID NO: 47226 - DNA, 627 bp, Artificial Sequence
  derived and/or modified sequence
atgagccccgccgcccccgtgccccccgacagcgccctggagagccccttcgaggagatggccctggtgagaggcggctggctgtggagacagagcagcatcctgagaagatggaagagaaactggttcgccctgtggctggacggcaccctgggctactaccacgacgagaccgcccaggacgaggaggacagagtgctgatccacttcaacgtgagagacatcaagatcggccccgagtgccacgacgtgcagccccccgagggcagaagcagagacggcctgctgaccgtgaacctgagagagggcggcagactgcacctgtgcgccgagaccaaggacgacgccctggcctggaagaccgccctgctggaggccaacagcacccccgtgagagtgtacagcccctaccaggactactacgaggtggtgccccccaacgcccacgaggccacctacgtgagaagctactacggccccccctacgccggccccggcgtgacccacgtgatcgtgagagaggacccctgctacagcgccggcgcccccctggccatgggcatgctggccggcgccgccaccggcgccgccctgggcagcctgatgtggagcccctgctggttctag

SEQ ID NO: 47227 - DNA, 675 bp, Artificial Sequence
  derived and/or modified sequence
atggccttggtacgtggagggtggctgtggagacaatcatcaatcttgcgtcggtggaaacgaaactggttcgctctgtggctggatggaaccctcgggtactatcatgacgagacggcccaggatgaggaagatcgtgtgctgattcactttaacgtacgggatataaagattggacccgagtgtcatgacgtccaacctccagaaggcaggagccgcgacgggctcctgacagtcaacctgcgggaaggaggtaggctgcacctttgcgctgagacgaaggatgatgccctggcttggaaaacagcattactcgaagctaacagcactcctgcaccagcaggagctacagtgcccccccgttccagaagggtatgcagtaaagtgcggtgtgttacaagatcttggagcccttgtaaagtggagagacgaatctgggtgcgggtttactcgccgtatcaagactattatgaagtcgtgcctcctaacgcacatgaagccacttatgtgcggtcatattacggccctccgtacgcggggccgggcgttactcatgtaatcgtgcgggaggacccatgttacagcgccggagccccactagcgatgggaatgctcgccggcgcagctacgggtgcagccctaggttctcttatgtggagcccctgctggttctag

SEQ ID NO: 47228 - DNA, 483 bp, Artificial Sequence
  derived and/or modified sequence
atggccctggtaagaggaggctggctttggagacagtccagtattctccgtaggtggaagaggaactggtttgccctgtggctggatggcacgctggggtactatcatgacgagaccgcacaggacgaagaggaccgcgtgttaattcactttaatgtgcgggatattaagatcggacccgagtgccacgacgtgcagcctcctgagggaaggtctcgagacggactactgacagttaacctacgcgagggaggacggctccacctctgtgctgaaaccaaagacgatgccctggcctggaaaaccgccttactggaagcaaactctactcctgcccccgccggtgccacggtcccacccagaagtaggagggtttgcagcaaagtccgctgcgtcacccgctcctggtcaccttgtaaggtggagcggcggatatgggtgagagtctactctccctaccaggactactatgaagtggtctag

SEQ ID NO: 47229 - DNA, 675 bp, Artificial Sequence
  derived and/or modified sequence
atggccctggtgcggggcggctggctgtggaggcagagcagcatcctgcggcgctggaagaggaactggtttgccctgtggctggatggcaccctgggctactaccatgatgaaacagcccaggatgaggaggacagagtgctgatccacttcaacgtgcgggacatcaagattggaccagaatgtcatgatgtgcagcccccagagggccgcagcagagatggcctgctgactgtgaacctgcgggagggcggccgcctgcacctgtgtgccgagaccaaggatgatgccctggcctggaagacagccctgctggaggccaacagcaccccagccccagctggggccaccgtgcccccaagaagcagaagagtgtgcagcaaggtgcgctgtgtgaccaggtcctggagcccctgcaaggtggagcggcgcatctgggtgcgggtgtacagcccctaccaggactactatgaggtggtgcccccaaatgcccacgaggccacctacgtgcgcagctactacggccccccctatgccggccctggggtgacccacgtgattgtgcgggaggacccctgctacagcgctggggcccccctggccatgggcatgctggccggggccgccaccggggccgccctgggcagcctgatgtggagcccctgctggttctag

SEQ ID NO: 47230 - DNA, 483 bp, Artificial Sequence
  derived and/or modified sequence
atggccctggtgcggggcggctggctgtggaggcagagcagcatcctgcggcgctggaagaggaactggtttgccctgtggctggatggcaccctgggctactaccatgatgaaacagcccaggatgaggaggacagagtgctgatccacttcaacgtgcgggacatcaagattggaccagaatgtcatgatgtgcagcccccagagggccgcagcagagatggcctgctgactgtgaacctgcgggagggcggccgcctgcacctgtgtgccgagaccaaggatgatgccctggcctggaagacagccctgctggaggccaacagcaccccagccccagctggggccaccgtgcccccaagaagcagaagagtgtgcagcaaggtgcgctgtgtgaccaggtcctggagcccctgcaaggtggagcggcgcatctgggtgcgggtgtacagcccctaccaggactactatgaggtggtgtag

SEQ ID NO: 47231 - DNA, 675 bp, Artificial Sequence
  derived and/or modified sequence
atggccctggtgcggggcggctggctgtggcggcagagcagcatcctgagaaggtggaagaggaactggttcgcactgtggctggatggtactttggggtattatcatgacgagactgctcaggacgaggaggatcgggtactcattcatttcaacgtgcgcgacatcaagatcggacccgagtgccacgacgtccagccacctgagggccggtctcgcgacgggctgctgacagtaaacctgagggagggcggacggctgcacctgtgcgctgagaccaaagacgacgcactcgcatggaagactgctctgctagaagccaatagtacgcccgcacccgctggcgctaccgtccccccccggagcaggcgagtttgttctaaggttagatgcgtgacacgttcctggtctccctgtaaagttgagcgtagaatctgggtgcgagtatacagtccctaccaggattattacgaggtggttccacctaatgcacacgaggccacatatgttcgtagttactacggccctccttacgccgggcccggtgtgacacacgtgatcgtacgggaagatccttgttattcagcaggtgctccgctggctatgggcatgttggccggggcagctaccggggcagccctggggtctctgatgtggagcccttgctggttttag

SEQ ID NO: 47232 - DNA, 483 bp, Artificial Sequence
  derived and/or modified sequence
atggccctggtgcggggcggctggctgtggcggcagagcagcatcttgagaaggtggaagaggaactggtttgccctctggttggatggtactctcggctattaccatgacgagacagcccaggacgaggaagaccgggttctcatccacttcaatgttcgagatatcaagatcggaccagagtgtcacgacgtgcaacctccagaaggacgctctagagatgggctgctgacagtgaacctgagggaaggcggaaggctgcacctgtgtgccgagaccaaggatgatgcactcgcctggaaaaccgccttgctagaggccaattccacccccgcccccgcaggtgctaccgtgcctccgaggtctcgccgtgtgtgttccaaggtccgatgcgtgaccaggagctggagtccctgtaaggtagagcgccggatatgggtaagggtttattcaccctatcaggactactatgaggtagtctag

SEQ ID NO: 47233 - DNA, 675 bp, Artificial Sequence
  derived and/or modified sequence
atggcgctggttcgaggtggctggctgtggagacaatccagcatcctgcgcaggtggaagcggaattggtttgctctctggctcgatggcaccctgggctactatcatgatgaaactgcacaggatgaggaggatcgggtcctgatccacttcaatgtgagggacattaagattggtccagaatgccatgacgtccaaccaccagaaggcaggtcacgtgacggccttcttaccgttaatctgcgcgaaggaggcagacttcacctttgtgccgaaaccaaagacgacgctcttgcgtggaagaccgctctgctagaggcaaattctactcccgctcccgcaggagcgaccgtgccaccacggagtcgtagagtatgctcgaaagtccggtgtgtgaccagatcctggtcaccctgcaaggtcgaaagaagaatatgggtacgggtttacagtccttatcaggattactacgaagtggtgccacccaacgcccatgaggcaacgtacgttaggagctattacggcccaccgtacgctggcccaggagtgactcacgttatcgtacgcgaagacccctgctactctgctggcgcaccgctggctatgggcatgttagcaggtgccgctacgggtgctgcgctcggaagcctcatgtggtccccgtgctggttttag

SEQ ID NO: 47234 - DNA, 483 bp, Artificial Sequence
  derived and/or modified sequence
atggcactagtccggggaggctggctctggcggcagtctagtatacttcgacgttggaaacgaaactggtttgctctttggctggatggcaccctgggctactatcatgacgaaactgcccaggacgaagaggatcgggtcctgatccactttaatgtgagagacatcaaaatcggcccagagtgtcacgatgtgcagccccctgaaggaaggagcagggatggcctcctcactgttaatctgagggaaggaggacgactccatctatgcgccgagactaaggacgacgccctagcctggaaaacagccctgctggaggctaactcaacgcctgccccagcgggagccacggtcccccctaggtccaggcgggtctgctctaaggtccgctgtgtcacccggagctggtctccctgcaaggtagagcgcagaatttgggttcgggtgtactcaccctaccaggactattacgaagtagtatag

SEQ ID NO: 47235 - DNA, 675 bp, Artificial Sequence
  derived and/or modified sequence
atggccctggtgagaggcggctggctgtggagacagagcagcatcctgagaagatggaagagaaactggttcgccctgtggctggacggcaccctgggctactaccacgacgagaccgcccaggacgaggaggacagagtgctgatccacttcaacgtgagagacatcaagatcggccccgagtgccacgacgtgcagccccccgagggcagaagcagagacggcctgctgaccgtgaacctgagagagggcggcagactgcacctgtgcgccgagaccaaggacgacgccctggcctggaagaccgccctgctggaggccaacagcacccccgcccccgccggcgccaccgtgccccccagaagcagaagagtgtgcagcaaggtgagatgcgtgaccagaagctggagcccctgcaaggtggagagaagaatctgggtgagagtgtacagcccctaccaggactactacgaggtggtgccccccaacgcccacgaggccacctacgtgagaagctactacggccccccctacgccggccccggcgtgacccacgtgatcgtgagagaggacccctgctacagcgccggcgcccccctggccatgggcatgctggccggcgccgccaccggcgccgccctgggcagcctgatgtggagcccctgctggttctag

SEQ ID NO: 47236 - DNA, 483 bp, Artificial Sequence
  derived and/or modified sequence
atggccctggtgagaggcggctggctgtggagacagagcagcatcctgagaagatggaagagaaactggttcgccctgtggctggacggcaccctgggctactaccacgacgagaccgcccaggacgaggaggacagagtgctgatccacttcaacgtgagagacatcaagatcggccccgagtgccacgacgtgcagccccccgagggcagaagcagagacggcctgctgaccgtgaacctgagagagggcggcagactgcacctgtgcgccgagaccaaggacgacgccctggcctggaagaccgccctgctggaggccaacagcacccccgcccccgccggcgccaccgtgccccccagaagcagaagagtgtgcagcaaggtgagatgcgtgaccagaagctggagcccctgcaaggtggagagaagaatctgggtgagagtgtacagcccctaccaggactactacgaggtggtgtag

SEQ ID NO: 47237 - DNA, 570 bp, Artificial Sequence
  derived and/or modified sequence
atggctctggtgagaggtggttggctttggagacaatcctctattcttcggagatggaaaagaaactggttcgccctgtggttggatggcactctcggatactaccatgacgagaccgcacaggacgaggaagatagggtgctgatccatttcaacgtgcgggacattaaaatcggcccggagtgccatgatgtgcagcccccagaagggcgtagtcgtgacggactgttgacagtgaatctgcgcgaaggtgggagactccatctctgtgccgaaacaaaagacgacgcactggcctggaaaacagccctcttagaggccaacagcacaccagtaagggtgtatagcccctaccaggattattacgaggtggtgcctcctaatgctcacgaggcaacctacgtaagatcttactacggtcccccctacgcaggaccaggagtcactcatgtgatcgttcgtgaagacccatgttactctgccggagcacccctagcaatgggaatgctcgcaggcgctgctaccggagcagcactgggatcattgatgtggagcccatgttggttttag

SEQ ID NO: 47238 - DNA, 570 bp, Artificial Sequence
  derived and/or modified sequence
atggccctcgtccgcgggggctggctctggcggcagtccagcatcttgagacgttggaaacgcaattggtttgctctgtggctggatggcaccctagggtactatcacgatgaaacagcacaggacgaggaggaccgtgtgctcatccattttaatgtccgcgacattaagattggtcccgaatgccatgatgtacagccgccagaggggcggtccagagacggactgctaacggttaatcttcgcgagggaggccggctccacttgtgtgccgagaccaaggatgatgccctagcatggaagacagctctcctggaagccaattctacacccgtgagagtgtattccccataccaggattactacgaagttgtgccccccaacgcgcacgaagctacctatgtacgcagctactacggacccccttatgcgggccctggcgtgacccacgtcattgtccgcgaagacccgtgttattccgccggggctccattagccatgggcatgctcgcaggagcggccacaggagccgcgttgggttctttaatgtggtcgccttgttggttctag

SEQ ID NO: 47239 - DNA, 354 bp, Artificial Sequence
  derived and/or modified sequence
atggcacttgtgaggggagggtggctgtggaggcagagcagcatcttgcgcaggtggaaaaggaattggttcgctctgtggctggacggcactctcggctattatcacgacgaaacagctcaggatgaggaagacagggtactgatccattttaatgtgagggatatcaaaatcggacctgagtgtcatgatgtgcagcccccagaaggaagatccagggatggcctcctgaccgtgaatctccgggagggtggacggctgcatttatgcgccgagacgaaagatgacgcactggcctggaagacagcactactggaggccaattctacacctgttcgcgtttactcaccatag

SEQ ID NO: 47240 - DNA, 492 bp, Artificial Sequence
  derived and/or modified sequence
atggcgctcgtacggggcggatggctgtggcggcagagctcaattctaagacgatggaaaaggaattggttcgcactctggttagatggtacactcggatactaccacgatgagactgctcaggacgaggaagatcgcgtactcatacacttcaatgttagagatatcaaaattggcccagaatgccatgacgtgcagcccccggaagggcgttcacgggacgggctgctaacagtgaatttgcgcgagggcgggagattgcacctgtgcgctgaaacaaaggacgatgcgttggcctggaaaaccgcgcttctggaggcgaacagcacacccgtgagagtgtacagcccatatcaggattactacgaagtcgtgcctcccaacgcccatgaagctacttacgttcgatcttactacggaccaccctatgctgggcctggtgtgactcatgtaatagtacgggaggacccgtgctattctgccggtgcatag

SEQ ID NO: 47241 - DNA, 465 bp, Artificial Sequence
  derived and/or modified sequence
atggcactcgtccgcggaggttggttatggcgccaaagctctattctccgaagatggaagagaaattggttcgctctatggctggacggcactctgggttactaccatgatgaaacagcccaggacgaggaggatagagtgctcattcatttcaacgtgagggacattaagatcggtccagaatgtcacgacgtacaacctcccgagggacgaagcagggacggtctgcttactgtcaatttgcgtgaaggaggccggcttcatctgtgcgccgagaccaaagatgatgcactggcttggaagactgctttactggaggcaaatagcacgccagtgagggtctattctccctaccaggattactatgaagtggtgccaccaaacgcacatgaggcaacctatgtcaggagttactacgggcctccctacgcaggccctggggtgacacacgtaattgtgcgctag

SEQ ID NO: 47242 - DNA, 570 bp, Artificial Sequence
  derived and/or modified sequence
atggccctggtgcggggcggctggctgtggaggcagagcagcatcctgcggcgctggaagaggaactggtttgccctgtggctggatggcaccctgggctactaccatgatgaaacagcccaggatgaggaggacagagtgctgatccacttcaacgtgcgggacatcaagattggaccagaatgtcatgatgtgcagcccccagagggccgcagcagagatggcctgctgactgtgaacctgcgggagggcggccgcctgcacctgtgtgccgagaccaaggatgatgccctggcctggaagacagccctgctggaggccaacagcacccctgtgcgggtgtacagcccctaccaggactactatgaggtggtgcccccaaatgcccacgaggccacctacgtgcgcagctactacggccccccctatgccggccctggggtgacccacgtgattgtgcgggaggacccctgctacagcgctggggcccccctggccatgggcatgctggccggggccgccactggagctgccctgggcagcctgatgtggagcccctgctggttctag

SEQ ID NO: 47243 - DNA, 354 bp, Artificial Sequence
  derived and/or modified sequence
atggccctggtgcggggcggctggctgtggaggcagagcagcatcctgcggcgctggaagaggaactggtttgccctgtggctggatggcaccctgggctactaccatgatgaaacagcccaggatgaggaggacagagtgctgatccacttcaacgtgcgggacatcaagattggaccagaatgtcatgatgtgcagcccccagagggccgcagcagagatggcctgctgactgtgaacctgcgggagggcggccgcctgcacctgtgtgccgagaccaaggatgatgccctggcctggaagacagccctgctggaggccaacagcacccctgtgcgggtgtacagcccctag

SEQ ID NO: 47244 - DNA, 492 bp, Artificial Sequence
  derived and/or modified sequence
atggccctggtgcggggcggctggctgtggaggcagagcagcatcctgcggcgctggaagaggaactggtttgccctgtggctggatggcaccctgggctactaccatgatgaaacagcccaggatgaggaggacagagtgctgatccacttcaacgtgcgggacatcaagattggaccagaatgtcatgatgtgcagcccccagagggccgcagcagagatggcctgctgactgtgaacctgcgggagggcggccgcctgcacctgtgtgccgagaccaaggatgatgccctggcctggaagacagccctgctggaggccaacagcacccctgtgcgggtgtacagcccctaccaggactactatgaggtggtgcccccaaatgcccacgaggccacctacgtgcgcagctactacggccccccctatgccggccctggggtgacccacgtgattgtgcgggaggacccctgctacagcgctggggcctag

SEQ ID NO: 47245 - DNA, 465 bp, Artificial Sequence
  derived and/or modified sequence
atggccctggtgcggggcggctggctgtggaggcagagcagcatcctgcggcgctggaagaggaactggtttgccctgtggctggatggcaccctgggctactaccatgatgaaacagcccaggatgaggaggacagagtgctgatccacttcaacgtgcgggacatcaagattggaccagaatgtcatgatgtgcagcccccagagggccgcagcagagatggcctgctgactgtgaacctgcgggagggcggccgcctgcacctgtgtgccgagaccaaggatgatgccctggcctggaagacagccctgctggaggccaacagcacccctgtgcgggtgtacagcccctaccaggactactatgaggtggtgcccccaaatgcccacgaggccacctacgtgcgcagctactacggccccccctatgccggccctggggtgacccacgtgattgtgaggtag

SEQ ID NO: 47246 - DNA, 570 bp, Artificial Sequence
  derived and/or modified sequence
atggccctggtgcggggcggctggctgtggcggcagagcagcatcctgaggcgctggaaaagaaactggtttgcattgtggctggacggaacattgggatactaccatgatgaaactgctcaggacgaagaggacagagttctcattcattttaatgttagagacataaagattgggcctgagtgccacgacgtgcagccgccagagggaagatctcgggacggattgttgaccgtcaatctgcgagaaggcgggcgcctgcacctatgcgccgagactaaggatgatgccctagcttggaagaccgccctgctcgaagccaattccacgcccgtgcgagtatactcaccataccaggattactacgaggtcgtgccacctaacgcccatgaagcaacctatgtccggagctactatggaccaccttatgccggacccggcgttacccacgtcatagttcgggaggatccatgttactctgccggtgcccccctcgccatgggcatgcttgctggggccgctacaggcgcggccctggggtccttgatgtggagcccatgctggttttag

SEQ ID NO: 47247 - DNA, 570 bp, Artificial Sequence
  derived and/or modified sequence
atggccctggtgcggggcggctggctgtggcggcagagcagcatcctacgcagatggaagcgcaattggttcgccctctggctggacggcactctgggatactatcatgacgaaactgcgcaggacgaggaagaccgtgtcctcatccactttaatgtgcgagacatcaagatcggcccagagtgccacgacgtgcagccgcctgaaggccgaagccgtgatgggctgctaaccgtaaacttaagagaaggaggaagattgcacctttgtgccgagacaaaggatgacgccctcgcctggaaaaccgcattgttggaggccaattcaacgcctgtgcgtgtctactccccttatcaggattactacgaggtcgtgcctcccaacgctcatgaggccacatacgtgaggtcctactatggacctccgtatgctggaccgggtgtgacacacgtgatcgtgcgcgaagacccctgttacagtgcaggcgccccactcgcaatgggaatgctcgcgggggctgcaacgggcgcggccctcggctctctgatgtggtctccatgctggttttag

SEQ ID NO: 47248 - DNA, 354 bp, Artificial Sequence
  derived and/or modified sequence
atggccctggtgcggggcggctggctgtggcggcagagcagcatcctacgtcggtggaagaggaattggtttgctctgtggctggacggtactctagggtattatcacgacgagacggcccaggacgaggaggaccgcgtcctaatccactttaacgtgcgtgatatcaaaatcggtccagagtgccacgacgtccagccccccgaggggcgcagcagagacgggctgctgaccgtgaatctccgcgaagggggcagattacacctgtgcgccgagactaaggacgacgccctggcgtggaaaaccgccctcctagaggccaacagcacacccgtccgcgtgtactccccttag

SEQ ID NO: 47249 - DNA, 492 bp, Artificial Sequence
  derived and/or modified sequence
atggccctggtgcggggcggctggctgtggcggcagagcagcatcctgcgcagatggaagagaaattggtttgcgttgtggcttgacggaactcttggatattatcacgatgagaccgctcaggacgaagaagaccgcgtacttattcactttaacgtgagagatataaaaatcggcccagaatgccacgacgtccagcccccagagggtagaagcagagatggcttattgactgtgaatctgcgtgagggcggtagacttcacctgtgtgcagagaccaaagatgatgccctcgcgtggaagactgctctgctcgaggcaaacagcacccctgtacgggtctacagcccttaccaggactattatgaggtcgtaccgccaaatgcgcatgaagctacctatgtgcgttcctactatggccccccctacgccgggccgggagtaacacatgtgattgtgcgcgaagatccatgctacagtgcaggtgcctag

SEQ ID NO: 47250 - DNA, 465 bp, Artificial Sequence
  derived and/or modified sequence
atggccctggtgcggggcggctggctgtggcggcagagcagcatcctgcggcggtggaaaaggaattggtttgctctgtggttggatggcaccctggggtactaccacgatgaaactgcacaagacgaggaggaccgtgtacttattcattttaacgtacgggacatcaagatcggaccggaatgccacgacgtccagccaccagaagggcgtagtagagatggattgttaaccgtaaatctgcgggaagggggcagacttcatttgtgtgccgagactaaggacgacgcactggcttggaagaccgccctcctggaagctaactctacccccgtgagggtttacagcccctatcaggattactacgaagtcgttccccctaatgctcatgaggcgacatacgtgcggtcctactacgggcccccatacgccgggcctggtgtgacccacgtaatcgtgagatag

SEQ ID NO: 47251 - DNA, 570 bp, Artificial Sequence
  derived and/or modified sequence
atggcgctggtccggggaggctggctctggcgccagtcaagtattctgcgccgatggaagagaaattggttcgccctgtggctggatgggacccttggctattaccacgacgaaacagcgcaggacgaagaagatagagttcttatacatttcaacgtgcgagatataaagataggtcctgagtgtcacgatgtgcaacccccagagggcaggtctcgtgacggactactcaccgtaaacctacgtgagggtgggcgattgcatttatgcgccgagaccaaggacgatgccttggcttggaaaaccgctctcctcgaggcaaattctactcctgtgagggtctactctccctaccaggattattacgaggtggttccacctaacgcccacgaagctacctatgtacgatcatattacggcccaccctacgcagggccaggcgtcacacatgtgattgtgcgcgaggatccttgttatagcgcaggggctccgttggcaatggggatgctcgccggagccgctacaggggcagccctcggatcactaatgtggagtccatgctggttctag

SEQ ID NO: 47252 - DNA, 570 bp, Artificial Sequence
  derived and/or modified sequence
atggctctggtccggggagggtggctctggcggcagtctagtatccttcgcaggtggaagcgcaattggtttgctctctggcttgatggcactttaggctactaccacgacgaaacggcccaggacgaggaagatcgggtcctgattcactttaacgtacgtgatattaagattgggccagaatgtcatgacgtacagcctcctgagggcaggagcagggacggtttactcaccgtaaaccttcgcgagggcggtaggctacacctctgtgcagagaccaaagatgacgcactggcatggaagacagccttgctcgaagctaattcaaccccagtcagggtgtactccccataccaggattactatgaggtggttcctcccaacgctcacgaagcgacctacgtacgttcttattacggccctccatatgctggccctggcgtgacacacgttattgtcagggaggacccctgctacagcgcaggagcccctctggctatgggcatgctggcgggagcagcgacaggcgctgccctgggcagcctgatgtggtccccttgctggttttag

SEQ ID NO: 47253 - DNA, 354 bp, Artificial Sequence
  derived and/or modified sequence
atggctctggtgcgtggcggttggctctggcggcagtcttcgatactacggcgatggaaacggaactggttcgcactctggttagatggtaccctcggttattaccatgacgagactgcccaggatgaggaggatagggtcctcatccactttaacgtgcgggacatcaaaattgggcctgaatgccatgacgtccagccccctgagggcagatcccgggacgggctcttaaccgttaacctgcgggagggcggacgccttcacctgtgtgctgaaaccaaagatgacgcactggcatggaagactgcactcctcgaggcaaacagcaccccggtgcgggtctactcgccctag

SEQ ID NO: 47254 - DNA, 492 bp, Artificial Sequence
  derived and/or modified sequence
atggctctcgtaagaggcggatggttgtggaggcagtcaagcatcctacggaggtggaaacgcaactggttcgccctgtggctggatggaacattgggctactatcacgacgaaaccgcacaagacgaagaagacagggtcctaattcactttaatgtcagagatatcaagattggtccagagtgccacgatgtacagccgcctgagggcaggagtagagatggtctgctcactgtgaacctacgcgaggggggacgacttcacctgtgcgcagaaacaaaggatgatgccctggcttggaagacagcgcttctcgaggccaattctacgcccgtgcgcgtgtattccccttatcaagactactacgaggttgtgccaccaaacgctcacgaagctacatatgtcaggagctactatggccctccatatgcgggacctggcgttacgcacgtaatcgtgcgtgaagacccttgctacagcgcgggagcgtag

SEQ ID NO: 47255 - DNA, 465 bp, Artificial Sequence
  derived and/or modified sequence
atggcactggtccgcggaggatggttgtggcgacagtcatctatccttagaaggtggaagagaaattggtttgctctctggctggatggcactcttggctactaccatgacgaaactgcccaggacgaagaagaccgagtgctcatccattttaatgttcgtgacatcaagattggcccagaatgccacgatgtgcagcctccagaaggcaggtcaagagacggattgctcacggtgaatctgcgcgagggagggcgactgcatctatgtgccgaaactaaggacgacgctttagcctggaagaccgccctcctggaagccaattcgacgccagtgcgcgtttactctccctaccaggactattacgaagtggtgcccccaaatgcacatgaagctacttacgtccgcagctattacggcccaccctatgccggaccgggagtgacccacgtaatcgtccgatag

SEQ ID NO: 47256 - DNA, 570 bp, Artificial Sequence
  derived and/or modified sequence
atggccctggtgagaggcggctggctgtggagacagagcagcatcctgagaagatggaagagaaactggttcgccctgtggctggacggcaccctgggctactaccacgacgagaccgcccaggacgaggaggacagagtgctgatccacttcaacgtgagagacatcaagatcggccccgagtgccacgacgtgcagccccccgagggcagaagcagagacggcctgctgaccgtgaacctgagagagggcggcagactgcacctgtgcgccgagaccaaggacgacgccctggcctggaagaccgccctgctggaggccaacagcacccccgtgagagtgtacagcccctaccaggactactacgaggtggtgccccccaacgcccacgaggccacctacgtgagaagctactacggccccccctacgccggccccggcgtgacccacgtgatcgtgagagaggacccctgctacagcgccggcgcccccctggccatgggcatgctggccggcgccgccaccggcgccgccctgggcagcctgatgtggagcccctgctggttctag

SEQ ID NO: 47257 - DNA, 354 bp, Artificial Sequence
  derived and/or modified sequence
atggccctggtgagaggcggctggctgtggagacagagcagcatcctgagaagatggaagagaaactggttcgccctgtggctggacggcaccctgggctactaccacgacgagaccgcccaggacgaggaggacagagtgctgatccacttcaacgtgagagacatcaagatcggccccgagtgccacgacgtgcagccccccgagggcagaagcagagacggcctgctgaccgtgaacctgagagagggcggcagactgcacctgtgcgccgagaccaaggacgacgccctggcctggaagaccgccctgctggaggccaacagcacccccgtgagagtgtacagcccctag

SEQ ID NO: 47258 - DNA, 492 bp, Artificial Sequence
  derived and/or modified sequence
atggccctggtgagaggcggctggctgtggagacagagcagcatcctgagaagatggaagagaaactggttcgccctgtggctggacggcaccctgggctactaccacgacgagaccgcccaggacgaggaggacagagtgctgatccacttcaacgtgagagacatcaagatcggccccgagtgccacgacgtgcagccccccgagggcagaagcagagacggcctgctgaccgtgaacctgagagagggcggcagactgcacctgtgcgccgagaccaaggacgacgccctggcctggaagaccgccctgctggaggccaacagcacccccgtgagagtgtacagcccctaccaggactactacgaggtggtgccccccaacgcccacgaggccacctacgtgagaagctactacggccccccctacgccggccccggcgtgacccacgtgatcgtgagagaggacccctgctacagcgccggcgcctag

SEQ ID NO: 47259 - DNA, 465 bp, Artificial Sequence
  derived and/or modified sequence
atggccctggtgagaggcggctggctgtggagacagagcagcatcctgagaagatggaagagaaactggttcgccctgtggctggacggcaccctgggctactaccacgacgagaccgcccaggacgaggaggacagagtgctgatccacttcaacgtgagagacatcaagatcggccccgagtgccacgacgtgcagccccccgagggcagaagcagagacggcctgctgaccgtgaacctgagagagggcggcagactgcacctgtgcgccgagaccaaggacgacgccctggcctggaagaccgccctgctggaggccaacagcacccccgtgagagtgtacagcccctaccaggactactacgaggtggtgccccccaacgcccacgaggccacctacgtgagaagctactacggccccccctacgccggccccggcgtgacccacgtgatcgtgagatag

SEQ ID NO: 47260 - protein, 326 aa, Artificial Sequence
  derived and/or modified sequence
MKHFLRMLIQVCLYFYCKFLWRCLKFVMRKLTGRCELQRICYNTKPGASRTMKIETSLRDSKSKLLQTSVSVHPDAIEKTIEDIMELKKINPDVNPQLGISLQACLLQIVGYRNLIADVEKLRREAYDSDNPQHEEMLLKLWKFLKPNTPLESRISKQWCEIGFQGDDPKTDFRGMGLLGLYNLQYFAERDATAAQQVLSDSLHPKCSKFSKAEWEKKRMDKAIGYSFAIVGINITDLAYNLLVSGALKTHFYNIAPEAPTLSHFQQTFCYLMHEFHKFWIEEDPMDIMEFNRVREKFRKRIIKQLQNPDMALCPHFAASEGLINM

SEQ ID NO: 47261 - DNA, 981 bp, Artificial Sequence
  derived and/or modified sequence
atgaagcacttcctgagaatgctgatccaggtgtgcctgtacttctactgcaagttcctgtggagatgcctgaagttcgtgatgagaaagctgaccggcagatgcgagctgcagagaatctgctacaacaccaagcccggcgccagcagaaccatgaagatcgagaccagcctgagagacagcaagagcaagctgctgcagaccagcgtgagcgtgcaccccgacgccatcgagaagaccatcgaggacatcatggagctgaagaagatcaaccccgacgtgaacccccagctgggcatcagcctgcaggcctgcctgctgcagatcgtgggctacagaaacctgatcgccgacgtggagaagctgagaagagaggcctacgacagcgacaacccccagcacgaggagatgctgctgaagctgtggaagttcctgaagcccaacacccccctggagagcagaatcagcaagcagtggtgcgagatcggcttccagggcgacgaccccaagaccgacttcagaggcatgggcctgctgggcctgtacaacctgcagtacttcgccgagagagacgccaccgccgcccagcaggtgctgagcgacagcctgcaccccaagtgcagcaagttcagcaaggccgagtgggagaagaagagaatggacaaggccatcggctacagcttcgccatcgtgggcatcaacatcaccgacctggcctacaacctgctggtgagcggcgccctgaagacccacttctacaacatcgcccccgaggcccccaccctgagccacttccagcagaccttctgctacctgatgcacgagttccacaagttctggatcgaggaggaccccatggacatcatggagttcaacagagtgagagagaagttcagaaagagaatcatcaagcagctgcagaaccccgacatggccctgtgcccccacttcgccgccagcgagggcctgatcaacatgtag

SEQ ID NO: 47262 - DNA, 981 bp, Artificial Sequence
  derived and/or modified sequence
atgaaacatttcttgcggatgttgatccaagtgtgtctgtatttctactgtaaattcctgtggcgatgcttaaagttcgtgatgcggaagctgacagggcgctgtgagctgcaaagaatttgctacaatacgaagccaggggcgagcagaaccatgaagatagagactagtttgagagattcgaaatcaaagctccttcagacatctgtctcagtgcaccccgatgccatcgagaaaaccatagaagatattatggagctcaaaaagatcaatccggacgtgaatccgcagcttgggatctctctccaggcttgcctgcttcagattgtcggctacaggaacctcatcgctgacgtggagaagctgaggcgggaagcctacgactctgataatcctcagcacgaggaaatgctgctgaagttgtggaagtttctcaagcccaatacaccacttgaatcaagaatatccaaacagtggtgcgagatagggttccagggcgatgatcctaaaacagactttagaggcatgggcctgctaggactttataacttacagtacttcgcagaaagagacgcaacagcagcacagcaggtgctgagtgacagcctgcacccaaagtgcagcaaatttagcaaagctgaatgggagaaaaagcgaatggacaaggccatcggttactctttcgcaattgtgggtataaacattaccgacctcgcatacaacctcctcgtgtctggtgctctcaagacccacttctataatattgcgcctgaagcccccaccctgagtcacttccaacaaaccttctgttatctgatgcatgaattccataagttttggatagaggaggaccctatggatattatggagtttaatcgagtgcgtgagaaattcagaaaacgcatcattaagcaactgcagaaccctgacatggctttatgtccccactttgccgccagcgaaggcctgatcaatatgtag

SEQ ID NO: 47263 - DNA, 1990 bp, Artificial Sequence
  derived and/or modified sequence
agtgcggcagccgcggccgcccctgtccagcctcggcgcccgggaccgagcgcgtcgctcgccgccgcggagcgcgtagccggagcgcctggggaaggcggagatgaagaccacgccgccgcgcgccgggagctgctgagcctaccgccgccagagtccagttgacacttactttgacaaaggcaaatttggaagcaattacttgaggacagttcatatagcatctggacagtcaacacgggcaccatgaagcacttcctgagaatgttgatccaggtatgcctgtatttttactgtaaatttctgtggcgctgcctgaaatttgtaatgaggaagctaactggaagatgtgaactacaacggatctgttataataccaagccgggagcttctagaaccatgaaaatcgaaacatcactgagggattctaaaagtaagctgttgcagacttctgtgagtgttcaccccgacgctattgaaaaaactatagaagatatcatggaactgaaaaaaattaatcctgacgtaaatccacagctgggaatctctcttcaggcttgccttctgcaaatcgttgggtacaggaaccttattgcagatgtggaaaaactgcgtagagaggcctatgattctgataatccccaacatgaagaaatgcttttgaagttatggaaattcttgaagcccaatactccactggaatctcggatttctaagcagtggtgtgaaattggtttccaaggtgatgatcctaaaacagactttcgaggaatgggacttctgggactgtacaatttgcagtatttcgcggaaagggatgccacagcagctcagcaggtcctgtctgactctcttcatccgaaatgcagcaaattcagcaaagcagaatgggagaagaaaaggatggataaggcaattgggtactcatttgcaattgtgggcatcaatataactgacctggcatataatctactggtcagcggagctctaaaaacccatttctacaatatcgccccagaagctccaacattgtctcactttcagcaaacattctgctatttgatgcatgaatttcataagttttggatcgaagaggaccccatggacataatggaatttaatcgtgtgagggagaaattccgcaagaggatcatcaaacagctgcagaacccagacatggcgctgtgcccacattttgctgcctcggaaggtttaatcaacatgtagttgcccacgccggttttaatggataccctggaacactgcctcattgtcttgttagatctctgcttaggtcgcagctcacgcattgaatgcacacagtgattgtatgcatgccttttggtacagtgttttcatctcttggtcataattccgagatccccagagaccactgtttctggagtatctgtcatccagtgactgctcatattgtggcattatgcagtgttacatcttgccttgatacccaggtatggagagagttttctatttttttagactttttttcctctccctcataattcagcattaaagaattgtatttctctagctgtattttgtatgtaagaggtttagctgaatctcattctgtgaaagccttttaatttattgaaatgtttcatgactactgctgctagctcttcaagccaggttcatgcttggacctcattctgataaagtataagactttaaaataatacaaaacagggccgggcgcagtggctcacacctgtaatcccagcactttggggagctgaggcgggcggatcacgaggtcaagagatcgagaccatcctggccaacatggtgaaaccccgtctctactaaaaataacaaaaattagctgggcgtggtggtgggtgcctgtaatcccagctactcgggaggctgaggcaggagaatcgcttgaacccgggaggtggaggttacagtgagccgagatcataccactgcactccagcctggcgacagagcaagactccatctc

SEQ ID NO: 47264 - DNA, 981 bp, Artificial Sequence
  derived and/or modified sequence
atgaagcacttcctgaggatgctgatccaggtgtgcctgtacttctactgcaagttcctgtggcgctgcctgaagtttgtgatgaggaagctgaccggccgctgtgagctgcagaggatctgctacaacaccaagccaggggccagcaggaccatgaagattgagaccagcctgcgggacagcaagagcaagctgctgcagacctctgtgtctgtgcacccagatgccatcgagaagaccatcgaggacatcatggagctgaagaagatcaacccagatgtgaacccccagctgggcatcagcctgcaggcctgcctgctgcagatcgtgggctacagaaacctgattgctgatgtggagaagctgcggcgggaggcctatgacagcgacaacccccagcacgaggagatgctgctgaagctgtggaagttcctgaagcccaacacccccctggagagccgcatcagcaagcagtggtgtgagatcggcttccagggagatgaccccaagacagacttccggggcatgggcctgctgggcctgtacaacctgcagtactttgctgagagagatgccacagctgcccagcaggtgctgagtgacagcctgcaccccaagtgcagcaagttcagcaaggccgagtgggagaagaagaggatggacaaggccatcggctacagctttgccatcgtgggcatcaacatcacagacctggcctacaacctgctggtgtctggggccctgaagacccacttctacaacatcgcccctgaggcccccaccctgagccacttccagcagaccttctgctacctgatgcatgagttccacaagttctggattgaggaggaccccatggacatcatggagttcaacagagtgcgggagaagttcaggaagaggatcatcaagcagctgcagaacccagacatggccctgtgcccccactttgctgccagcgagggcctcatcaacatgtag

SEQ ID NO: 47265 - DNA, 981 bp, Artificial Sequence
  derived and/or modified sequence
atgaagcacttcctgcggatgctgatccaggtgtgcctgtacttctattgcaagtttctgtggaggtgcctgaagttcgtcatgcggaagctgactggacgctgcgagctgcagagaatctgctataatactaaacccggcgcctcccgtacaatgaaaatcgaaactagtctgcgggacagtaaaagcaaactgttacagacaagtgtgtccgtgcacccggatgctatagagaaaacaattgaagacataatggagctgaagaagataaatcctgacgtgaacccccaactgggtattagcctgcaggcgtgccttctgcaaatcgtgggttacaggaatcttattgctgacgtggagaaactaaggagagaggcctatgacagtgacaacccccagcatgaggaaatgctcttgaaactctggaaatttctgaaacccaacacgccattagaaagtagaatctccaagcagtggtgcgagatcggattccagggtgatgaccccaaaacagatttcagagggatggggttgttaggcctttacaacctccaatacttcgctgagagagacgctacagccgcccaacaggtgttatctgatagtctgcacccaaaatgcagcaagttttctaaggccgagtgggaaaagaaacggatggataaggccataggatattccttcgctatcgtgggtattaacattactgatctcgcttacaacttactggtgagtggagctctcaagactcatttttataacatagcgccagaggcacctaccctcagccacttccagcagacattttgctacctcatgcatgagttccacaagttctggatagaggaggatccaatggacataatggaattcaaccgggttcgggagaaattccgcaaacggatcattaagcaactgcagaatccagacatggctctgtgccctcacttcgctgcatctgaggggctcatcaacatgtag

SEQ ID NO: 47266 - DNA, 981 bp, Artificial Sequence
  derived and/or modified sequence
atgaagcatttccttcgcatgctcatccaggtatgtttatacttttactgcaagtttctgtggcgatgccttaaatttgtgatgcgaaaactcacaggccgatgtgagctacagagaatttgttacaatactaagcccggtgctagccgcacgatgaaaatagaaacatcattgagagatagtaagtccaagctgcttcagacctctgtatctgtgcaccctgacgccattgagaagaccatagaagatattatggaattaaaaaagattaatcctgacgtgaacccccaactggggattagcctacaggcgtgcctactgcagatagtaggctatcgtaaccttatagcggacgttgagaaactgagaagggaggcctatgacagcgataatccccagcatgaggaaatgttgctcaaattgtggaagtttctgaagcccaacacccctttagaatctaggatctcaaagcagtggtgcgagataggattccagggcgatgatccaaaaacagatttcaggggcatggggctgttagggctgtacaatctgcagtacttcgcagagcgggatgctaccgctgcgcaacaggtccttagcgattccctgcacccgaagtgcagtaaattcagtaaggctgagtgggaaaagaagagaatggacaaagcaataggatatagctttgctatagtcggtatcaatatcaccgacttggcctataatctgcttgtgtccggagccctgaagacccacttttacaacattgcaccggaagccccaaccctgagccactttcagcagactttctgttatctgatgcacgagtttcacaagttttggatcgaggaggacccaatggatattatggaatttaacagagtgagggagaagttcaggaaaaggatcattaagcagctacaaaacccagacatggcgctctgcccacattttgccgcttcagagggacttatcaatatgtag

SEQ ID NO: 47267 - protein, 520 aa, Artificial Sequence
  derived and/or modified sequence
MSNLRLANPAGGRPGSKGEPGRAADDGEGIVGAAMPDSGPLPLLQDMNKLSGGGGRRTRVEGGQLGGEEWTRHGSFVNKPTRGWLHPNDKVMGPGVSYLVRYMGCVEVLQSMRALDFNTRTQVTREAISLVCEAVPGAKGATRRRKPCSRPLSSILGRSNLKFAGMPITLTVSTSSLNLMAADCKQIIANHHMQSISFASGGDPDTAEYVAYVAKDPVNQRACHILECPEGLAQDVISTIGQAFELRFKQYLRNPPKLVTPHDRMAGFDGSAWDEEEEEPPDHQYYNDFPGKEPPLGGVVDMRLREGAAPGAARPTAPNAQTPSHLGATLPVGQPVGGDPEVRKQMPPPPPCPAGRELFDDPSYVNVQNLDKARQAVGGAGPPNPAINGSAPRDLFDMKPFEDALRVPPPPQSVSMAEQLRGEPWFHGKLSRREAEALLQLNGDFLVRESTTTPGQYVLTGLQSGQPKHLLLVDPEGVVRTKDHRFESVSHLISYHMDNHLPIISAGSELCLQQPVERKL

SEQ ID NO: 47268 - protein, 130 aa, Artificial Sequence
  derived and/or modified sequence
MPITLTVSTSSLNLMAADCKQIIANHHMQSISFASGGDPDTAEYVAYVAKDPVNQRACHILECPEGLAQDVISTIGQAFELRFKQYLRNPPKLVTPHDRMAGFDGSAWDEEEEEPPDHQYYNDFPGKEPP

SEQ ID NO: 47269 - protein, 584 aa, Artificial Sequence
  derived and/or modified sequence
MDLLPPKPKYNPLRNESLSSLEEGASGSTPPEELPSPSASSLGPILPPLPGDDSPTTLCSFFPRMSNLRLANPAGGRPGSKGEPGRAADDGEGIVGAAMPDSGPLPLLQDMNKLSGGGGRRTRVEGGQLGGEEWTRHGSFVNKPTRGWLHPNDKVMGPGVSYLVRYMGCVEVLQSMRALDFNTRTQVTREAISLVCEAVPGAKGATRRRKPCSRPLSSILGRSNLKFAGMPITLTVSTSSLNLMAADCKQIIANHHMQSISFASGGDPDTAEYVAYVAKDPVNQRACHILECPEGLAQDVISTIGQAFELRFKQYLRNPPKLVTPHDRMAGFDGSAWDEEEEEPPDHQYYNDFPGKEPPLGGVVDMRLREGAAPGAARPTAPNAQTPSHLGATLPVGQPVGGDPEVRKQMPPPPPCPAGRELFDDPSYVNVQNLDKARQAVGGAGPPNPAINGSAPRDLFDMKPFEDALRVPPPPQSVSMAEQLRGEPWFHGKLSRREAEALLQLNGDFLVRESTTTPGQYVLTGLQSGQPKHLLLVDPEGVVRTKDHRFESVSHLISYHMDNHLPIISAGSELCLQQPVERKL

SEQ ID NO: 47270 - DNA, 1563 bp, Artificial Sequence
  derived and/or modified sequence
atgagcaacctgagactggccaaccccgccggcggcagacccggcagcaagggcgagcccggcagagccgccgacgacggcgagggcatcgtgggcgccgccatgcccgacagcggccccctgcccctgctgcaggacatgaacaagctgagcggcggcggcggcagaagaaccagagtggagggcggccagctgggcggcgaggagtggaccagacacggcagcttcgtgaacaagcccaccagaggctggctgcaccccaacgacaaggtgatgggccccggcgtgagctacctggtgagatacatgggctgcgtggaggtgctgcagagcatgagagccctggacttcaacaccagaacccaggtgaccagagaggccatcagcctggtgtgcgaggccgtgcccggcgccaagggcgccaccagaagaagaaagccctgcagcagacccctgagcagcatcctgggcagaagcaacctgaagttcgccggcatgcccatcaccctgaccgtgagcaccagcagcctgaacctgatggccgccgactgcaagcagatcatcgccaaccaccacatgcagagcatcagcttcgccagcggcggcgaccccgacaccgccgagtacgtggcctacgtggccaaggaccccgtgaaccagagagcctgccacatcctggagtgccccgagggcctggcccaggacgtgatcagcaccatcggccaggccttcgagctgagattcaagcagtacctgagaaacccccccaagctggtgaccccccacgacagaatggccggcttcgacggcagcgcctgggacgaggaggaggaggagccccccgaccaccagtactacaacgacttccccggcaaggagccccccctgggcggcgtggtggacatgagactgagagagggcgccgcccccggcgccgccagacccaccgcccccaacgcccagacccccagccacctgggcgccaccctgcccgtgggccagcccgtgggcggcgaccccgaggtgagaaagcagatgccccccccccccccctgccccgccggcagagagctgttcgacgaccccagctacgtgaacgtgcagaacctggacaaggccagacaggccgtgggcggcgccggcccccccaaccccgccatcaacggcagcgcccccagagacctgttcgacatgaagcccttcgaggacgccctgagagtgcccccccccccccagagcgtgagcatggccgagcagctgagaggcgagccctggttccacggcaagctgagcagaagagaggccgaggccctgctgcagctgaacggcgacttcctggtgagagagagcaccaccacccccggccagtacgtgctgaccggcctgcagagcggccagcccaagcacctgctgctggtggaccccgagggcgtggtgagaaccaaggaccacagattcgagagcgtgagccacctgatcagctaccacatggacaaccacctgcccatcatcagcgccggcagcgagctgtgcctgcagcagcccgtggagagaaagctgtag

SEQ ID NO: 47271 - DNA, 1425 bp, Artificial Sequence
  derived and/or modified sequence
atgaacaagctgagcggcggcggcggcagaagaaccagagtggagggcggccagctgggcggcgaggagtggaccagacacggcagcttcgtgaacaagcccaccagaggctggctgcaccccaacgacaaggtgatgggccccggcgtgagctacctggtgagatacatgggctgcgtggaggtgctgcagagcatgagagccctggacttcaacaccagaacccaggtgaccagagaggccatcagcctggtgtgcgaggccgtgcccggcgccaagggcgccaccagaagaagaaagccctgcagcagacccctgagcagcatcctgggcagaagcaacctgaagttcgccggcatgcccatcaccctgaccgtgagcaccagcagcctgaacctgatggccgccgactgcaagcagatcatcgccaaccaccacatgcagagcatcagcttcgccagcggcggcgaccccgacaccgccgagtacgtggcctacgtggccaaggaccccgtgaaccagagagcctgccacatcctggagtgccccgagggcctggcccaggacgtgatcagcaccatcggccaggccttcgagctgagattcaagcagtacctgagaaacccccccaagctggtgaccccccacgacagaatggccggcttcgacggcagcgcctgggacgaggaggaggaggagccccccgaccaccagtactacaacgacttccccggcaaggagccccccctgggcggcgtggtggacatgagactgagagagggcgccgcccccggcgccgccagacccaccgcccccaacgcccagacccccagccacctgggcgccaccctgcccgtgggccagcccgtgggcggcgaccccgaggtgagaaagcagatgccccccccccccccctgccccgccggcagagagctgttcgacgaccccagctacgtgaacgtgcagaacctggacaaggccagacaggccgtgggcggcgccggcccccccaaccccgccatcaacggcagcgcccccagagacctgttcgacatgaagcccttcgaggacgccctgagagtgcccccccccccccagagcgtgagcatggccgagcagctgagaggcgagccctggttccacggcaagctgagcagaagagaggccgaggccctgctgcagctgaacggcgacttcctggtgagagagagcaccaccacccccggccagtacgtgctgaccggcctgcagagcggccagcccaagcacctgctgctggtggaccccgagggcgtggtgagaaccaaggaccacagattcgagagcgtgagccacctgatcagctaccacatggacaaccacctgcccatcatcagcgccggcagcgagctgtgcctgcagcagcccgtggagagaaagctgtag

SEQ ID NO: 47272 - DNA, 1755 bp, Artificial Sequence
  derived and/or modified sequence
atggacctgctgccccccaagcccaagtacaaccccctgagaaacgagagcctgagcagcctggaggagggcgccagcggcagcaccccccccgaggagctgcccagccccagcgccagcagcctgggccccatcctgccccccctgcccggcgacgacagccccaccaccctgtgcagcttcttccccagaatgagcaacctgagactggccaaccccgccggcggcagacccggcagcaagggcgagcccggcagagccgccgacgacggcgagggcatcgtgggcgccgccatgcccgacagcggccccctgcccctgctgcaggacatgaacaagctgagcggcggcggcggcagaagaaccagagtggagggcggccagctgggcggcgaggagtggaccagacacggcagcttcgtgaacaagcccaccagaggctggctgcaccccaacgacaaggtgatgggccccggcgtgagctacctggtgagatacatgggctgcgtggaggtgctgcagagcatgagagccctggacttcaacaccagaacccaggtgaccagagaggccatcagcctggtgtgcgaggccgtgcccggcgccaagggcgccaccagaagaagaaagccctgcagcagacccctgagcagcatcctgggcagaagcaacctgaagttcgccggcatgcccatcaccctgaccgtgagcaccagcagcctgaacctgatggccgccgactgcaagcagatcatcgccaaccaccacatgcagagcatcagcttcgccagcggcggcgaccccgacaccgccgagtacgtggcctacgtggccaaggaccccgtgaaccagagagcctgccacatcctggagtgccccgagggcctggcccaggacgtgatcagcaccatcggccaggccttcgagctgagattcaagcagtacctgagaaacccccccaagctggtgaccccccacgacagaatggccggcttcgacggcagcgcctgggacgaggaggaggaggagccccccgaccaccagtactacaacgacttccccggcaaggagccccccctgggcggcgtggtggacatgagactgagagagggcgccgcccccggcgccgccagacccaccgcccccaacgcccagacccccagccacctgggcgccaccctgcccgtgggccagcccgtgggcggcgaccccgaggtgagaaagcagatgccccccccccccccctgccccgccggcagagagctgttcgacgaccccagctacgtgaacgtgcagaacctggacaaggccagacaggccgtgggcggcgccggcccccccaaccccgccatcaacggcagcgcccccagagacctgttcgacatgaagcccttcgaggacgccctgagagtgcccccccccccccagagcgtgagcatggccgagcagctgagaggcgagccctggttccacggcaagctgagcagaagagaggccgaggccctgctgcagctgaacggcgacttcctggtgagagagagcaccaccacccccggccagtacgtgctgaccggcctgcagagcggccagcccaagcacctgctgctggtggaccccgagggcgtggtgagaaccaaggaccacagattcgagagcgtgagccacctgatcagctaccacatggacaaccacctgcccatcatcagcgccggcagcgagctgtgcctgcagcagcccgtggagagaaagctgtag

SEQ ID NO: 47273 - DNA, 1563 bp, Artificial Sequence
  derived and/or modified sequence
atgtcaaacctgaggctggcgaaccctgctggaggaagacctggatccaagggcgagccaggccgagccgctgacgacggtgaaggcatcgtaggtgccgccatgccagatagcggtccgctgccgctgctgcaggatatgaacaaactctccgggggcggaggacggcggactcgcgttgaaggcggtcaactgggaggggaagagtggaccaggcacggctcttttgtaaacaagcccacaaggggctggctccaccccaacgataaggtaatgggccccggggtttcatatttggtcagatacatggggtgcgtagaagtgttgcaatccatgcgcgcacttgatttcaacacaaggacgcaggtgacaagggaagccataagccttgtgtgtgaagcagttcctggcgcaaaaggagcgaccaggcgacgcaaaccctgctctcgcccacttagtagcatcctgggccggtccaatctgaagttcgccggtatgccaataacactgactgtctcaaccagtagcctgaatctaatggctgcagactgcaagcaaattattgccaaccaccacatgcaatccatttctttcgcaagtggtggcgaccccgataccgcagaatacgtggcttacgtggccaaggacccagtgaaccaacgcgcctgtcacattcttgaatgtcctgaggggctggcccaggatgtgatctcaaccatcgggcaggcatttgagctgagatttaagcagtacctgagaaacccacctaaactcgtgactcctcatgacagaatggccggattcgatggaagcgcgtgggacgaagaagaggaggagccccccgatcaccaatactacaatgacttccccggtaaggaaccccccttaggcggcgtcgttgacatgaggctgagggaaggagccgccccgggcgctgctcgccctaccgcacccaacgcacagacccctagccacctgggtgctaccttgccagtcgggcagcccgtgggaggcgacccagaagtcagaaagcagatgccccctccgcccccatgtcccgcagggcgagaactcttcgacgaccctagctacgttaatgttcagaacctggataaggcccggcaggccgtcggaggcgccggacctcccaacccagcaattaatgggtccgcaccccgggacctgtttgatatgaagcccttcgaggacgccctgagggtcccccctccgccacaatctgtctctatggccgagcagctcagaggagagccctggtttcacgggaagctttccagacgggaagctgaagctcttttacagctgaatggagactttcttgttagggaatccaccaccacaccaggccagtacgtattaacaggactccagagcgggcagcccaagcacctcctgctggtggacccagagggggtagtgcgaacgaaggaccaccggtttgaatccgtgtctcaccttattagctaccacatggacaatcacctgcctatcataagtgcagggagcgaactgtgccttcagcagcccgtagagcgtaaattgtag

SEQ ID NO: 47274 - DNA, 1425 bp, Artificial Sequence
  derived and/or modified sequence
atgaataagctctcaggtggcggtggtaggcgcaccagggtggagggcggacagctaggcggcgaggagtggacaaggcacggatcctttgtgaataaaccaacacgtggatggctccacccaaacgataaggtcatgggtcccggcgtgtcttacctggtacggtatatgggctgtgttgaagtcctccaatctatgcgggctctggattttaacacccgcacgcaggtgactagggaggccatcagcctagtttgcgaagcggtgcccggcgcaaagggggcgacaagaaggcgcaagccttgcagcagacctctttcaagcatattgggtcgttcaaacctcaaattcgcaggtatgccgatcaccctgaccgtaagcacttcatccttaaacctaatggccgccgactgtaagcagatcatagccaatcaccacatgcagtctatctccttcgcgagcggaggcgaccctgacacagctgagtacgtggcctatgttgcgaaggacccagtgaaccagagagcctgccacatcctcgagtgtcccgagggtttagctcaggacgtgatttctaccattggccaggctttcgaactgcgcttcaaacaatatcttagaaatcctcccaaactcgttacaccacacgacaggatggcaggtttcgacggctccgcatgggatgaagaggaggaggagcctcccgatcaccagtactataacgactttcctggaaaggagccaccactcggaggcgtggttgacatgaggctccgggaaggcgccgcacctggagctgctcgtcccacagctcccaatgctcagacgccttcccatctaggagcgacgttgcccgtgggtcagcctgtcggaggggatccagaggtccgcaaacagatgcctccacctcccccttgtccggctgggagggagctgttcgatgacccttcctatgtgaacgtgcaaaatttagataaagctcgccaggccgtgggaggagcaggtccccctaatccagccatcaatgggagtgcaccacgggacctgttcgacatgaagccctttgaagatgcactgagagttcccccacctccccaatccgtgtccatggctgagcaactgaggggtgagccgtggtttcacgggaaactgagccggcgagaggccgaagcccttttgcagctgaatggcgacttcctggtacgggagagcaccacgacacccggacagtatgtgcttactgggctccaatctggacagccgaagcacttattgttagtagatccagagggggttgtccggaccaaggaccaccgtttcgagagtgtaagtcatctgatatcctatcacatggataatcacctgccaattatttcagcgggcagcgaactctgtttacagcagcccgtggaaaggaaattgtag

SEQ ID NO: 47275 - DNA, 1755 bp, Artificial Sequence
  derived and/or modified sequence
atggacctgctccctcccaaacctaaatacaatccactcaggaatgagtccctctcctctttggaagaaggcgcctctggttccactccgcctgaagaattgcccagtccctcggcttcatctctcgggccaatcctgcctccacttccaggggatgactcccccaccaccttgtgttccttttttccacggatgagcaacctgcgtctcgctaacccggccgggggcaggccagggtctaaaggagagccaggtagggctgcagatgatggagaaggtatcgtgggggcagccatgccagatagcggcccgctgccactcctacaagacatgaataagctgagcggaggcggcggtcgcagaacccgggtagaaggcggtcagctaggtggtgaggaatggactagacacggctcatttgttaataagcctacacgtggatggctccacccaaatgataaagtcatggggccaggagtgtcatacctggtacgttacatggggtgtgttgaagttctccaatctatgcgtgccctggacttcaatactagaacacaggtcacacgggaggctataagtttggtgtgcgaagcagtaccaggcgctaaaggagctacccgcagacggaagccgtgttcccgacccctgagcagtattttaggccgatccaaccttaaatttgcaggaatgcccatcacattaaccgtttcaacctcctccctgaacctaatggctgccgactgcaagcagatcattgccaatcaccatatgcagtcaatctctttcgctagcggcggggaccccgatactgctgagtatgtggcatatgtggcaaaagatcctgtaaaccagagggcctgccacatcttggagtgtcctgagggcctggcccaggacgtcatctcaacaataggccaggccttcgaactgagattcaaacagtacctgagaaacccaccaaagctcgtcacacctcacgaccgcatggccgggttcgacgggtccgcctgggacgaagaggaggaagaacctcccgatcatcagtactacaacgacttcccgggcaaggagcctcccttagggggtgtcgtggatatgcgtctccgggaaggagctgctcccggggcagctaggcctacggcccccaacgctcagacgccgagccacctgggcgccacactgccagtaggtcagcctgtcggaggtgacccagaagtgcgcaaacagatgcctcctcctcccccctgccccgctggacgggagcttttcgacgacccttcatacgtcaacgtgcagaatcttgataaggcacgccaagctgttgggggcgctggcccccctaacccagctattaacgggtccgccccacgtgatttgttcgatatgaaacccttcgaagatgctctgagggtaccaccccctcctcagtccgtgtccatggccgagcagctcagaggggaaccttggtttcacgggaaactatctcgacgagaagcggaagccttattacaactgaatggtgacttcctggtccgtgaatcaactaccacgcccggccagtatgtgcttacaggactccagagcggtcagcccaagcacctgctcctcgttgacccagaaggcgtcgttcgcacaaaggatcacaggttcgagagcgttagccacctgatttcttatcatatggacaaccacctccccataataagtgctggcagtgagctgtgtctccagcaacctgttgagagaaaattatag

SEQ ID NO: 47276 - DNA, 1563 bp, Artificial Sequence
  derived and/or modified sequence
atgagcaacctgcggctggccaacccagctgggggccggcccggcagcaaaggagagcccggccgggcagcagatgatggagagggcatcgtgggcgccgccatgccagacagcggccccctgcccctgctgcaggacatgaacaagctgagcggcggcggcggccgccgcaccagggtggagggcggccagctgggcggggaggagtggaccaggcatggcagctttgtgaacaagcccacccggggctggctgcaccccaatgacaaggtgatgggccctggggtgtcctacctggtgcgctacatgggctgtgtggaggtgctgcagagcatgagggccctggacttcaacaccaggacccaggtgacccgggaggccatcagcctggtgtgtgaggccgtgcctggggccaagggggccaccaggaggaggaagccctgcagccggcccctgagcagcatcctgggccgcagcaacctgaagtttgctggcatgcccatcaccctgactgtgtccaccagcagcctgaacctgatggctgctgactgcaagcagatcatcgccaaccaccacatgcagagcatcagctttgccagcggcggggaccctgacacagcagaatatgtggcctacgtggccaaggaccctgtgaaccagagggcctgccacatcctggagtgcccagagggcctggcccaggatgtgatcagcaccatcggccaggcctttgagctgcgcttcaagcagtacctgagaaatccacccaagctggtgacccctcatgacaggatggccggctttgatggcagcgcctgggatgaggaggaggaggagcccccagaccaccagtactacaatgacttccctgggaaggagccccccctgggcggcgtggtggacatgaggctgcgggagggcgccgcccctggggccgcccggcccacagccccaaatgcccagacccccagccacctgggcgccaccctgcctgtgggccagcctgtgggcggggaccctgaggtgaggaagcagatgcctcctcctccaccctgcccagctggccgggagctgtttgatgaccccagctatgtgaatgtgcagaacctggacaaggcccggcaggccgtgggcggggccggcccccccaacccagccatcaatggcagcgccccccgggacctgtttgacatgaagccctttgaagatgccctgcgggtgcccccaccaccccagagcgtgtccatggccgagcagctgcggggggagccctggttccacggcaagctgagccggcgggaggccgaggccctgctgcagctgaatggagacttcctggtgcgggagagcaccaccaccccaggccagtatgtgctgaccggcctgcagagcggccagcccaagcacctgctgctggtggaccctgagggcgtggtgaggaccaaggaccacagatttgagagcgtgagccacctgatctcctaccacatggacaaccacctgcccatcatctctgctggcagcgagctgtgcctgcagcagcctgtggagaggaagctgtag

SEQ ID NO: 47277 - DNA, 1425 bp, Artificial Sequence
  derived and/or modified sequence
atgaacaagctgagcggcggcggcggccgccgcaccagggtggagggcggccagctgggcggggaggagtggaccaggcatggcagctttgtgaacaagcccacccggggctggctgcaccccaatgacaaggtgatgggccctggggtgtcctacctggtgcgctacatgggctgtgtggaggtgctgcagagcatgagggccctggacttcaacaccaggacccaggtgacccgggaggccatcagcctggtgtgtgaggccgtgcctggggccaagggggccaccaggaggaggaagccctgcagccggcccctgagcagcatcctgggccgcagcaacctgaagtttgctggcatgcccatcaccctgactgtgtccaccagcagcctgaacctgatggctgctgactgcaagcagatcatcgccaaccaccacatgcagagcatcagctttgccagcggcggggaccctgacacagcagaatatgtggcctacgtggccaaggaccctgtgaaccagagggcctgccacatcctggagtgcccagagggcctggcccaggatgtgatcagcaccatcggccaggcctttgagctgcgcttcaagcagtacctgagaaatccacccaagctggtgacccctcatgacaggatggccggctttgatggcagcgcctgggatgaggaggaggaggagcccccagaccaccagtactacaatgacttccctgggaaggagccccccctgggcggcgtggtggacatgaggctgcgggagggcgccgcccctggggccgcccggcccacagccccaaatgcccagacccccagccacctgggcgccaccctgcctgtgggccagcctgtgggcggggaccctgaggtgaggaagcagatgcctcctcctccaccctgcccagctggccgggagctgtttgatgaccccagctatgtgaatgtgcagaacctggacaaggcccggcaggccgtgggcggggccggcccccccaacccagccatcaatggcagcgccccccgggacctgtttgacatgaagccctttgaagatgccctgcgggtgcccccaccaccccagagcgtgtccatggccgagcagctgcggggggagccctggttccacggcaagctgagccggcgggaggccgaggccctgctgcagctgaatggagacttcctggtgcgggagagcaccaccaccccaggccagtatgtgctgaccggcctgcagagcggccagcccaagcacctgctgctggtggaccctgagggcgtggtgaggaccaaggaccacagatttgagagcgtgagccacctgatctcctaccacatggacaaccacctgcccatcatctctgctggcagcgagctgtgcctgcagcagcctgtggagaggaagctgtag

SEQ ID NO: 47278 - DNA, 1755 bp, Artificial Sequence
  derived and/or modified sequence
atggacctgctgccccccaagcccaagtacaaccccctgagaaatgaaagcctgagcagcctggaggagggcgccagcggcagcaccccacctgaggagctgcccagccccagcgccagcagcctgggccccatcctgccccccctgcctggagatgacagccccaccaccctgtgcagcttcttccccaggatgagcaacctgcggctggccaacccagctgggggccggcccggcagcaaaggagagcccggccgggcagcagatgatggagagggcatcgtgggcgccgccatgccagacagcggccccctgcccctgctgcaggacatgaacaagctgagcggcggcggcggccgccgcaccagggtggagggcggccagctgggcggggaggagtggaccaggcatggcagctttgtgaacaagcccacccggggctggctgcaccccaatgacaaggtgatgggccctggggtgtcctacctggtgcgctacatgggctgtgtggaggtgctgcagagcatgagggccctggacttcaacaccaggacccaggtgacccgggaggccatcagcctggtgtgtgaggccgtgcctggggccaagggggccaccaggaggaggaagccctgcagccggcccctgagcagcatcctgggccgcagcaacctgaagtttgctggcatgcccatcaccctgactgtgtccaccagcagcctgaacctgatggctgctgactgcaagcagatcatcgccaaccaccacatgcagagcatcagctttgccagcggcggggaccctgacacagcagaatatgtggcctacgtggccaaggaccctgtgaaccagagggcctgccacatcctggagtgcccagagggcctggcccaggatgtgatcagcaccatcggccaggcctttgagctgcgcttcaagcagtacctgagaaatccacccaagctggtgacccctcatgacaggatggccggctttgatggcagcgcctgggatgaggaggaggaggagcccccagaccaccagtactacaatgacttccctgggaaggagccccccctgggcggcgtggtggacatgaggctgcgggagggcgccgcccctggggccgcccggcccacagccccaaatgcccagacccccagccacctgggcgccaccctgcctgtgggccagcctgtgggcggggaccctgaggtgaggaagcagatgcctcctcctccaccctgcccagctggccgggagctgtttgatgaccccagctatgtgaatgtgcagaacctggacaaggcccggcaggccgtgggcggggccggcccccccaacccagccatcaatggcagcgccccccgggacctgtttgacatgaagccctttgaagatgccctgcgggtgcccccaccaccccagagcgtgtccatggccgagcagctgcggggggagccctggttccacggcaagctgagccggcgggaggccgaggccctgctgcagctgaatggagacttcctggtgcgggagagcaccaccaccccaggccagtatgtgctgaccggcctgcagagcggccagcccaagcacctgctgctggtggaccctgagggcgtggtgaggaccaaggaccacagatttgagagcgtgagccacctgatctcctaccacatggacaaccacctgcccatcatctctgctggcagcgagctgtgcctgcagcagcctgtggagaggaagctgtag

SEQ ID NO: 47279 - DNA, 1563 bp, Artificial Sequence
  derived and/or modified sequence
atgagcaacctgcggctggccaaccccgccggcggccggcccggcagtaaaggtgaaccaggcagggccgccgacgacggggaaggcatcgttggtgcggctatgcctgattctggtccactgccgctgttacaggacatgaacaagctctccggagggggtggacgacggactagggttgaaggtggtcaactgggcggagaggagtggacaaggcacggctcgtttgtaaacaaaccaactcgtgggtggttgcatcccaacgacaaggtgatgggacccggcgtgagctatcttgtgcgctacatgggctgcgtcgaggtgctgcagtccatgcgggccttggattttaatactagaactcaagtgacccgagaggcaataagtctcgtgtgtgaggccgttcccggcgcaaaaggcgccacccgccgtcggaaaccctgttcacgcccgctcagttccatcctggggcgcagtaatttgaagttcgctggcatgcctattacactgactgttagcacatcttctctcaatctgatggcagccgactgtaaacagatcattgctaatcatcacatgcagtctatttctttcgcttccgggggcgatcctgatactgctgagtacgtagcttatgttgctaaggacccagtgaaccagagggcttgtcatattcttgagtgccctgagggccttgcacaggatgtaattagcacaatcggacaagcctttgagctgcgatttaaacagtacctgaggaacccacccaaactggtgactccccacgataggatggccggattcgacggcagtgcctgggatgaggaggaggaggagccgcctgaccaccagtactacaacgattttccaggcaaggagccgccactaggcggggtggtggacatgcgtctcagggagggcgctgcccccggtgctgcacggcccacagccccaaacgctcagacaccaagccacttaggcgccacccttcctgtcggccagcctgtaggtggcgatccagaagtgcgcaagcaaatgcctccacctcctccatgtcctgctgggagagagctgttcgacgatcccagttacgtcaatgttcaaaacctggacaaggctcgacaggcggttgggggggctgggcctcccaacccagccattaatggcagtgcccctagagatctattcgatatgaaacccttcgaggacgcactgagggttcccccccctcctcaaagtgtctcaatggccgaacaattgcgcggcgagccatggttccatggcaaattgtcaagaagagaagccgaagccttactccagctgaatggtgatttcctggtgcgagagagtaccactacacccggccagtacgtgctgacaggcctgcaatcaggccagcctaaacatttactcttggtggaccccgagggcgtcgtgaggacaaaagatcaccggtttgaatcggtgagtcacctgataagctaccacatggataaccatttgccgattattagcgcaggtagcgaactttgtcttcaacagccagttgagcggaagctttag

SEQ ID NO: 47280 - DNA, 1425 bp, Artificial Sequence
  derived and/or modified sequence
atgaacaagctgagcggcggcggcggccggcggacccgggtggagggaggacaactgggcggagaggagtggactcgccacggatcctttgtgaacaagcctactaggggatggttacacccgaatgataaagtgatgggaccgggcgtgagttacttggtccggtacatgggctgcgtggaggtgttacaaagcatgcgagccctggatttcaatacccggactcaggtcactcgcgaggccatcagtctcgtgtgcgaagccgttcccggggccaaaggcgccactagacgtcggaaaccatgcagccgcccactgagttcaatcctggggcgctcaaacctgaagttcgccggtatgcccatcaccctgaccgttagcacctcctccctcaacctcatggctgcggattgcaagcagataatcgcaaaccaccatatgcagtctataagcttcgctagcggaggggatccggacactgctgagtacgtggcctatgtggccaaagatccggtaaatcagcgggcatgccacatcctcgagtgtccagagggactggcacaggatgtaatttcaacaattggccaggcgtttgaactacgcttcaagcagtatctgagaaacccccccaaacttgttacacctcatgaccggatggcaggatttgacggttcggcttgggacgaagaagaagaggagccccccgaccaccagtattataatgacttccccggaaaggagccccctctgggaggcgttgttgatatgcgcttgcgagaaggtgctgctccgggcgcagctcgccctacagcccccaacgcgcagacaccaagccatctgggggccacactccccgtcggacagcccgtcgggggcgatcctgaggtacgcaaacagatgcctcctccccctccatgtcccgcgggaagggagttgttcgatgatcccagctacgtgaatgttcagaatctggacaaagcgaggcaggcggtggggggcgccggacctcctaaccccgctatcaacggctcggctccccgcgacttgtttgatatgaaacccttcgaggacgctcttcgtgtgcctcccccaccccagtctgtctctatggctgagcaactcagaggcgaaccttggtttcacgggaagcttagtaggcgcgaagctgaagccttacttcaattgaacggagatttcctcgtgagagaatctaccacaacccctggtcaatacgtcctcacgggactccagagcggacagcccaagcatctgctgctggtggaccctgagggcgtcgtgcgtaccaaggaccacaggtttgagtccgttagccacctaatttcttatcacatggataatcatctccctatcatttctgcgggcagcgaactctgtcttcagcaaccagttgagcggaaactgtag

SEQ ID NO: 47281 - DNA, 1755 bp, Artificial Sequence
  derived and/or modified sequence
atggacctgctgccccccaagcccaagtacaaccccctgcggaacgaatctctgagtagcctcgaggaaggggcctcagggtcgacccccccagaggaactcccatcgccaagtgcgtcttccctgggcccgatattgccaccgttaccaggtgacgacagccctaccactctttgctcattcttccctaggatgtccaatctgcggctcgccaaccctgcaggggggaggccagggagcaagggtgagcccggccgtgctgccgacgacggcgaaggcatcgtcggagcagcaatgcccgattctggcccactcccactattacaggatatgaacaaattgtcaggaggagggggtcgtcggacgcgggtcgaaggcggacagctggggggggaggaatggacgagacatggctcatttgtaaacaagccgacgcgcggctggctgcaccctaacgacaaagttatgggacccggagtgagctacctggttagatacatggggtgtgtcgaagtcctgcagagtatgagggctctcgatttcaatacgcgcacccaggttacccgggaggccatatcgctggtctgtgaggcagtccctggggccaaaggggcaactcgacgtcgtaagccctgtagccggcccctgagttcaatcctcggcaggtctaacctgaaattcgccggcatgcccattactctgactgttagcactagtagtcttaatttgatggcggccgactgtaaacaaatcatagcgaaccatcacatgcagagtatatctttcgcttcagggggtgaccctgatactgcggagtatgttgcttatgtcgcgaaagaccccgtgaatcagcgggcgtgtcacatattggagtgcccagagggcctggcccaggatgtgatttccaccattggccaggcttttgagctaagatttaaacaatacctgcgaaatcctccaaaacttgtcaccccccatgaccgaatggccgggtttgacgggtccgcctgggatgaagaggaagaggaaccaccagaccatcaatattacaacgactttcctggcaaggaaccccctctgggcggagtcgttgatatgaggctgcgcgaaggggccgcccctggggcagccagaccaacagctcccaacgcccaaaccccttcccatctgggagccaccctgcctgttggtcagccggtcggaggagaccctgaggtgcgcaagcagatgcccccgccacccccttgcccggccggacgggagttattcgacgacccttcttacgttaacgtgcagaacctggataaggctcgccaggcagtcggcggtgccggaccacccaatccagcaattaatgggtctgctccccgagaccttttcgacatgaagccatttgaggacgccctccgggtgccaccacccccacagtctgtgtccatggcggagcagttgcgtggggaaccttggtttcatggaaagctgtccagaagggaggccgaagcacttctccaattaaacggtgacttcctggtccgggagagtaccaccacgcccgggcagtacgttctgacaggtctccaatctgggcagcctaagcatctactgctcgtggacccagagggggtcgtccggacaaaggatcacagatttgagtccgtgagccacttaatctcctatcacatggacaatcaccttcctatcatcagcgctggcagcgagctctgtctccagcagcctgtcgaacgaaagctgtag

SEQ ID NO: 47282 - DNA, 1563 bp, Artificial Sequence
  derived and/or modified sequence
atgagcaaccttcgcttagccaatcccgcaggaggccgtccagggtcaaagggagaacccggtagggccgcagatgatggcgaaggcatcgtaggcgctgccatgccagatagtggacctctgcctttgctccaggacatgaataaacttagcggcggagggggaagaaggacccgggtggagggcggacaactcggaggcgaggagtggactcggcacggctcatttgtgaacaaaccaaccaggggctggctccacccaaatgataaagttatgggccctggggtctcctatctcgtgcggtacatggggtgcgtcgaggtcttgcagtccatgagagctctggactttaacacccgaacccaggtgactcgcgaggcaatttcactagtgtgcgaggctgttccaggcgcaaaaggtgccaccagacgaagaaaaccctgcagccggccactgagctctatactgggaaggagcaatcttaaatttgcaggcatgccaattaccctgaccgtaagtacaagttctctgaatctgatggctgccgattgcaaacaaattatcgccaaccaccatatgcaatccatttcatttgcatcaggtggggatccagatactgctgagtacgtcgcatacgtggccaaggacccggtgaatcagagagcctgtcacatcctggaatgccccgaaggacttgcccaggatgtgattagcacaatcggccaggcttttgagctgagattcaagcagtacctccggaacccacctaagctggtgaccccccatgatcgcatggccggattcgacggaagtgcctgggacgaagaggaggaggaaccaccagaccatcaatattacaacgactttcccggtaaggagcccccactgggcggtgtggtggacatgagactgagggaaggagcagcacctggcgctgccaggcccactgcccctaacgcacagacaccatcacatctcggggcaacgctaccagtgggccagcccgtgggtggcgaccccgaggtcaggaaacagatgcccccacctccaccttgccccgctggtagggagttgttcgacgacccctcctatgtaaatgtgcagaatcttgacaaggctaggcaagcggttgggggagcaggtcctcccaacccggcaatcaatggttcagccccaagggatttgtttgacatgaagccttttgaagacgcattgcgggtcccacccccaccacagtcagtgtctatggcagaacagctcagaggtgagccttggttccacggcaagctatctaggcgtgaagcagaagcgcttttacagttgaacggcgatttcttggtccgtgaatctaccactacccctggccaatacgttctgacaggccttcagtctggccagcccaaacacttactcctggtggatccagagggcgtggtgcggaccaaggatcaccggtttgaatcagtctcacacttgatcagttaccacatggacaaccacctgccaattatcagcgctggatctgaactctgtctgcagcagcccgtggaaaggaaactctag

SEQ ID NO: 47283 - DNA, 1425 bp, Artificial Sequence
  derived and/or modified sequence
atgaataagttatctggcggaggtgggagacgaaccagagtggaaggcggacagcttggaggggaggagtggacccgccacggtagctttgttaataagcctactaggggctggttgcatccaaatgacaaggtgatggggcctggcgtatcgtacctagtgcgatacatgggatgtgtggaggtgttacagagtatgcgcgctctcgacttcaacacccgcactcaggtgacgagagaagctatttccctcgtatgcgaagccgtcccaggagctaaaggcgctaccaggcgacgtaagccttgtagtcgacccctcagttccattctcgggcgatcaaacctcaagtttgcaggcatgcccataacactcacggtgtccacatcttcattaaacttgatggcggctgactgtaagcaaatcattgccaaccatcatatgcagtcaatttcttttgcttcaggcggagaccccgacaccgcagaatacgtagcctacgtggccaaagatcctgtgaaccagcgcgcttgccacatcttggaatgtccggagggcctggctcaggacgtcatctccacgattggccaggcttttgagctccgtttcaagcaatacttgcgaaatccgccaaaactggtcactccccatgaccgaatggccggtttcgacgggtcggcatgggatgaggaggaagaagagccaccagaccatcaatattataacgacttccctgggaaggagccacccctgggcggagtagtggacatgaggttaagagagggggcagcacctggcgctgccagaccaaccgcacctaacgcgcagacaccatcacacctaggtgcaactctgcccgttgggcagcctgtggggggagaccctgaagtgagaaaacagatgcccccaccacctccctgtccagcagggagagaacttttcgatgaccccagctacgttaatgtacaaaacctcgacaaagcgagacaagctgttggcggagcgggtcctccaaacccagcaatcaacggctcagcgccacgagacctgtttgatatgaagccatttgaggacgcacttcgagttccaccaccccctcaaagcgtatcaatggccgaacagcttcgtggagagccatggttccacggaaagcttagcagacgtgaagcagaggccctcctacaattgaatggtgatttcttggtcagagagtctacaacaactccaggtcagtacgtccttacaggcttgcaatccggtcagccaaaacaccttctcttagtagacccagagggagtggtgaggactaaggaccatcgcttcgagtccgttagtcatttaatttcctatcacatggacaaccatttacccatcataagtgccggatccgagctgtgcctgcagcagccagttgagagaaagctctag

SEQ ID NO: 47284 - DNA, 1755 bp, Artificial Sequence
  derived and/or modified sequence
atggatctgctgcccccaaagcctaaatacaacccactaagaaacgaaagtctgtcttctctggaggagggcgcttcaggcagcactccccctgaggagttgccctcccccagtgcttctagcctggggcctattctgcctcccctgcctggcgacgactcgcctacaaccctgtgtagttttttccctcgaatgtccaacttgagactagcaaatcccgctggagggaggccgggttcaaagggggagccaggtagagccgctgatgacggggaggggattgttggagcagctatgccagattccggccctctcccactactccaggacatgaataagttatccggaggtggtgggagaagaacacgcgtggaaggcggtcagctcggaggtgaagagtggactagacacggctcatttgtgaacaagccaaccagagggtggctgcatcctaacgacaaagtgatgggtcccggagtgtcctacctcgttaggtatatgggttgtgtggaggtgctgcagtcgatgagggctctcgacttcaacacacgcacccaagtgacaagagaggcaatttcactagtatgcgaagccgtgccgggagctaagggagccacaaggcgcagaaagccatgttcgcgtcccctctcttcgatcctcggccgatcaaatctgaagttcgcaggcatgcctatcacactgacagtgtcaacatcatccctgaacctgatggcggcagactgcaagcaaatcatagcgaatcaccacatgcagtcaatatcctttgcctctggaggggatccagacaccgcagagtatgtcgcatatgtcgccaaggaccccgttaaccagcgcgcttgtcacatacttgagtgtcccgaagggctcgcccaggacgtgatcagcacaatcggccaagcctttgagttgaggtttaaacagtacctccgcaatcctcctaagctggtaaccccgcacgacaggatggcgggttttgatggtagtgcttgggacgaggaagaggaagaaccacccgaccatcagtattacaatgattttccagggaaagaacccccacttggtggcgtcgtcgacatgaggctccgtgagggggcagccccaggggctgctaggcccactgctcctaacgcccagacaccttcacacctgggcgcaacactccccgtgggccaacccgtgggaggggatcctgaggtgcgaaagcaaatgcctcccccacccccttgtcccgctgggagggaattgtttgacgacccaagttacgtcaacgtgcaaaatctggataaggcccgacaagctgtcggaggagcgggtccacctaacccagcaatcaatggctccgctcccagagacttattcgatatgaaacctttcgaggacgcactgagagtgccacctcccccacaatcagtcagcatggccgagcagctgcgcggagaaccatggttccacggaaagctctcacgacgagaggcagaagcccttctacaacttaatggagattttcttgtgagagagtctaccacaaccccagggcagtatgtgctcaccggcctccagagcggccagccaaaacatctgctgctggttgacccggagggggtcgtcaggacaaaggaccaccggtttgagtccgtgagccatctcatttcatatcacatggataaccacctgcccattatcagcgccggttcggaactgtgccttcagcagcctgtagaacgaaagctgtag

SEQ ID NO: 47285 - DNA, 2288 bp, Artificial Sequence
  derived and/or modified sequence
gaagaggctccacgttgggcggggatggggcctgaaactgtctgggtctgagccccaagtacaatccactccggaatgagtctctgtcatcgctggaggaaggggcttctgggtccacccccccggaggagctgccttccccatcagcttcatccctggggcccatcctgcctcctctgcctggggacgatagtcccactaccctgtgctccttcttcccccggatgagcaacctgaggctggccaacccggctggggggcgcccagggtctaagggggagccaggaagggcagctgatgatggggaggggatcgtaggggcagccatgccagactcaggccccctacccctcctccaggacatgaacaagctgagtggaggcggcgggcgcaggactcgggtggaagggggccagcttgggggcgaggagtggacccgccacgggagctttgtcaataagcccacgcggggctggctgcatcccaacgacaaagtcatgggacccggggtttcctacttggttcggtacatgggttgtgtggaggtcctccagtcaatgcgtgccctggacttcaacacccggactcaggtcaccagggaggccatcagtctggtgtgtgaggctgtgccgggtgctaagggggcgacaaggaggagaaagccctgtagccgcccgctcagctctatcctggggaggagtaacctgaaatttgctggaatgccaatcactctcaccgtctccaccagcagcctcaacctcatggccgcagactgcaaacagatcatcgccaaccaccacatgcaatctatctcatttgcatccggcggggatccggacacagccgagtatgtcgcctatgttgccaaagaccctgtgaatcagagagcctgccacattctggagtgtcccgaagggcttgcccaggatgtcatcagcaccattggccaggccttcgagttgcgcttcaaacaatacctcaggaacccacccaaactggtcacccctcatgacaggatggctggctttgatggctcagcatgggatgaggaggaggaagagccacctgaccatcagtactataatgacttcccggggaaggaaccccccttggggggggtggtagacatgaggcttcgggaaggagccgctccaggggctgctcgacccactgcacccaatgcccagacccccagccacttgggagctacattgcctgtaggacagcctgttgggggagatccagaagtccgcaaacagatgccacctccaccaccctgtccagcaggcagagagctttttgatgatccctcctatgtcaacgtccagaacctagacaaggcccggcaagcagtgggtggtgctgggccccccaatcctgctatcaatggcagtgcaccccgggacctgtttgacatgaagcccttcgaagatgctcttcgcgtgcctccacctccccagtcggtgtccatggctgagcagctccgaggggagccctggttccatgggaagctgagccggcgggaggctgaggcactgctgcagctcaatggggacttcctggtacgggagagcacgaccacacctggccagtatgtgctcactggcttgcagagtgggcagcctaagcatttgctactggtggaccctgagggtgtggttcggactaaggatcaccgctttgaaagtgtcagtcaccttatcagctaccacatggacaatcacttgcccatcatctctgcgggcagcgaactgtgtctacagcaacctgtggagcggaaactgtgatctgccctagcgctctcttccagaagatgccctccaatcctttccaccctattccctaactctcgggacctcgtttgggagtgttctgtgggcttggccttgtgtcagagctgggagtagcatggactctgggtttcatatccagctgagtgagagggtttgagtcaaaagcctgggtgagaatcctgcctctccccaaacattaatcaccaaagtattaatgtacagagtggcccctcacctgggcctttcctgtgccaacctgatgccccttccccaagaaggtgagtgcttgtcatggaaaatgtcctgtggtgacaggcccagtggaacagtcacccttctgggcaagggggaacaaatcacacctctgggcttcagggtatcccagacccctctcaacacccgccccccccatgtttaaactttgtgcctttgaccatctcttaggtctaatgatattttatgcaaacagttcttggacccctgaattcaatgaca

SEQ ID NO: 47286 - DNA, 3481 bp, Artificial Sequence
  derived and/or modified sequence
agagaagaggctccacgttgggcggggatggggcctgaaactgtctgggtctgagctggggagcggaagccacttgtccctctccctccccaggacttctgtgactcctgggccacagaggtccaaccaggctaagggcctggggataccccctgcctggcccccttgcccaaactggcaggggggccaggctgggcagcagcccctctttcacctcaactatggatctcctgccccccaagcccaagtacaatccactccggaatgagtctctgtcatcgctggaggaaggggcttctgggtccacccccccggaggagctgccttccccatcagcttcatccctggggcccatcctgcctcctctgcctggggacgatagtcccactaccctgtgctccttcttcccccggatgagcaacctgaggctggccaacccggctggggggcgcccagggtctaagggggagccaggaagggcagctgatgatggggaggggatcgtaggggcagccatgccagactcaggccccctacccctcctccaggacatgaacaagctgagtggaggcggcgggcgcaggactcgggtggaagggggccagcttgggggcgaggagtggacccgccacgggagctttgtcaataagcccacgcggggctggctgcatcccaacgacaaagtcatgggacccggggtttcctacttggttcggtacatgggttgtgtggaggtcctccagtcaatgcgtgccctggacttcaacacccggactcaggtcaccagggaggccatcagtctggtgtgtgaggctgtgccgggtgctaagggggcgacaaggaggagaaagccctgtagccgcccgctcagctctatcctggggaggagtaacctgaaatttgctggaatgccaatcactctcaccgtctccaccagcagcctcaacctcatggccgcagactgcaaacagatcatcgccaaccaccacatgcaatctatctcatttgcatccggcggggatccggacacagccgagtatgtcgcctatgttgccaaagaccctgtgaatcagagagcctgccacattctggagtgtcccgaagggcttgcccaggatgtcatcagcaccattggccaggccttcgagttgcgcttcaaacaatacctcaggaacccacccaaactggtcacccctcatgacaggatggctggctttgatggctcagcatgggatgaggaggaggaagagccacctgaccatcagtactataatgacttcccggggaaggaaccccccttggggggggtggtagacatgaggcttcgggaaggagccgctccaggggctgctcgacccactgcacccaatgcccagacccccagccacttgggagctacattgcctgtaggacagcctgttgggggagatccagaagtccgcaaacagatgccacctccaccaccctgtccagcaggcagagagctttttgatgatccctcctatgtcaacgtccagaacctagacaaggcccggcaagcagtgggtggtgctgggccccccaatcctgctatcaatggcagtgcaccccgggacctgtttgacatgaagcccttcgaagatgctcttcgcgtgcctccacctccccagtcggtgtccatggctgagcagctccgaggggagccctggttccatgggaagctgagccggcgggaggctgaggcactgctgcagctcaatggggacttcctggtacgggagagcacgaccacacctggccagtatgtgctcactggcttgcagagtgggcagcctaagcatttgctactggtggaccctgagggtgtggttcggactaaggatcaccgctttgaaagtgtcagtcaccttatcagctaccacatggacaatcacttgcccatcatctctgcgggcagcgaactgtgtctacagcaacctgtggagcggaaactgtgatctgccctagcgctctcttccagaagatgccctccaatcctttccaccctattccctaactctcgggacctcgtttgggagtgttctgtgggcttggccttgtgtcagagctgggagtagcatggactctgggtttcatatccagctgagtgagagggtttgagtcaaaagcctgggtgagaatcctgcctctccccaaacattaatcaccaaagtattaatgtacagagtggcccctcacctgggcctttcctgtgccaacctgatgccccttccccaagaaggtgagtgcttgtcatggaaaatgtcctgtggtgacaggcccagtggaacagtcacccttctgggcaagggggaacaaatcacacctctgggcttcagggtatcccagacccctctcaacacccgccccccccatgtttaaactttgtgcctttgaccatctcttaggtctaatgatattttatgcaaacagttcttggacccctgaattcaatgacagggatgccaacaccttcttggcttctgggacctgtgttcttgctgagcaccctctccggtttgggttgggataacagaggcaggagtggcagctgtcccctctccctggggatatgcaacccttagagattgccccagagccccactcccggccaggcgggagatggacccctcccttgctcagtgcctcctggccggggcccctcaccccaaggggtctgtatatacatttcataaggcctgccctcccatgttgcatgcctatgtactctacgccaaagtgcagcccttcctcctgaagcctctgccctgcctccctttctgggagggcggggtgggggtgactgaatttgggcctcttgtacagttaactctcccaggtggattttgtggaggtgagaaaaggggcattgagactataaagcagtagacaatccccacataccatctgtagagttggaactgcattcttttaaagttttatatgcatatattttagggctgtagacttactttcctattttcttttccattgcttattcttgagcacaaaatgataatcaattattacatttatacatcacctttttgacttttccaagcccttttacagctcttggcattttcctcgcctaggcctgtgaggtaactgggatcgcaccttttataccagagacctgaggcagatgaaatttatttccatctaggactagaaaaacttgggtctcttaccgcgagactgagaggcagaagtcagcccgaatgcctgtcagtttcatggaggggaaacgcaaaacctgcagttcctgagtaccttctacaggcccggcccagcctaggcccggggtggccacaccacagcaagccggccccccctcttttggccttgtggataagggagagttgaccgttttcatcctggcctccttttgctgtttggatgtttccacgggtctcacttataccaaagggaaaactcttcattaaagtccgtatttcttcta

SEQ ID NO: 47287 - DNA, 1422 bp, Artificial Sequence
  derived and/or modified sequence
atgaacaagctgagcggcggcggcggcagaagaaccagagtggagggcggccagctgggcggcgaggagtggaccagacacggcagcttcgtgaacaagcccaccagaggctggctgcaccccaacgacaaggtgatgggccccggcgtgagctacctggtgagatacatgggctgcgtggaggtgctgcagagcatgagagccctggacttcaacaccagaacccaggtgaccagagaggccatcagcctggtgtgcgaggccgtgcccggcgccaagggcgccaccagaagaagaaagccctgcagcagacccctgagcagcatcctgggcagaagcaacctgaagttcgccggcatgcccatcaccctgaccgtgagcaccagcagcctgaacctgatggccgccgactgcaagcagatcatcgccaaccaccacatgcagagcatcagcttcgccagcggcggcgaccccgacaccgccgagtacgtggcctacgtggccaaggaccccgtgaaccagagagcctgccacatcctggagtgccccgagggcctggcccaggacgtgatcagcaccatcggccaggccttcgagctgagattcaagcagtacctgagaaacccccccaagctggtgaccccccacgacagaatggccggcttcgacggcagcgcctgggacgaggaggaggaggagccccccgaccaccagtactacaacgacttccccggcaaggagccccccctgggcggcgtggtggacatgagactgagagagggcgccgcccccggcgccgccagacccaccgcccccaacgcccagacccccagccacctgggcgccaccctgcccgtgggccagcccgtgggcggcgaccccgaggtgagaaagcagatgccccccccccccccctgccccggcagagagctgttcgacgaccccagctacgtgaacgtgcagaacctggacaaggccagacaggccgtgggcggcgccggcccccccaaccccgccatcaacggcagcgcccccagagacctgttcgacatgaagcccttcgaggacgccctgagagtgcccccccccccccagagcgtgagcatggccgagcagctgagaggcgagccctggttccacggcaagctgagcagaagagaggccgaggccctgctgcagctgaacggcgacttcctggtgagagagagcaccaccacccccggccagtacgtgctgaccggcctgcagagcggccagcccaagcacctgctgctggtggaccccgagggcgtggtgagaaccaaggaccacagattcgagagcgtgagccacctgatcagctaccacatggacaaccacctgcccatcatcagcgccggcagcgagctgtgcctgcagcagcccgtggagagaaagctgtag

SEQ ID NO: 47288 - DNA, 1422 bp, Artificial Sequence
  derived and/or modified sequence
atgaataagctatccggcgggggcggacggcgcacacgagtcgagggggggcaacttggcggggaagaatggacccgtcacgggtctttcgtcaacaagcctaccaggggatggctgcaccccaatgacaaagtcatgggaccaggagtgtcttatctcgtgcgatacatggggtgcgtggaggttctgcagagcatgcgggccctggatttcaatacccggactcaggtcaccagggaggctatttccctggtgtgcgaggctgtacctggtgcaaagggagcaacaagaagaaggaaaccatgtagcaggcccctgtcatccatcctgggccgctcaaacctgaagttcgcagggatgcccattaccctcaccgtgagcacatctagcttaaatctgatggcggctgattgcaagcagattatagcaaaccaccacatgcagtccatttcgtttgcctcaggtggagaccctgatacagccgaatatgttgcctacgttgccaaggatccagtcaaccagcgtgcttgccacatactcgagtgtccggagggccttgcccaggatgtcatctcaaccatcggtcaggctttcgagttgcgtttcaagcagtatctgcgaaatcctcccaagttagtgacccctcacgaccggatggccggctttgacggctctgcctgggacgaagaggaggaggaaccccctgatcaccagtattataacgactttccagggaaagagccacccctcggtggagttgttgatatgcgcctgagagagggcgcagccccaggggcagccaggccaaccgcccctaatgcccagacacctagtcatctaggggcaaccttgcctgtggggcagcctgtcgggggggacccagaagtgcgtaaacagatgccccctccccccccctgtcccggccgtgagctgttcgatgacccttcatacgtcaacgtgcagaacttggacaaagcgcggcaggcggtcgggggggcgggcccccccaatccagccatcaacggatcagcgcctagagacctgtttgatatgaagccatttgaggacgctttgcgggttccacctccccctcagtctgtgagtatggcagaacagctacgaggcgagccttggtttcacgggaaacttagccggagagaagctgaagccctgcttcagctgaatggggacttcctggtccgggaaagtactactacgcctgggcaatatgttcttacagggctccagtccggtcaacctaaacatctgcttctcgtcgaccctgaaggcgtcgtgcgtacgaaggatcaccgcttcgagtccgttagccatctaatcagctatcacatggataaccacctcccaattatctcagcaggatctgagctctgcctgcaacagcctgtcgaaagaaaactctag

SEQ ID NO: 47289 - DNA, 1422 bp, Artificial Sequence
  derived and/or modified sequence
atgaacaagctgagcggcggcggcggccgccgcaccagggtggagggcggccagctgggcggggaggagtggaccaggcatggcagctttgtgaacaagcccacccggggctggctgcaccccaatgacaaggtgatgggccctggggtgtcctacctggtgcgctacatgggctgtgtggaggtgctgcagagcatgagggccctggacttcaacaccaggacccaggtgacccgggaggccatcagcctggtgtgtgaggccgtgcctggggccaagggggccaccaggaggaggaagccctgcagccggcccctgagcagcatcctgggccgcagcaacctgaagtttgctggcatgcccatcaccctgactgtgtccaccagcagcctgaacctgatggctgctgactgcaagcagatcatcgccaaccaccacatgcagagcatcagctttgccagcggcggggaccctgacacagcagaatatgtggcctacgtggccaaggaccctgtgaaccagagggcctgccacatcctggagtgcccagagggcctggcccaggatgtgatcagcaccatcggccaggcctttgagctgcgcttcaagcagtacctgagaaatccacccaagctggtgacccctcatgacaggatggccggctttgatggcagcgcctgggatgaggaggaggaggagcccccagaccaccagtactacaatgacttccctgggaaggagccccccctgggcggcgtggtggacatgaggctgcgggagggcgccgcccctggggccgcccggcccacagccccaaatgcccagacccccagccacctgggcgccaccctgcctgtgggccagcctgtgggcggggaccctgaggtgaggaagcagatgcctcctcctccaccctgccccggccgggagctgtttgatgaccccagctatgtgaatgtgcagaacctggacaaggcccggcaggccgtgggcggggccggcccccccaacccagccatcaatggaagtgccccccgggacctgtttgacatgaagccctttgaagatgccctgcgggtgcccccaccaccccagagcgtgtccatggccgagcagctgcggggggagccctggttccacggcaagctgagcagaagagaggccgaggccctgctgcagctgaatggagacttcctggtgcgggagagcaccaccaccccaggccagtatgtgctgaccggcctgcagagcggccagcccaagcacctgctgctggtggaccctgagggcgtggtgaggaccaaggaccacagatttgaatctgtgagccacctgatctcctaccacatggacaaccacctgcccatcatctctgctggcagcgagctgtgcctgcagcagcctgtggagaggaagctgtag

SEQ ID NO: 47290 - DNA, 1422 bp, Artificial Sequence
  derived and/or modified sequence
atgaacaagctgagcggcggcggcggccggcggacccgggtggaggggggccaactggggggagaagagtggacccgccatgggtcttttgttaacaagcccactagagggtggcttcatcctaatgacaaggtgatgggccctggggtcagctacctggtacggtacatgggctgcgttgaggtccttcaatccatgagggcgctcgacttcaatacgcggacccaagtgacacgggaagcaatctctctcgtttgcgaggctgtgccaggggctaagggtgccacgcggaggcgaaagccttgttccaggccacttagcagcattctagggcgttcgaacttaaaattcgccggcatgccgatcaccctgaccgtcagtacttcaagcttgaatctcatggccgcagattgtaaacaaattatcgcaaatcaccacatgcagtcaatttcgttcgctagcggtggggaccctgacaccgccgaatatgtagcatacgtggcaaaagatcccgtcaatcaaagagcatgccacattctagaatgcccagagggactcgcacaggacgtaatctccactatcggccaggcgtttgaattacgtttcaagcaatatctgcgaaaccctcctaaattggtaaccccccatgataggatggccgggtttgacgggagcgcatgggacgaagaggaggaagaaccacctgatcaccagtactataatgattttccggggaaagaacccccgctggggggcgtcgttgacatgcgactgagggaaggcgccgcccccggagctgcacgaccaacagccccgaacgctcagacgcccagtcacctcggtgccaccctccctgtgggtcaaccagtgggaggagacccagaagtacggaaacagatgcccccgccacccccttgtcctgggcgagaactgttcgatgacccctcttacgtgaatgtccaaaatctcgataaagcccgacaggctgtgggcggagccggccctcctaatcctgctataaacgggagtgcccctcgtgatctctttgatatgaagccatttgaggacgctttacgggtaccgcctcccccacagtccgtgtctatggcagaacaattacggggcgagccgtggttccacggaaagttaagtcggagggaggccgaggctctgctacagctgaacggggattttctcgtgcgagaatctaccactaccccaggacagtacgtccttactggactacagtcagggcagcccaaacatctcctgttggtggaccccgagggagtggtgcgaaccaaagatcacaggttcgaaagcgtgagccatttaatctcgtatcacatggataaccatttgccaatcatatctgccgggagcgagctgtgccttcagcagcctgtggagcgtaaactgtag

SEQ ID NO: 47291 - DNA, 1422 bp, Artificial Sequence
  derived and/or modified sequence
atgaacaaactcagcggtgggggaggcaggcggacgcgggttgaaggtggacagctgggcggagaggagtggacccgccatggttcttttgtcaacaagcctactcgcggttggcttcatccaaatgataaggtaatgggacctggggtgagttatctggtgcgctatatgggctgtgtggaagtccttcagtctatgagggctcttgatttcaatacacgcacacaggtgactagagaagctataagcctagtttgtgaggctgtgccaggcgcaaagggggctactagacggagaaagccatgttcacgccctctatcaagtatcctaggcagatccaatttgaaattcgccggaatgcccattaccctgacagtgtctacttcgagccttaatcttatggcagccgactgcaagcagatcattgctaatcatcatatgcaatcaatctcctttgccagtggcggagaccccgatacggcggagtacgtggcatacgttgcaaaagatccagtgaaccaacgcgcatgtcatatcctggagtgtcctgaagggctcgcccaggatgtcattagcaccatcggccaggcctttgagttgaggtttaagcagtacctgcgcaaccccccaaaattagtgactccacacgatcgcatggctggatttgatggatccgcttgggatgaggaagaggaggaaccacccgatcatcagtattacaacgactttccaggcaaagagcccccactgggcggtgtggtggatatgcgcttaagggagggcgctgctcctggggcagcccgtcctactgccccaaatgcccagaccccgtcacacctcggcgctactctccctgtcgggcaacctgtgggaggagacccggaggttcgtaagcagatgcctcctccaccaccctgccctggcagggagctatttgatgatccatcctatgtgaatgtgcagaatttggacaaagctcggcaagcggtcggtggggcagggcctcctaatccggctattaacgggagcgccccaagggacctattcgacatgaagccgtttgaggacgcactaagagtgccaccacctccgcagagcgtgtccatggctgaacagctcaggggggaaccttggttccacggcaagctgagccgcagagaggcagaggcgctgctgcagctaaacggagattttcttgtgagggagtctacaaccacccctggccagtacgtgctgactgggctccagtcaggccagccaaagcacctcttgctcgtggacccagaaggggttgtcaggacaaaagaccacaggtttgaatctgtgtcgcacctcatcagttaccacatggacaaccaccttcctattatttccgcaggctctgaattgtgcttgcagcagcccgtggagaggaaactgtag

SEQ ID NO: 47292 - DNA, 1692 bp, Artificial Sequence
  derived and/or modified sequence
gtttctccagggaggcagggcccggggagaaagttggagcggtaacctaagctggcagtggcgtgatccggcaccaaatcggcccgcggtgcggtgcggagactccatgaggccctggacatgaacaagctgagtggaggcggcgggcgcaggactcgggtggaagggggccagcttgggggcgaggagtggacccgccacgggagctttgtcaataagcccacgcggggctggctgcatcccaacgacaaagtcatgggacccggggtttcctacttggttcggtacatgggttgtgtggaggtcctccagtcaatgcgtgccctggacttcaacacccggactcaggtcaccagggaggccatcagtctggtgtgtgaggctgtgccgggtgctaagggggcgacaaggaggagaaagccctgtagccgcccgctcagctctatcctggggaggagtaacctgaaatttgctggaatgccaatcactctcaccgtctccaccagcagcctcaacctcatggccgcagactgcaaacagatcatcgccaaccaccacatgcaatctatctcatttgcatccggcggggatccggacacagccgagtatgtcgcctatgttgccaaagaccctgtgaatcagagagcctgccacattctggagtgtcccgaagggcttgcccaggatgtcatcagcaccattggccaggccttcgagttgcgcttcaaacaatacctcaggaacccacccaaactggtcacccctcatgacaggatggctggctttgatggctcagcatgggatgaggaggaggaagagccacctgaccatcagtactataatgacttcccggggaaggaaccccccttggggggggtggtagacatgaggcttcgggaaggagccgctccaggggctgctcgacccactgcacccaatgcccagacccccagccacttgggagctacattgcctgtaggacagcctgttgggggagatccagaagtccgcaaacagatgccacctccaccaccctgtccaggcagagagctttttgatgatccctcctatgtcaacgtccagaacctagacaaggcccggcaagcagtgggtggtgctgggccccccaatcctgctatcaatggcagtgcaccccgggacctgtttgacatgaagcccttcgaagatgctcttcgcgtgcctccacctccccagtcggtgtccatggctgagcagctccgaggggagccctggttccatgggaagctgagccggcgggaggctgaggcactgctgcagctcaatggggacttcctggtacgggagagcacgaccacacctggccagtatgtgctcactggcttgcagagtgggcagcctaagcatttgctactggtggaccctgagggtgtgagatggggtttcgccatgttgcccaagctgttcttgaactcccgggctcaagtgatccgcctccctcggcctcccagagtgctgggattacaggcacggaccaccatgcccagcctccacatctttttttgcactgtgtatactcttctgagacatgccaacttcctccaggtcaagaaaggggtatatagctctcagcttcactctttcagggctgatgtcgcctttgccttttctcacttcactgacctgtctattcctacaactgtctctttctag

SEQ ID NO: 47293 - DNA, 3059 bp, Artificial Sequence
  derived and/or modified sequence
gagtgtaataaagtttctccagggaggcagggcccggggagaaagttggagcggtaacctaagctggcagtggcgtgatccggcaccaaatcggcccgcggtgcggtgcggagactccatgaggccctggacatgaacaagctgagtggaggcggcgggcgcaggactcgggtggaagggggccagcttgggggcgaggagtggacccgccacgggagctttgtcaataagcccacgcggggctggctgcatcccaacgacaaagtcatgggacccggggtttcctacttggttcggtacatgggttgtgtggaggtcctccagtcaatgcgtgccctggacttcaacacccggactcaggtcaccagggaggccatcagtctggtgtgtgaggctgtgccgggtgctaagggggcgacaaggaggagaaagccctgtagccgcccgctcagctctatcctggggaggagtaacctgaaatttgctggaatgccaatcactctcaccgtctccaccagcagcctcaacctcatggccgcagactgcaaacagatcatcgccaaccaccacatgcaatctatctcatttgcatccggcggggatccggacacagccgagtatgtcgcctatgttgccaaagaccctgtgaatcagagagcctgccacattctggagtgtcccgaagggcttgcccaggatgtcatcagcaccattggccaggccttcgagttgcgcttcaaacaatacctcaggaacccacccaaactggtcacccctcatgacaggatggctggctttgatggctcagcatgggatgaggaggaggaagagccacctgaccatcagtactataatgacttcccggggaaggaaccccccttggggggggtggtagacatgaggcttcgggaaggagccgctccaggggctgctcgacccactgcacccaatgcccagacccccagccacttgggagctacattgcctgtaggacagcctgttgggggagatccagaagtccgcaaacagatgccacctccaccaccctgtccaggcagagagctttttgatgatccctcctatgtcaacgtccagaacctagacaaggcccggcaagcagtgggtggtgctgggccccccaatcctgctatcaatggcagtgcaccccgggacctgtttgacatgaagcccttcgaagatgctcttcgcgtgcctccacctccccagtcggtgtccatggctgagcagctccgaggggagccctggttccatgggaagctgagccggcgggaggctgaggcactgctgcagctcaatggggacttcctggtacgggagagcacgaccacacctggccagtatgtgctcactggcttgcagagtgggcagcctaagcatttgctactggtggaccctgagggtgtggttcggactaaggatcaccgctttgaaagtgtcagtcaccttatcagctaccacatggacaatcacttgcccatcatctctgcgggcagcgaactgtgtctacagcaacctgtggagcggaaactgtgatctgccctagcgctctcttccagaagatgccctccaatcctttccaccctattccctaactctcgggacctcgtttgggagtgttctgtgggcttggccttgtgtcagagctgggagtagcatggactctgggtttcatatccagctgagtgagagggtttgagtcaaaagcctgggtgagaatcctgcctctccccaaacattaatcaccaaagtattaatgtacagagtggcccctcacctgggcctttcctgtgccaacctgatgccccttccccaagaaggtgagtgcttgtcatggaaaatgtcctgtggtgacaggcccagtggaacagtcacccttctgggcaagggggaacaaatcacacctctgggcttcagggtatcccagacccctctcaacacccgccccccccatgtttaaactttgtgcctttgaccatctcttaggtctaatgatattttatgcaaacagttcttggacccctgaattcaatgacagggatgccaacaccttcttggcttctgggacctgtgttcttgctgagcaccctctccggtttgggttgggataacagaggcaggagtggcagctgtcccctctccctggggatatgcaacccttagagattgccccagagccccactcccggccaggcgggagatggacccctcccttgctcagtgcctcctggccggggcccctcaccccaaggggtctgtatatacatttcataaggcctgccctcccatgttgcatgcctatgtactctacgccaaagtgcagcccttcctcctgaagcctctgccctgcctccctttctgggagggcggggtgggggtgactgaatttgggcctcttgtacagttaactctcccaggtggattttgtggaggtgagaaaaggggcattgagactataaagcagtagacaatccccacataccatctgtagagttggaactgcattcttttaaagttttatatgcatatattttagggctgtagacttactttcctattttcttttccattgcttattcttgagcacaaaatgataatcaattattacatttatacatcacctttttgacttttccaagcccttttacagctcttggcattttcctcgcctaggcctgtgaggtaactgggatcgcaccttttataccagagacctgaggcagatgaaatttatttccatctaggactagaaaaacttgggtctcttaccgcgagactgagaggcagaagtcagcccgaatgcctgtcagtttcatggaggggaaacgcaaaacctgcagttcctgagtaccttctacaggcccggcccagcctaggcccggggtggccacaccacagcaagccggccccccctcttttggccttgtggataagggagagttgaccgttttcatcctggcctccttttgctgtttggatgtttccacgggtctcacttataccaaagggaaaactcttcattaaagtccgtatttcttcta

SEQ ID NO: 47294 - protein, 95 aa, Artificial Sequence
  derived and/or modified sequence
MCCTKSLLLAALMSVLLLHLCGESEASNFDCCLGYTDRILHPKFIVGFTRQLANEGCDINAIIFHTKKKLSVCANPKQTWVKYIVRLLSKKVKNM

SEQ ID NO: 47295 - DNA, 288 bp, Artificial Sequence
  derived and/or modified sequence
atgtgttgtacgaagtctctcctgctcgcagccctgatgagcgtccttctgctgcacttgtgtggcgagtctgaagcctcaaatttcgactgctgcctgggttacacagatcggatccttcatccaaaatttatagtcggcttcactaggcagttagcaaacgaaggatgtgatataaatgccatcatcttccatacaaaaaagaaactgtctgtgtgtgcaaacccaaagcagacgtgggtcaaatatatcgtgaggctgctctccaagaaagttaaaaatatgtag

SEQ ID NO: 47296 - DNA, 288 bp, Artificial Sequence
  derived and/or modified sequence
atgtgctgcaccaagagcctgctgctggccgccctgatgtctgtgctgctgctgcacctgtgtggggagagcgaggccagcaactttgactgctgcctgggctacacagaccgcatcctgcaccccaagttcatcgtgggcttcacccggcagctggccaatgaaggctgtgacatcaatgccatcatcttccacaccaagaagaagctgtctgtgtgtgccaaccccaagcagacctgggtgaagtacatcgtgcggctgctgagcaagaaggtgaagaacatgtag

SEQ ID NO: 47297 - DNA, 288 bp, Artificial Sequence
  derived and/or modified sequence
atgtgctgcaccaagagcctgctgctggccgccctgatgagcgtgctgctgctgcacctgtgtggagaatcagaggcatccaattttgattgctgcctaggatacacagacagaatcctgcacccaaaatttattgtgggttttacacgacagctggcaaacgaaggctgtgacatcaatgccatcatattccatactaaaaagaaactgagtgtctgcgctaacccaaagcagacctgggtcaaatatatcgtgaggctgctgtctaaaaaagttaaaaatatgtag

SEQ ID NO: 47298 - DNA, 288 bp, Artificial Sequence
  derived and/or modified sequence
atgtgctgcacaaagagtttactactagcagcgctgatgagcgtactgctcctgcatctttgtggcgaaagtgaggccagtaacttcgactgttgcctggggtacaccgaccgcatcctgcatcctaagttcatcgtcggcttcacaagacagttggcaaatgaggggtgcgacattaacgccattatctttcacaccaagaagaaactgtctgtttgcgccaaccctaagcagacgtgggtaaagtatattgttcgcctgttatctaagaaggtgaaaaatatgtag

SEQ ID NO: 47299 - DNA, 831 bp, Artificial Sequence
  derived and/or modified sequence
agaatataacagcactcccaaagaactgggtactcaacactgagcagatctgttctttgagctaaaaaccatgtgctgtaccaagagtttgctcctggctgctttgatgtcagtgctgctactccacctctgcggcgaatcagaagcaagcaactttgactgctgtcttggatacacagaccgtattcttcatcctaaatttattgtgggcttcacacggcagctggccaatgaaggctgtgacatcaatgctatcatctttcacacaaagaaaaagttgtctgtgtgcgcaaatccaaaacagacttgggtgaaatatattgtgcgtctcctcagtaaaaaagtcaagaacatgtaaaaactgtggcttttctggaatggaattggacatagcccaagaacagaaagaaccttgctggggttggaggtttcacttgcacatcatggagggtttagtgcttatctaatttgtgcctcactggacttgtccaattaatgaagttgattcatattgcatcatagtttgctttgtttaagcatcacattaaagttaaactgtattttatgttatttatagctgtaggttttctgtgtttagctatttaatactaattttccataagctattttggtttagtgcaaagtataaaattatatttgggggggaataagattatatggactttcttgcaagcaacaagctattttttaaaaaaaactatttaacattcttttgtttatattgttttgtctcctaaattgttgtaattgcattataaaataagaaaaatattaataagacaaatattgaaaataaagaaacaaaaagtt

SEQ ID NO: 47300 - DNA, 288 bp, Artificial Sequence
  derived and/or modified sequence
atgtgctgcaccaagagcctgctgctggccgccctgatgagcgtgctgctgctgcacctgtgcggcgagagcgaggccagcaacttcgactgctgcctgggctacaccgacagaatcctgcaccccaagttcatcgtgggcttcaccagacagctggccaacgagggctgcgacatcaacgccatcatcttccacaccaagaagaagctgagcgtgtgcgccaaccccaagcagacctgggtgaagtacatcgtgagactgctgagcaagaaggtgaagaacatgtag

SEQ ID NO: 47301 - protein, 424 aa, Artificial Sequence
  derived and/or modified sequence
MDQPSGRSFMQVLCEKYSPENFPYRRGPGMGVHVPATPQGSPMKDRLNLPSVLVLNSCGITCAGDEKEIAAFCAHVSELDLSDNKLEDWHEVSKIVSNVPQLEFLNLSSNPLNLSVLERTCAGSFSGVRKLVLNNSKASWETVHMILQELPDLEELFLCLNDYETVSCPSICCHSLKLLHITDNNLQDWTEIRKLGVMFPSLDTLVLANNHLNAIEEPDDSLARLFPNLRSISLHKSGLQSWEDIDKLNSFPKLEEVRLLGIPLLQPYTTEERRKLVIARLPSVSKLNGSVVTDGEREDSERFFIRYYVDVPQEEVPFRYHELITKYGKLEPLAEVDLRPQSSAKVEVHFNDQVEEMSIRLDQTVAELKKQLKTLVQLPTSNMLLYYFDHEAPFGPEEMKYSSRALHSFGIRDGDKIYVESKTK

SEQ ID NO: 47302 - DNA, 1275 bp, Artificial Sequence
  derived and/or modified sequence
atggaccagcccagcggcagaagcttcatgcaggtgctgtgcgagaagtacagccccgagaacttcccctacagaagaggccccggcatgggcgtgcacgtgcccgccaccccccagggcagccccatgaaggacagactgaacctgcccagcgtgctggtgctgaacagctgcggcatcacctgcgccggcgacgagaaggagatcgccgccttctgcgcccacgtgagcgagctggacctgagcgacaacaagctggaggactggcacgaggtgagcaagatcgtgagcaacgtgccccagctggagttcctgaacctgagcagcaaccccctgaacctgagcgtgctggagagaacctgcgccggcagcttcagcggcgtgagaaagctggtgctgaacaacagcaaggccagctgggagaccgtgcacatgatcctgcaggagctgcccgacctggaggagctgttcctgtgcctgaacgactacgagaccgtgagctgccccagcatctgctgccacagcctgaagctgctgcacatcaccgacaacaacctgcaggactggaccgagatcagaaagctgggcgtgatgttccccagcctggacaccctggtgctggccaacaaccacctgaacgccatcgaggagcccgacgacagcctggccagactgttccccaacctgagaagcatcagcctgcacaagagcggcctgcagagctgggaggacatcgacaagctgaacagcttccccaagctggaggaggtgagactgctgggcatccccctgctgcagccctacaccaccgaggagagaagaaagctggtgatcgccagactgcccagcgtgagcaagctgaacggcagcgtggtgaccgacggcgagagagaggacagcgagagattcttcatcagatactacgtggacgtgccccaggaggaggtgcccttcagataccacgagctgatcaccaagtacggcaagctggagcccctggccgaggtggacctgagaccccagagcagcgccaaggtggaggtgcacttcaacgaccaggtggaggagatgagcatcagactggaccagaccgtggccgagctgaagaagcagctgaagaccctggtgcagctgcccaccagcaacatgctgctgtactacttcgaccacgaggcccccttcggccccgaggagatgaagtacagcagcagagccctgcacagcttcggcatcagagacggcgacaagatctacgtggagagcaagaccaagtag

SEQ ID NO: 47303 - DNA, 1275 bp, Artificial Sequence
  derived and/or modified sequence
atggaccagccgtcaggtagaagtttcatgcaggttctctgcgaaaaatacagtccggagaactttccctatcgccggggtccaggcatgggggttcacgttccggctactccccaagggtctcctatgaaggaccggctcaacttgccaagcgtgttggttctcaacagttgcggaatcacttgcgcgggagacgaaaaggagatcgccgccttttgcgcccacgtgtctgaattggacttaagtgacaataaactggaagactggcatgaggtcagcaagattgttagtaacgttccacagctggagtttttgaacttgtcttctaaccctctgaatctctcggtcctggagaggacatgtgccggatccttctccggggtgaggaaactggtgctgaataactctaaagcgtcctgggaaaccgttcatatgattctacaggaactcccagacctcgaggagttgtttctgtgcctgaacgactacgaaacagtctcttgcccctccatatgctgtcattctttgaaactactgcacataaccgacaacaacctgcaggattggactgagatcaggaaacttggggtcatgtttccctctctggatactctcgtgctcgcgaacaatcatctcaatgccattgaggaaccagacgacagtttggcccgcctgtttcctaacttgaggtctattagcctgcataaatcaggactgcagagctgggaagacatcgacaagcttaacagcttccctaagctggaggaggtgagacttcttggcatcccgctgcttcagccatatactacagaagagaggcgaaaattggtaattgctcgattgccctctgtgagtaaactgaatggttccgtggtgaccgatggagagagagaagattcagagcgtttttttatcagatactatgtcgatgtgccccaggaagaggtgccctttcggtaccatgagctgattacaaagtacgggaaactggaaccactggcagaggtggatcttaggcctcagtcctccgctaaggtggaggttcactttaacgatcaggtggaggagatgagcattcgtctggaccaaaccgtggcagagctgaagaaacaattgaaaaccctcgttcaacttcctacttccaacatgttactttattatttcgatcacgaggccccctttggccccgaagagatgaagtattcctctagagcattacattcctttggcattcgagatggtgacaaaatctatgtggaatccaaaactaagtag

SEQ ID NO: 47304 - DNA, 1275 bp, Artificial Sequence
  derived and/or modified sequence
atggaccagcctagcggccgtagcttcatgcaagtgttgtgcgagaaatacagccctgaaaactttccatataggcgaggaccaggaatgggagtgcatgtgccagccacccctcaaggatctcctatgaaagatcgcctaaatctgcctagtgtccttgtgctgaatagctgcggcattacctgcgctggggacgagaaggagatcgcagccttttgtgctcatgtgtcagagctagatctgtccgacaataagctggaggattggcacgaagttagtaaaatagtgtctaacgtgccgcagctggagttcctgaatctctccagcaatccacttaacctgagtgtgttggaacggacgtgcgccggaagtttctctggtgtgcggaagcttgttttgaacaactccaaggcctcatgggaaaccgtgcatatgatcttacaggagctccccgacctcgaagaactttttctctgcctgaacgactacgagaccgtgagctgcccctccatctgttgtcactctcttaagctgctgcatatcaccgacaacaatctgcaagattggaccgaaattcggaaattgggcgtgatgttccccagtctcgataccctcgtgctagctaacaaccacctaaacgccatcgaggaaccagatgactctcttgccagactctttccaaatctgcgatccattagtctgcataaaagcggtctacagtcatgggaagatattgacaaactcaattcattccctaaactggaagaggtaaggcttctcggtatccctctgctgcagccttacacaacagaggaacggcgcaagctggtgattgcaagactccccagcgtgagcaaactgaacggcagtgtcgtcactgacggggagcgtgaagatagcgaacgctttttcatcagatattatgtagatgtaccccaggaggaggtccccttccgctaccatgagctgataacaaagtacggaaagttggagcctctggctgaggtggacctgcggccacagtctagcgctaaagtggaggttcatttcaatgaccaggtggaagaaatgtctattaggttagaccaaaccgtagccgagctgaagaaacagcttaagactttggtgcagctgccaacttcgaacatgcttctgtattatttcgatcatgaggctccatttggtcccgaggagatgaaatattcttccagagccctgcactcatttggaattcgagacggcgacaagatctacgttgaaagtaagactaagtag

SEQ ID NO: 47305 - DNA, 1275 bp, Artificial Sequence
  derived and/or modified sequence
atggaccagcccagcggccgctccttcatgcaggtgctgtgtgagaagtacagccctgagaacttcccctacagaagaggccctggcatgggcgtgcacgtgcctgccaccccccagggcagccccatgaaggaccggctgaacctgcccagcgtgctggtgctgaacagctgtggcatcacctgtgctggagatgagaaggagattgctgccttctgtgcccacgtgtctgagctggacctgagtgacaacaagctggaggactggcatgaggtgtccaagatcgtgtccaatgtgccccagctggagttcctgaacctgagcagcaaccccctgaacctgtctgtgctggagaggacctgtgccggcagcttcagcggcgtgaggaagctggtgctgaacaacagcaaggcctcctgggagaccgtgcacatgatcctgcaggagctgcctgacctggaggagctgttcctgtgcctgaatgactatgaaacagtgtcctgccccagcatctgctgccacagcctgaagctgctgcacatcacagacaacaacctgcaggactggacagagatcaggaagctgggcgtgatgttccccagcctggacaccctggtgctggccaacaaccacctgaatgccatcgaggagccagatgacagcctggcccggctcttccccaacctgcggagcatcagcctgcacaagagcggcctgcagagctgggaggacatcgacaagctgaacagcttccccaagctggaggaggtgcggctgctgggcatccccctgctgcagccctacaccacagaggagaggaggaagctggtgattgcccggctgcccagcgtgtccaagctgaatggatctgtggtgacagatggagagcgggaggacagcgagcgcttcttcatccgctactacgtggatgtgccccaggaggaggtgcccttccgctaccacgagctgatcaccaagtatggcaagctggagcccctggccgaggtggacctgcggccccagagcagcgccaaggtggaggtgcacttcaatgaccaggtggaggagatgagcatccggctggaccagacagtggccgagctgaagaagcagctgaagaccctggtgcagctgcccaccagcaacatgctgctgtactactttgaccacgaggcccccttcggccctgaggagatgaagtacagcagccgggccctgcacagctttggcatcagagatggagacaagatctacgtggagagcaagaccaagtag

SEQ ID NO: 47306 - DNA, 1275 bp, Artificial Sequence
  derived and/or modified sequence
atggaccagcccagcggccggagcttcatgcaggtgctgtgcgagaaatactccccggagaacttcccgtacaggcggggacccggcatgggggtgcatgtgcccgctacgccacagggcagtcctatgaaggaccgcctgaatctgccatccgtcttagttcttaactcatgtgggattacgtgcgccggcgacgaaaaagagattgctgctttttgcgctcacgtatccgagcttgatctctctgataataagttggaggattggcatgaagtgtcgaaaatcgtctccaacgtaccacagctcgagtttcttaaccttagtagcaatccgctcaatctgtctgtactggaaagaacatgtgcagggtccttctccggcgtgcgtaaactggtgctaaacaactccaaggccagctgggaaacagttcatatgattctgcaggagctccctgatctggaggagttgtttctgtgcctcaacgactacgagaccgtgagttgccccagcatctgttgtcactctcttaaactcctacacattacagataataaccttcaggactggactgagattagaaaactcggcgtgatgttcccatctctagacacgctagtgttggccaacaaccacttgaatgccatcgaagagccagatgatagcttagccaggctgtttcccaacttaagaagtatctcactgcacaaatcagggttacaatcttgggaagacattgacaaacttaatagttttccgaaactcgaagaggtgcgcctgctcggtattccgcttttgcaaccatacaccaccgaagaaaggagaaagcttgttattgctcgcttacccagtgtgtccaagctgaatggcagcgttgtcacagacggcgaaagggaggattccgagagattctttatcagatattatgtggatgtgccccaagaggaggttccgtttcgttaccacgagctaattactaagtatgggaagcttgaacctttggctgaggtggacctgcgcccccaaagtagtgcaaaggtcgaagtgcatttcaatgatcaggtcgaagagatgagtattcgactggaccaaacagtggccgaactcaagaaacagctgaaaacactggtccagctcccaacaagcaacatgcttctctactatttcgaccacgaggcaccttttggccctgaggaaatgaaatattcttccagagccctgcattcttttggtatccgggatggtgacaaaatctacgtggagtctaagacgaagtag

SEQ ID NO: 47307 - DNA, 1275 bp, Artificial Sequence
  derived and/or modified sequence
atggaccagcccagcggccggagcttcatgcaggtgctgtgcgagaaatattcaccagagaatttcccatacaggcgaggaccaggaatgggtgtacatgtgcctgccactccacagggttccccaatgaaagatagactcaacctcccctccgtgctagtcctgaactcatgcggcatcacctgcgccggagacgaaaaagaaatagcagcgttctgcgcacacgtgtccgaactcgacttgagtgacaacaagcttgaagattggcatgaagtgagcaaaatcgtgtccaatgtaccacagctggagttcctgaatctatccagcaaccccctgaacctttcagtcctggagaggacatgtgccgggtctttctccggggtgcgtaagctggtgctgaataatagcaaagctagctgggagacggtccatatgattctgcaggagctgccggatttagaggagctgttcctttgcttgaatgattatgagactgtgtcctgtccctccatctgttgtcactcgctcaaactcttgcacattactgacaataatctacaggattggactgaaataagaaagctcggagtgatgtttccttcactcgatactctcgtgctggctaacaaccatcttaacgccatcgaagagccagatgactcactagctcgtctcttccccaatctaagatccatcagcctgcacaagtcaggcctgcagtcctgggaggatatcgataaactcaattccttccctaagctcgaagaggtacgcctcctggggatcccccttctccagccttacacgaccgaggagagacggaaactagttatcgcacggctcccttccgtgtcgaagcttaatggcagcgttgtcaccgacggcgagcgggaggactccgagcgcttcttcattcgatattacgtcgatgtgcctcaagaggaagtccccttcagataccacgaactaatcaccaagtacggtaagttggagcccttggctgaagtggacttgcgcccccagagcagtgcgaaggtcgaggtgcacttcaacgaccaagtggaggaaatgtccatacgtctagatcagacagttgcggaattgaagaagcagcttaaaacactcgtgcaactccctacatcgaacatgctgctatattactttgaccatgaggcaccattcggacccgaagagatgaagtacagctcacgtgcattgcactccttcggaatccgggacggagataagatctatgtggagagcaagaccaaatag

SEQ ID NO: 47308 - DNA, 5142 bp, Artificial Sequence
  derived and/or modified sequence
acactgggctccggcggccagagtgggggactaggtgaagcggcgccgggccggggctggccgggaccaggcccgaggctgagcggcggcgacagcggtggccgggaggggggaggagaggcgcagccagaggagccgccgcagtagctcccccgcctcccgggctgagggcattttaagaaagaaagatggatcaacctagtggaagaagtttcatgcaagtattatgtgaaaaatatagtcctgaaaattttccttatcgccgtggcccggggatgggagtccatgtcccagccacacctcagggctctcctatgaaagatcgcctcaacctcccaagtgtactagtgttgaacagctgtggaataacctgtgcaggagatgaaaaagaaattgctgctttctgcgctcatgtgtcggaactagatctttctgacaacaaactcgaagactggcatgaggtcagtaaaattgtgtcaaatgttcctcagttggagtttctaaacctgagttccaaccctctgaatttgtcggttttagaaagaacatgtgctgggtccttctctggggttcgcaaacttgtcctcaacaacagcaaagcttcttgggagacggtccacatgatactacaggagttaccagatttggaggagctcttcctgtgccttaatgactatgaaacagtgtcttgtccttctatttgctgtcattctcttaagctactacatataacagacaataacctccaagactggactgaaatacgaaagttaggagttatgtttccttcactggataccctcgtcctggccaacaatcatttgaatgctattgaggagcctgatgattcattggccaggttgtttcctaatcttcgatccatcagcctccacaagtcaggtttgcagtcctgggaagacattgataaactaaattcatttcccaaactggaagaagtgagattgttaggaattcctcttctgcagccatataccaccgaggagcgaaggaaattggtaatagccagattgccatcagtttccaaacttaatggcagcgttgttactgatggtgaacgagaagattctgagagattttttattcgttactatgtggatgttccacaggaagaagtgccattcaggtatcatgaactgatcactaaatatgggaagttggagcctttggcagaagtggacctaagaccccagagcagtgcaaaagtagaagtccactttaacgatcaggtggaagaaatgagcattcgtctggaccaaacagtggcagaactaaagaaacagttaaaaactctagtacaattacccacaagcaacatgcttctctactattttgaccatgaagcaccctttggcccagaggaaatgaagtacagctctcgggcattgcattcctttggcattagggatggagataaaatttacgtggaatccaaaacaaaataacctctaccagccttgtgaaaaacatacacataaggacttgttgcagggcatttgtttttaatgtggttttctttaggagggagaggttgtttttgttttgttttgttctgtttaggtttgggaaggattttgtatatttttccccctggagtgagtaggggccatttttgggtgttttctaccacagattgatttggctcagccagcggaattggccacatttccagtgtatgtgccctctctaaggaaagatgacaaagaaatcaccgacttcttactgtgttcactgggatttgcctgccacttggttatcattactgttgggtgaacctgtgaagataacatgaacactgtagccccttagaagggtctcatagagaatttaaacagggtgacaaggaatcttcacaggaagggccagaacttctctctcccagttcttccttccgctaccctccctccttggcttttttggttcagttccatttttttttcattttgacatgtggtttacctaatagttttgttctgttcataattcttatttctcaacctgggtgatttttttgttctcatttctcccttttgaaataattgaaagtgttttaagcatttttaacctgattctaatctcaggtacgcagtaagaagctataactctgttagaacctcgaagagtagatgtagaatgaaaactccaggaaaacttgcagttattctggaagcaccggcagaacagtctgatctctttgtatgttactaactcacttttaatgtccctgtacattatgtcagccattactttcataacatgaaatatgtcagattccagagttcttttatttttgcttattgaatgtatttcctcatatctttctttttcattactttaaactattgggaattgaggcctgacttcataaataattcaatagagtcctggatacgtgcaccaggagagttgagaattagctcataaactatctgtggtgtgtgtggggaatgaagttgggggatgtgggggaagagcttatgactttcccacctgtgtcatccattggaagcccttgctcttgcactttgcattaaaagtgggaaacattaatcaaagggagattttattcccaggttttccctgggactttgtgatatcataattgaacagttcttttgttttacatttcaatttagttgcctcatagaagtataactgcccaatctatgagtaaagtgtaagtgtcaaaactttacaattgcctccaagtcatattttttgcagaagcacatttaaagcacttttctgtaaaagctagttccttacctgcttggaaatctttttgtttgttcttctattcctttgttaatcagatgtaatccctttctttaatgtgtatttttcttggtccaccatgtttacagatgggagacttgagagatacttagcataactggggcagaaagtgtgtaagtgaagtatttttcaaagaatgcagttattatctgattgcatttgaccttttgacctttgttacataattctacccctcctacaaatttaatttttttatgaaatttttaggtgacttgtaaattcttcatgtatgaggagttgtgtttattaatgctactttttaaattttcctgtgccatgtggcagatgtttattctcttaatgcacttcaggtttgctatctgtaaagcctttgacccaggcctactgagtcaaatctacattcagtgtaacattaaaggtggaaaccaaagggtttgagaaagacgaataaggcctattctccttctgctgcagactttatctttcaaaatcataaaaatgagcaatggagatccaggctgggtatagacaagaataattattttgcaaacacattttcctgacagatttttggaagtaggaaaaaagtatggcaacagtgtcatgaagattgaaactgtaggtgctttgtgtatgtatgcatgagtgcagatgagtttgagagagaaaaagtgtaattgagccctttgcttttgtcagcctgggaaacagatgcgttcttattttttgaagttgtgtgaccctggactgtcccacagcagaaggcagaacaaacacttatgttatgctttaatcataagtggaatggtcacaattaataagatattttatatatggcaaagttttatgaaatgcttttttactattagagacctgtttcttctgttattacagaacacagtgtttatcaactgcggacataattcttttattatacagttgcatgtaaagggagcttctcatttaattcagcggatgtgggtatttttagggcattgtaattgatggttttaataattgctgaataatttttgattaagagaaaaatgtaatacaattactggtctgagttacagaacagaagttaatgaaaaaggctatttgagcatgtgtacttatagattcatttgggtggctgagaaaagatgctgcttttgaaataaaattggtgctgtgtagacacttgtaaccaaaattatttttataacagaactaaaagaaggagagaagaggccatggacctttgagtttacatgttatacctaattgattgtctgcagcttatctgtattttaatattgactttgtccagattcagtgagaacatagtattgacattatgaggcaaaatgctgtcatagccagtattactgatatgttgctacagacacaatgtatagaacataccttttctaaaataggaattatttccagttatgaaaaaggaaaagagtaataaagaaaaccaaatcaaaaccaagggatcctttctacatgtgggtgaacggctgctaaagccacagtagaaaccaatttttgaatttgaattgttgaaatatcctagattgctttaatggaaaaaatccagagtcacatatcttttttattatcaagtttttgcagccttttgccagcattgccataaatacgtaagaaagcagcagatagtataagcccctagttattaagacttctcagttaatattaaggccaaaatataacttgagctaggtataacagggctgaatgctacagtgttgtttttaaagattttgcttatttttaaagacaggaaaattcagttctaaccagatgttccagctatgttactcaaccagcagtggtaggagcagagagcacttgcactaagagctgatcaccatttgagatacgcggcttaacgcacatgtgagtgtagcttgctacatgaaaatgctaggctctagggcatgtaaaacatgaatacagaatactagattgttctaagtaatgtcatttcggtttgtgaatttgatttttcccttcatttcatgtcatattgaaaatgcaaacaaactgctctcaagaacacccagaagctatctgtgttaccagatgtgttgtgaacactctactatttttcataggtgcttccttgaaatatatgtccattgtagtggtggagagggactggactctctcaggctctttacttgccagttgtctcccgcagttaatggaaatatatatacatatatatatatattttatttagaatataatttaaacatgaaggtctattctttgcactttttattaatatatatatagataatctttaaaaaaattaaaattcaagtccatttt

SEQ ID NO: 47309 - DNA, 1275 bp, Artificial Sequence
  derived and/or modified sequence
atggatcagccatcaggacgaagctttatgcaagtgctgtgtgaaaaatactctccagaaaactttccttatagacgcggacccggtatgggcgtgcacgtgcccgctaccccacagggaagcccgatgaaggatagactgaacttgccatcagtcctggtgctgaacagctgcggtattacctgtgcaggagatgagaaagagatcgccgcattttgtgcacacgtgtcagaactggatctgtccgacaataagctggaggactggcacgaggtgagtaaaattgtgtctaacgtgcctcagctggagttcttgaatttgtccagcaacccattgaacttatctgtgctagagcgcacctgtgcaggatcattttccggagtgcgcaaactcgtgctgaataacagtaaagcctcttgggaaaccgtacacatgatcctccaggagctgccggatctggaggaactgttcctgtgtctgaatgactacgaaaccgtgtcttgtccatcaatctgttgccacagcctgaaactcctgcacatcacagataataacttgcaggattggacagagattcgcaaactgggtgtcatgtttccatcacttgacactctggtgctggctaataatcacctgaatgccatagaggagccagacgactctctcgctagattgtttcctaatcttcgatctatttctctgcacaaaagcggcttgcagtcctgggaagacatcgacaaattgaactcgttccccaagctcgaggaggttagacttctaggaatccctctcctgcaaccttacaccacagaagagcggaggaaactggtgatagcaaggctgccctcggtctctaaactaaatgggtccgtcgtcactgacggggagcgcgaagatagtgaaaggttctttataaggtattacgttgacgttccacaggaggaggtgccttttaggtaccacgaactcatcactaaatacggtaagctggagcctctggcagaggtcgatctcagaccccaaagctcagcgaaagtggaggttcacttcaatgaccaggtcgaagagatgtccatccgtctcgaccagaccgtcgctgagttgaagaagcaactgaagacccttgtccagctgcctacttccaacatgctactgtactacttcgatcacgaggcaccatttgggccagaggagatgaagtacagcagtcgcgcactgcattcatttggcatccgtgacggagataagatctacgtggagtcaaagaccaaatag

SEQ ID NO: 47310 - DNA, 1275 bp, Artificial Sequence
  derived and/or modified sequence
atggatcagcctagtggcagatccttcatgcaggtgctctgtgagaagtactcgcctgagaacttcccttacagacggggtcccggaatgggtgttcatgttcccgcaacgccccagggttcacctatgaaggacaggctgaatctcccatccgtcctcgttcttaattcttgcggaattacatgcgcgggagacgagaaggaaatagcagccttttgtgcccatgttagtgaactagatctctccgacaacaagctggaggactggcacgaggtgtcaaagatcgtttctaacgtgccacagctggagtttcttaacctaagttcgaacccattgaaccttagcgttttggaacgaacatgcgcgggttcgttctccggagtacgcaagttggtgctgaacaactccaaggcttcttgggagaccgtccatatgatcctacaggaactgccggatttggaggagctgtttctgtgcttgaatgattacgaaactgttagttgccctagcatttgttgccactccctgaaactgcttcatattaccgataacaacctccaggactggacggaaatcagaaagctgggcgttatgttcccttctcttgacacgctcgtcctcgctaataatcatctgaacgcaatagaggagcccgacgacagccttgccagattgttcccaaatctgcgatccatcagtttacacaaatccggattacagagttgggaggatatcgataagctgaatagttttcctaagctcgaggaggtccgccttctggggatcccgctcttgcagccctacactacggaggagcggagaaaactggttattgctagactcccttctgttagcaaactgaacgggagcgtggtgacagacggcgagcgcgaagattccgagaggttcttcatcagatactacgtggacgtgcctcaagaggaagttcctttccgttaccacgagctcattactaagtatggaaagctggagcctctcgcagaggtggatctcagaccccaatcttcagccaaggtggaagtccattttaatgaccaggtggaggaaatgtcaatccgcttggaccaaactgtggccgaactgaagaagcagctgaaaaccctcgttcagcttcccacatccaacatgttgctgtattacttcgatcacgaggcccctttcgggcctgaagaaatgaaatactctagtcgagccctgcactcatttggcatacgagatggggacaagatctacgtggagtcgaaaaccaaatag

SEQ ID NO: 47311 - DNA, 1375 bp, Artificial Sequence
  derived and/or modified sequence
gtcacgtgttgttgttgggccgggaaagctgcttccgggtcaatgcaggacactgggctccggcggccagagtgggggactagcattttaagaaagaaagatggatcaacctagtggaagaagtttcatgcaagtattatgtgaaaaatatagtcctgaaaattttccttatcgccgtggcccggggatgggagtccatgtcccagccacacctcagggctctcctatgaaagatcgcctcaacctcccaagtgtactagtgttgaacagctgtggaataacctgtgcaggagatgaaaaagaaattgctgctttctgcgctcatgtgtcggaactagatctttctgacaacaaactcgaagactggcatgaggtcagtaaaattgtgtcaaatgttcctcagttggagtttctaaacctgagttccaaccctctgaatttgtcggttttagaaagaacatgtgctgggtccttctctggggttcgcaaacttgtcctcaacaacagcaaagcttcttgggagacggtccacatgatactacaggagttaccagatttggaggagctcttcctgtgccttaatgactatgaaacagtgtcttgtccttctatttgctgtcattctcttaagctactacatataacagacaataacctccaagactggactgaaatacgaaagttaggagttatgtttccttcactggataccctcgtcctggccaacaatcatttgaatgctattgaggagcctgatgattcattggccaggttgtttcctaatcttcgatccatcagcctccacaagtcaggtttgcagtcctgggaagacattgataaactaaattcatttcccaaactggaagaagtgagattgttaggaattcctcttctgcagccatataccaccgaggagcgaaggaaattggtaatagccagattgccatcagtttccaaacttaatggcagcgttgttactgatggtgaacgagaagattctgagagattttttattcgttactatgtggatgttccacaggaagaagtgccattcaggtatcatgaactgatcactaaatatgggaagttggagcctttggcagaagtggacctaagaccccagagcagtgcaaaagtagaagtccactttaacgatcaggtggaagaaatgagcattcgtctggaccaaacagtggcagaactaaagaaacagttaaaaactctagtacaattacccacaagcaacatgcttctctactattttgaccatgaagcaccctttggcccagaggaaatgaagtacagctctcgggcattgcattcctttggcattagggatggagataaaatttacgtggaatccaaaacaaaataa

SEQ ID NO: 47312 - protein, 2068 aa, Artificial Sequence
  derived and/or modified sequence
MQADKCRTSSRSVKKELVIESPLQYKDAAQGEVEAESPGPVPAKPKLIEPLDYENVIVQKKTQILNDCLREMLLFPYDDFQTAILRRQGRYICSTVPAKAEEEAQSLFVTECIKTYNSDWHLVNYKYEDYSGEFRQLPNKVVKLDKLPVHVYEVDEEVDKDEDAASLGSQKGGITKHGWLYKGNMNSAISVTMRSFKRRFFHLIQLGDGSYNLNFYKDEKISKEPKGSIFLDSCMGVVQNNKVRRFAFELKMQDKSSYLLAADSEVEMEEWITILNKILQLNFEAAMQEKRNGDSHEDDEQSKLEGSGSGLDSYLPELAKSAREAEIKLKSESRVKLFYLDPDAQKLDFSSAEPEVKSFEEKFGKRILVKCNDLSFNLQCCVAENEEGPTTNVEPFFVTLSLFDIKYNRKISADFHVDLNHFSVRQMLATTSPALMNGSGQSPSVLKGILHEAAMQYPKQGIFSVTCPHPDIFLVARIEKVLQGSITHCAEPYMKSSDSSKVAQKVLKNAKQACQRLGQYRMPFAWAARTLFKDASGNLDKNARFSAIYRQDSNKLSNDDMLKLLADFRKPEKMAKLPVILGNLDITIDNVSSDFPNYVNSSYIPTKQFETCSKTPITFEVEEFVPCIPKHTQPYTIYTNHLYVYPKYLKYDSQKSFAKARNIAICIEFKDSDEEDSQPLKCIYGRPGGPVFTRSAFAAVLHHHQNPEFYDEIKIELPTQLHEKHHLLLTFFHVSCDNSSKGSTKKRDVVETQVGYSWLPLLKDGRVVTSEQHIPVSANLPSGYLGYQELGMGRHYGPEIKWVDGGKPLLKISTHLVSTVYTQDQHLHNFFQYCQKTESGAQALGNELVKYLKSLHAMEGHVMIAFLPTILNQLFRVLTRATQEEVAVNVTRVIIHVVAQCHEEGLESHLRSYVKYAYKAEPYVASEYKTVHEELTKSMTTILKPSADFLTSNKLLKYSWFFFDVLIKSMAQHLIENSKVKLLRNQRFPASYHHAVETVVNMLMPHITQKFRDNPEASKNANHSLAVFIKRCFTFMDRGFVFKQINNYISCFAPGDPKTLFEYKFEFLRVVCNHEHYIPLNLPMPFGKGRIQRYQDLQLDYSLTDEFCRNHFLVGLLLREVGTALQEFREVRLIAISVLKNLLIKHSFDDRYASRSHQARIATLYLPLFGLLIENVQRINVRDVSPFPVNAGMTVKDESLALPAVNPLVTPQKGSTLDNSLHKDLLGAISGIASPYTTSTPNINSVRNADSRGSLISTDSGNSLPERNSEKSNSLDKHQQSSTLGNSVVRCDKLDQSEIKSLLMCFLYILKSMSDDALFTYWNKASTSELMDFFTISEVCLHQFQYMGKRYIARTGMMHARLQQLGSLDNSLTFNHSYGHSDADVLHQSLLEANIATEVCLTALDTLSLFTLAFKNQLLADHGHNPLMKKVFDVYLCFLQKHQSETALKNVFTALRSLIYKFPSTFYEGRADMCAALCYEILKCCNSKLSSIRTEASQLLYFLMRNNFDYTGKKSFVRTHLQVIISVSQLIADVVGIGGTRFQQSLSIINNCANSDRLIKHTSFSSDVKDLTKRIRTVLMATAQMKEHENDPEMLVDLQYSLAKSYASTPELRKTWLDSMARIHVKNGDLSEAAMCYVHVTALVAEYLTRKEAVQWEPPLLPHSHSACLRRSRGGVFRQGCTAFRVITPNIDEEASMMEDVGMQDVHFNEDVLMELLEQCADGLWKAERYELIADIYKLIIPIYEKRRDFERLAHLYDTLHRAYSKVTEVMHSGRRLLGTYFRVAFFGQAAQYQFTDSETDVEGFFEDEDGKEYIYKEPKLTPLSEISQRLLKLYSDKFGSENVKMIQDSGKVNPKDLDSKYAYIQVTHVIPFFDEKELQERKTEFERSHNIRRFMFEMPFTQTGKRQGGVEEQCKRRTILTAIHCFPYVKKRIPVMYQHHTDLNPIEVAIDEMSKKVAELRQLCSSAEVDMIKLQLKLQGSVSVQVNAGPLAYARAFLDDTNTKRYPDNKVKLLKEVFRQFVEACGQALAVNERLIKEDQLEYQEEMKANYREMAKELSEIMHEQLG

SEQ ID NO: 47313 - DNA, 6207 bp, Artificial Sequence
  derived and/or modified sequence
atgcaggccgacaagtgcagaaccagcagcagaagcgtgaagaaggagctggtgatcgagagccccctgcagtacaaggacgccgcccagggcgaggtggaggccgagagccccggccccgtgcccgccaagcccaagctgatcgagcccctggactacgagaacgtgatcgtgcagaagaagacccagatcctgaacgactgcctgagagagatgctgctgttcccctacgacgacttccagaccgccatcctgagaagacagggcagatacatctgcagcaccgtgcccgccaaggccgaggaggaggcccagagcctgttcgtgaccgagtgcatcaagacctacaacagcgactggcacctggtgaactacaagtacgaggactacagcggcgagttcagacagctgcccaacaaggtggtgaagctggacaagctgcccgtgcacgtgtacgaggtggacgaggaggtggacaaggacgaggacgccgccagcctgggcagccagaagggcggcatcaccaagcacggctggctgtacaagggcaacatgaacagcgccatcagcgtgaccatgagaagcttcaagagaagattcttccacctgatccagctgggcgacggcagctacaacctgaacttctacaaggacgagaagatcagcaaggagcccaagggcagcatcttcctggacagctgcatgggcgtggtgcagaacaacaaggtgagaagattcgccttcgagctgaagatgcaggacaagagcagctacctgctggccgccgacagcgaggtggagatggaggagtggatcaccatcctgaacaagatcctgcagctgaacttcgaggccgccatgcaggagaagagaaacggcgacagccacgaggacgacgagcagagcaagctggagggcagcggcagcggcctggacagctacctgcccgagctggccaagagcgccagagaggccgagatcaagctgaagagcgagagcagagtgaagctgttctacctggaccccgacgcccagaagctggacttcagcagcgccgagcccgaggtgaagagcttcgaggagaagttcggcaagagaatcctggtgaagtgcaacgacctgagcttcaacctgcagtgctgcgtggccgagaacgaggagggccccaccaccaacgtggagcccttcttcgtgaccctgagcctgttcgacatcaagtacaacagaaagatcagcgccgacttccacgtggacctgaaccacttcagcgtgagacagatgctggccaccaccagccccgccctgatgaacggcagcggccagagccccagcgtgctgaagggcatcctgcacgaggccgccatgcagtaccccaagcagggcatcttcagcgtgacctgcccccaccccgacatcttcctggtggccagaatcgagaaggtgctgcagggcagcatcacccactgcgccgagccctacatgaagagcagcgacagcagcaaggtggcccagaaggtgctgaagaacgccaagcaggcctgccagagactgggccagtacagaatgcccttcgcctgggccgccagaaccctgttcaaggacgccagcggcaacctggacaagaacgccagattcagcgccatctacagacaggacagcaacaagctgagcaacgacgacatgctgaagctgctggccgacttcagaaagcccgagaagatggccaagctgcccgtgatcctgggcaacctggacatcaccatcgacaacgtgagcagcgacttccccaactacgtgaacagcagctacatccccaccaagcagttcgagacctgcagcaagacccccatcaccttcgaggtggaggagttcgtgccctgcatccccaagcacacccagccctacaccatctacaccaaccacctgtacgtgtaccccaagtacctgaagtacgacagccagaagagcttcgccaaggccagaaacatcgccatctgcatcgagttcaaggacagcgacgaggaggacagccagcccctgaagtgcatctacggcagacccggcggccccgtgttcaccagaagcgccttcgccgccgtgctgcaccaccaccagaaccccgagttctacgacgagatcaagatcgagctgcccacccagctgcacgagaagcaccacctgctgctgaccttcttccacgtgagctgcgacaacagcagcaagggcagcaccaagaagagagacgtggtggagacccaggtgggctacagctggctgcccctgctgaaggacggcagagtggtgaccagcgagcagcacatccccgtgagcgccaacctgcccagcggctacctgggctaccaggagctgggcatgggcagacactacggccccgagatcaagtgggtggacggcggcaagcccctgctgaagatcagcacccacctggtgagcaccgtgtacacccaggaccagcacctgcacaacttcttccagtactgccagaagaccgagagcggcgcccaggccctgggcaacgagctggtgaagtacctgaagagcctgcacgccatggagggccacgtgatgatcgccttcctgcccaccatcctgaaccagctgttcagagtgctgaccagagccacccaggaggaggtggccgtgaacgtgaccagagtgatcatccacgtggtggcccagtgccacgaggagggcctggagagccacctgagaagctacgtgaagtacgcctacaaggccgagccctacgtggccagcgagtacaagaccgtgcacgaggagctgaccaagagcatgaccaccatcctgaagcccagcgccgacttcctgaccagcaacaagctgctgaagtacagctggttcttcttcgacgtgctgatcaagagcatggcccagcacctgatcgagaacagcaaggtgaagctgctgagaaaccagagattccccgccagctaccaccacgccgtggagaccgtggtgaacatgctgatgccccacatcacccagaagttcagagacaaccccgaggccagcaagaacgccaaccacagcctggccgtgttcatcaagagatgcttcaccttcatggacagaggcttcgtgttcaagcagatcaacaactacatcagctgcttcgcccccggcgaccccaagaccctgttcgagtacaagttcgagttcctgagagtggtgtgcaaccacgagcactacatccccctgaacctgcccatgcccttcggcaagggcagaatccagagataccaggacctgcagctggactacagcctgaccgacgagttctgcagaaaccacttcctggtgggcctgctgctgagagaggtgggcaccgccctgcaggagttcagagaggtgagactgatcgccatcagcgtgctgaagaacctgctgatcaagcacagcttcgacgacagatacgccagcagaagccaccaggccagaatcgccaccctgtacctgcccctgttcggcctgctgatcgagaacgtgcagagaatcaacgtgagagacgtgagccccttccccgtgaacgccggcatgaccgtgaaggacgagagcctggccctgcccgccgtgaaccccctggtgaccccccagaagggcagcaccctggacaacagcctgcacaaggacctgctgggcgccatcagcggcatcgccagcccctacaccaccagcacccccaacatcaacagcgtgagaaacgccgacagcagaggcagcctgatcagcaccgacagcggcaacagcctgcccgagagaaacagcgagaagagcaacagcctggacaagcaccagcagagcagcaccctgggcaacagcgtggtgagatgcgacaagctggaccagagcgagatcaagagcctgctgatgtgcttcctgtacatcctgaagagcatgagcgacgacgccctgttcacctactggaacaaggccagcaccagcgagctgatggacttcttcaccatcagcgaggtgtgcctgcaccagttccagtacatgggcaagagatacatcgccagaaccggcatgatgcacgccagactgcagcagctgggcagcctggacaacagcctgaccttcaaccacagctacggccacagcgacgccgacgtgctgcaccagagcctgctggaggccaacatcgccaccgaggtgtgcctgaccgccctggacaccctgagcctgttcaccctggccttcaagaaccagctgctggccgaccacggccacaaccccctgatgaagaaggtgttcgacgtgtacctgtgcttcctgcagaagcaccagagcgagaccgccctgaagaacgtgttcaccgccctgagaagcctgatctacaagttccccagcaccttctacgagggcagagccgacatgtgcgccgccctgtgctacgagatcctgaagtgctgcaacagcaagctgagcagcatcagaaccgaggccagccagctgctgtacttcctgatgagaaacaacttcgactacaccggcaagaagagcttcgtgagaacccacctgcaggtgatcatcagcgtgagccagctgatcgccgacgtggtgggcatcggcggcaccagattccagcagagcctgagcatcatcaacaactgcgccaacagcgacagactgatcaagcacaccagcttcagcagcgacgtgaaggacctgaccaagagaatcagaaccgtgctgatggccaccgcccagatgaaggagcacgagaacgaccccgagatgctggtggacctgcagtacagcctggccaagagctacgccagcacccccgagctgagaaagacctggctggacagcatggccagaatccacgtgaagaacggcgacctgagcgaggccgccatgtgctacgtgcacgtgaccgccctggtggccgagtacctgaccagaaaggaggccgtgcagtgggagccccccctgctgccccacagccacagcgcctgcctgagaagaagcagaggcggcgtgttcagacagggctgcaccgccttcagagtgatcacccccaacatcgacgaggaggccagcatgatggaggacgtgggcatgcaggacgtgcacttcaacgaggacgtgctgatggagctgctggagcagtgcgccgacggcctgtggaaggccgagagatacgagctgatcgccgacatctacaagctgatcatccccatctacgagaagagaagagacttcgagagactggcccacctgtacgacaccctgcacagagcctacagcaaggtgaccgaggtgatgcacagcggcagaagactgctgggcacctacttcagagtggccttcttcggccaggccgcccagtaccagttcaccgacagcgagaccgacgtggagggcttcttcgaggacgaggacggcaaggagtacatctacaaggagcccaagctgacccccctgagcgagatcagccagagactgctgaagctgtacagcgacaagttcggcagcgagaacgtgaagatgatccaggacagcggcaaggtgaaccccaaggacctggacagcaagtacgcctacatccaggtgacccacgtgatccccttcttcgacgagaaggagctgcaggagagaaagaccgagttcgagagaagccacaacatcagaagattcatgttcgagatgcccttcacccagaccggcaagagacagggcggcgtggaggagcagtgcaagagaagaaccatcctgaccgccatccactgcttcccctacgtgaagaagagaatccccgtgatgtaccagcaccacaccgacctgaaccccatcgaggtggccatcgacgagatgagcaagaaggtggccgagctgagacagctgtgcagcagcgccgaggtggacatgatcaagctgcagctgaagctgcagggcagcgtgagcgtgcaggtgaacgccggccccctggcctacgccagagccttcctggacgacaccaacaccaagagataccccgacaacaaggtgaagctgctgaaggaggtgttcagacagttcgtggaggcctgcggccaggccctggccgtgaacgagagactgatcaaggaggaccagctggagtaccaggaggagatgaaggccaactacagagagatggccaaggagctgagcgagatcatgcacgagcagctgggctag

SEQ ID NO: 47314 - DNA, 7549 bp, Artificial Sequence
  derived and/or modified sequence
ctggcatgcctgtgccttgcacggccagggactcgcagctgttccagttgcagactttctgacttgcgttttcagccgagaatgcaggctgataaatgcaggacaagtagtagaagtgtcaaaaaggaactggtgattgagtcccccctgcaatacaaggatgcagctcagggcgaagtggaagcagagagcccgggccctgtgccggcaaagccaaagctaattgagccactcgactatgaaaatgtcatcgtccagaagaagactcagatcctgaacgactgtttacgggagatgctgctcttcccttacgatgactttcagacggccatcctgagacgacagggtcgatacatatgctcaacagtgcctgcgaaggcggaagaggaagcacagagcttgtttgttacagagtgcatcaaaacctataactctgactggcatcttgtgaactataaatatgaagattactcaggagagtttcgacagcttccgaacaaagtggtcaagttggataaacttccagttcatgtctatgaagttgacgaggaggtcgacaaagatgaggatgctgcctcccttggttcccagaagggtgggatcaccaagcatggctggctgtacaaaggcaacatgaacagtgccatcagcgtgaccatgaggtcatttaagagacgatttttccacctgattcaacttggcgatggatcctataatttgaatttttataaagatgaaaagatctccaaagaaccaaaaggatcaatatttctggattcctgtatgggtgtcgttcagaacaacaaagtcaggcgttttgcttttgagctcaagatgcaggacaaaagtagttatctcttggcagcagacagtgaagtggaaatggaagaatggatcacaattctaaataagatcctccagctcaactttgaagctgcaatgcaagaaaagcgaaatggcgactctcacgaagatgatgaacaaagcaaattggaaggttctggttccggtttagatagctacctgccggaacttgccaagagtgcaagagaagcagaaatcaaactgaaaagtgaaagcagagtcaaacttttttatttggacccagatgcccagaagcttgacttctcatcagctgagccagaagtgaagtcatttgaagagaagtttggaaaaaggatccttgtcaagtgcaatgatttatctttcaatttgcaatgctgtgttgccgaaaatgaagaaggacccactacaaatgttgaacctttctttgttactctatccctgtttgacataaaatacaaccggaagatttctgccgatttccacgtagacctgaaccatttctcagtgaggcaaatgctcgccaccacgtccccggcgctgatgaatggcagtgggcagagcccatctgtcctcaagggcatccttcatgaagccgccatgcagtatccgaagcagggaatattttcagtcacttgtcctcatccagatatatttcttgtggccagaattgaaaaagtccttcaggggagcatcacacattgcgctgagccatatatgaaaagttcagactcttctaaggtggcccagaaggtgctgaagaatgccaagcaggcatgccaaagactaggacagtatagaatgccatttgcttgggcagcaaggacattgtttaaggatgcatctggaaatcttgacaaaaatgccagattttctgccatctacaggcaagacagcaataagctatccaatgatgacatgctcaagttacttgcagactttcggaaacctgagaagatggctaagctcccagtgattttaggcaatctagacattacaattgataatgtttcctcagacttccctaattatgttaattcatcatacattcccacaaaacaatttgaaacctgcagtaaaactcccatcacgtttgaagtggaggaatttgtgccctgcataccaaaacacactcagccttacaccatctacaccaatcacctttacgtttatcctaagtacttgaaatacgacagtcagaagtcttttgccaaggctagaaatattgcgatttgcattgaattcaaagattcagatgaggaagactctcagccccttaagtgcatttatggcagacctggtgggccagttttcacaagaagcgcctttgctgcagttttacaccatcaccaaaacccagaattttatgatgagattaaaatagagttgcccactcagctgcatgaaaagcaccacctgttgctcacattcttccatgtcagctgtgacaactcaagtaaaggaagcacgaagaagagggatgtcgttgaaacccaagttggctactcctggcttcccctcctgaaagacggaagggtggtgacaagcgagcagcacatcccggtctcggcgaaccttccttcgggctatcttggctaccaggagcttgggatgggcaggcattatggtccggaaattaaatgggtagatggaggcaagccactgctgaaaatttccactcatctggtttctacagtgtatactcaggatcagcatttacataattttttccagtactgtcagaaaaccgaatctggagcccaagccttaggaaacgaacttgtaaagtaccttaagagtctgcatgcgatggaaggccacgtgatgatcgccttcttgcccactatcctaaaccagctgttccgagtcctcaccagagccacacaggaagaagtcgcggttaacgtgactcgggtcattattcatgtggttgcccagtgccatgaggaaggattggagagccacttgaggtcatatgttaagtacgcgtataaggctgagccatatgttgcctctgaatacaagacagtgcatgaagaactgaccaaatccatgaccacgattctcaagccttctgccgatttcctcaccagcaacaaactactgaagtactcatggtttttctttgatgtactgatcaaatctatggctcagcatttgatagagaactccaaagttaagttgctgcgaaaccagagatttcctgcatcctatcatcatgcagtggaaaccgttgtaaatatgctgatgccacacatcactcagaagtttcgagataatccagaggcatctaagaacgcgaatcatagccttgctgtcttcatcaagagatgtttcaccttcatggacaggggctttgtcttcaagcagatcaacaactacattagctgttttgctcctggagacccaaagaccctctttgaatacaagtttgaatttctccgtgtagtgtgcaaccatgaacattatattccgttgaacttaccaatgccatttggaaaaggcaggattcaaagataccaagacctccagcttgactactcattaacagatgagttctgcagaaaccacttcttggtgggactgttactgagggaggtggggacagccctccaggagttccgggaggtccgtctgatcgccatcagtgtgctcaagaacctgctgataaagcattcttttgatgacagatatgcttcaaggagccatcaggcaaggatagccaccctctacctgcctctgtttggtctgctgattgaaaacgtccagcggatcaatgtgagggatgtgtcacccttccctgtgaacgcgggcatgactgtgaaggatgaatccctggctctaccagctgtgaatccgctggtgacgccgcagaagggaagcaccctggacaacagcctgcacaaggacctgctgggcgccatctccggcattgcttctccatatacaacctcaactccaaacatcaacagtgtgagaaatgctgattcgagaggatctctcataagcacagattcgggtaacagccttccagaaaggaatagtgagaagagcaattccctggataagcaccaacaaagtagcacattgggaaattccgtggttcgctgtgataaacttgaccagtctgagattaagagcctactgatgtgtttcctctacatcttaaagagcatgtctgatgatgctttgtttacatattggaacaaggcttcaacatctgaacttatggatttttttacaatatctgaagtctgcctgcaccagttccagtacatggggaagcgatacatagccagaacaggaatgatgcatgccagattgcagcagctgggcagcctggataactctctcacttttaaccacagctatggccactcggacgcagatgttctgcaccagtcattacttgaagccaacattgctactgaggtttgcctgacagctctggacacgctttctctatttacattggcgtttaagaaccagctcctggccgaccatggacataatcctctcatgaaaaaagtttttgatgtctacctgtgttttcttcaaaaacatcagtctgaaacggctttaaaaaatgtcttcactgccttaaggtccttaatttataagtttccctcaacattctatgaagggagagcggacatgtgtgcggctctgtgttacgagattctcaagtgctgtaactccaagctgagctccatcaggacggaggcctcccagctgctctacttcctgatgaggaacaactttgattacactggaaagaagtcctttgtccggacacatttgcaagtcatcatatctgtcagccagctgatagcagacgttgttggcattgggggaaccagattccagcagtccctgtccatcatcaacaactgtgccaacagtgaccggcttattaagcacaccagcttctcctctgatgtgaaggacttaaccaaaaggatacgcacggtgctaatggccaccgcccagatgaaggagcatgagaacgacccagagatgctggtggacctccagtacagcctggccaaatcctatgccagcacgcccgagctcaggaagacgtggctcgacagcatggccaggatccatgtcaaaaatggcgatctctcagaggcagcaatgtgctatgtccacgtaacagccctagtggcagaatatctcacacggaaagaagcagtccagtgggagccgccccttctcccccacagccatagcgcctgcctgaggaggagccggggaggcgtgtttagacaaggatgcaccgccttcagggtcattaccccaaacatcgacgaggaggcctccatgatggaagacgtggggatgcaggatgtccatttcaacgaggatgtgctgatggagctccttgagcagtgcgcagatggactctggaaagccgagcgctacgagctcatcgccgacatctacaaacttatcatccccatttatgagaagcggagggattttgagaggctggcccatctgtatgacacgctgcaccgggcctacagcaaagtgaccgaggtcatgcactcgggccgcaggcttctggggacctacttccgggtagccttcttcgggcaggcagcgcaataccagtttacagacagtgaaacagatgtggagggattctttgaagatgaagatggaaaggagtatatttacaaggaacccaaactcacaccgctgtcggaaatttctcagagactccttaaactgtactcggataaatttggttctgaaaatgtcaaaatgatacaggattctggcaaggtcaaccctaaggatctggattctaagtatgcatacatccaggtgactcacgtcatccccttctttgacgaaaaagagttgcaagaaaggaaaacagagtttgagagatcccacaacatccgccgcttcatgtttgagatgccatttacgcagaccgggaagaggcagggcggggtggaagagcagtgcaaacggcgcaccatcctgacagccatacactgcttcccttatgtgaagaagcgcatccctgtcatgtaccagcaccacactgacctgaaccccatcgaggtggccattgacgagatgagtaagaaggtggcggagctccggcagctgtgctcctcggccgaggtggacatgatcaaactgcagctcaaactccagggcagcgtgagtgttcaggtcaatgctggcccactagcatatgcgcgagctttcttagatgatacaaacacaaagcgatatcctgacaataaagtgaagctgcttaaggaagttttcaggcaatttgtggaagcttgcggtcaagccttagcggtaaacgaacgtctgattaaagaagaccagctcgagtatcaggaagaaatgaaagccaactacagggaaatggcgaaggagctttctgaaatcatgcatgagcagctgggatgatctgccccctggaggagaagacgagcgtcttaccgaattcccttcacatcttcaacgccatcagtgggactccaacaagcacaatggttcacgggatgaccagctcgtcttcggtcgtgtgattacatctcatggcccgtgtgtggggacttgctttgtcatttgcaaactcaggatgctttccaaagccaatcactggggagaccgagcacagggaggaccaaggggaaggggagagaaaggaaataaagaacaacgttatttcttaacagactttctataggagttgtaagaaggtgcacatatttttttaaatctcactggcaatattcaaagttttcattgtgtcttaacaaaggtgtggtagacactcttgagctggacttagattttattcttccttgcagagtagtgttagaatagatggcctacagaaaaaaaaggttctgggatctacatggcagggagggctgcactgacattgatgcctgggggaccttttgcctcgaggctgagctggaaaatcttgaaaatattttttttttcctgtggcacattcaggttgaatacaagaactatttttgtgactagtttttgatgacctaagggaactgaccattgtaatttttgtaccagtgaaccaggagatttagtgcttttatattcatttccttgcatttaagaaaatatgaaagcttaaggaattatgtgagcttaaaactagtcaagcagtttagaaccaaaggcctatattaataaccgcaactatgctgaaaagtacaaagtagtacagtatattgttatgtacatatcattgttaatacagtcctggcattctgtacatatatgtattacatttctacatttttaatactcacatgggcttatgcattaagtttaattgtgataaatttgtgctgttccagtatatgcaatacactttaatgttttattcttgtacataaaaatgtgcaatatggagatgtatacagtctttactatattaggtttataaacagttttaagaatttcatccttttgccaaaatggtggagtatgtaattggtaaatcataaatcctgtggtgaatggtggtgtactttaaagctgtcaccatgttatattttcttttaagactttaatttagtaattttatatttgggaaaataaaggtttttaattttatttaactggaatcactgccctgctgtaattaaacattctgtaccacatctgtattaaaaagacattgctgaccatt

SEQ ID NO: 47315 - DNA, 6207 bp, Artificial Sequence
  derived and/or modified sequence
atgcaagccgacaagtgtcgcaccagttcccgaagcgtcaagaaagagcttgtcatcgaaagtcccctgcaatacaaggacgcagcccaaggtgaagtggaagcggagtcccccgggccggttccggctaagcctaaactcatcgagccgctggactacgaaaacgtgattgtgcagaagaaaacacagattctcaacgattgcctgcgagagatgttactttttccctacgacgacttccagaccgctattctccgcagacagggcaggtacatctgctctaccgtccccgcaaaggctgaagaagaagcgcagagtctttttgtaactgagtgtatcaagacatataactctgattggcacttggtcaattataagtacgaagattatagcggcgagttcaggcaattacccaataaagtcgtgaagcttgataaactgccagttcacgtgtacgaggtggatgaagaggtggataaagacgaagacgccgcatcgcttggcagtcaaaaagggggcatcactaagcatggttggctgtacaaggggaatatgaactccgccatcagcgtaaccatgagatcatttaagcggcgcttcttccatttgattcagctaggagatggatcctacaacctcaatttttataaagatgagaagatttccaaagagccaaaaggctccatcttcctggattcctgtatgggcgtggtgcagaacaacaaagtgcgcaggtttgccttcgagcttaagatgcaggacaagtcgtcttacctgctggcagccgattcagaggttgagatggaggaatggatcacaattttgaacaaaattttgcagcttaatttcgaggcagccatgcaagaaaaacgtaatggagactcccatgaggatgacgagcagtccaagctggagggcagcggaagcgggctcgacagctacttaccggaactcgctaagtcggctcgagaggctgagatcaaactgaagtccgagtcccgcgtgaagctgttttacctggacccagacgcgcagaagctcgatttctcctcagcagagccggaagtcaagagctttgaggagaaatttggaaagaggatccttgtcaaatgtaacgacctctcctttaacctccagtgttgtgttgctgagaacgaagagggccccactacgaacgtggagccatttttcgtgaccctgtcattatttgacatcaaatataaccgcaagatcagtgctgattttcacgtcgatctcaaccatttcagtgtaagacagatgctggccacaacgtcacccgccctgatgaacggctccggtcaatcaccgtctgtgctgaagggtatcctgcatgaggctgcgatgcagtaccctaagcagggaattttctccgtcacttgccctcatcccgatatttttcttgtggcgagaatcgaaaaggtattgcagggctcgatcacgcactgtgccgaaccttacatgaagagcagcgattcctctaaggtggcacagaaggtgctgaagaacgcgaaacaggcttgtcagaggctgggccagtacaggatgcctttcgcttgggccgcccgcacgctttttaaggatgcttcggggaacctggacaagaatgcacgattcagcgccatttaccgccaggattccaataaattatcaaacgatgacatgttgaagctccttgccgattttcggaagcctgaaaagatggccaagctccccgtgatcctcggcaatctggacataacgatagacaacgttagctctgactttcccaactacgtaaactctagctacatcccgaccaagcaattcgagacttgtagtaaaacacctatcacgttcgaagttgaggagttcgtcccatgtataccgaagcacactcaaccttacaccatttatacaaatcatctctacgtctaccctaagtatctgaagtacgatagccagaaatcctttgctaaggcgcgcaacattgctatctgcatagaattcaaggacagcgatgaagaagattcccaacctctgaaatgcatttatggaagacctggcggtcctgtcttcacgaggtccgcgtttgccgccgtacttcaccatcatcagaaccctgaattttatgacgagataaagatcgagcttcccacccagttgcacgagaagcaccatctcctcctgacatttttccatgtaagctgcgacaacagctcaaaaggaagcacaaagaaacgagatgttgtcgagacccaagtgggttactcctggctgccactcctgaaagatgggagagtggtaaccagcgagcagcacattcctgtatccgccaacctccccagcgggtacctgggataccaagagctggggatgggccggcattatgggcccgaaatcaagtgggtggacggcggcaagcccttgctgaagatcagcacccacctggtgtccacagtgtatactcaagatcaacatttgcataacttcttccagtattgccagaaaacggagagtggagcgcaggcacttggaaacgaactggtaaagtacctcaagtccctacatgcgatggaaggacacgtgatgatcgcgttcctgccaacgattctgaaccagctgttccgagtcctgaccagagccacacaggaggaagtcgcagtcaacgtgacacgcgtcatcatccacgtggtagctcaatgccatgaggaaggcctggaaagccatctgagaagttacgttaaatatgcttataaagcggaaccttacgtcgcctcagaatataagaccgtccatgaggaactcactaagtcaatgacaactatcttgaaaccctccgcagacttcctaacaagcaataagctcctgaagtacagctggttttttttcgacgtgctcataaagagcatggcccaacacttgatcgagaactctaaggtgaaactgctgcggaaccagcgattcccagctagctatcaccacgccgttgaaacagtggttaacatgctgatgccgcacataacacagaagtttcgggacaatcccgaagccagtaaaaacgctaatcattcccttgcagttttcatcaaaagatgtttcaccttcatggatcgcggcttcgtgtttaaacagatcaacaattatatctcgtgctttgccccaggcgacccgaagactttatttgagtataaatttgagttcctgagagtggtgtgcaaccacgagcactatatcccacttaacctgccgatgccgtttggaaaaggacgcatccagcggtaccaggatctgcagcttgactattccctgacagacgagttctgtagaaaccacttcctggtgggcctcctccttcgagaggtgggcacggctctgcaagagttcagggaagtacggctgatagccatctcagtactgaagaatctcctgatcaaacacagctttgacgatcggtacgcgtctaggtcccaccaagccagaattgcaacattgtatctcccacttttcgggctgttaatagagaatgtgcaacgtatcaacgtgcgagatgtcagcccatttcctgttaatgctgggatgactgtaaaagatgaatccctcgccctgcctgcagtcaaccctttagtgaccccgcagaagggctccacactggataattcacttcataaggatctgttgggtgcaatatccggtatcgctagcccctacaccacttccaccccaaatatcaactctgttcgaaatgccgattccaggggttctcttatatctacagacagcggcaactctctaccagagcgcaattcagaaaaaagtaactctctcgacaaacaccagcaatctagtacactcggcaattccgtggtgcggtgtgataagctagaccagagcgaaattaaaagcttgctgatgtgtttcctctatatccttaaatccatgagtgacgatgccctctttacatactggaacaaggcctcaaccagtgagttaatggacttctttaccatttcggaagtctgcctgcaccagtttcagtacatgggcaagcggtatattgcccggactggaatgatgcatgcccggctccagcagctcggaagtctcgataatagtttgacatttaatcattcgtatggtcattccgatgccgatgtgcttcaccaaagccttctcgaagctaatatagcgactgaggtgtgcttaacagctttggatactctgagcctgttcacccttgcctttaagaaccagctgttagctgaccatgggcacaaccccttgatgaagaaggtgtttgatgtttacctctgctttctgcagaagcatcagagcgaaacagctctgaagaatgtgtttaccgcgttgcggagcctcatttacaaattccccagtaccttctacgagggaagggccgatatgtgtgcagcattgtgctacgaaatcctcaaatgttgcaatagtaaactaagtagtattagaaccgaagctagtcagctgctatacttcctgatgcggaacaattttgactacactggaaaaaagtcatttgtccgcacacatctgcaggtgattatttccgtgagccaactgattgctgacgttgtcggcataggcggcaccaggttccagcagagtctgagtatcataaataactgcgctaactctgatcgactcattaagcacaccagtttcagctcggacgttaaggatctcacaaagcggataagaaccgtcctcatggctacggcccagatgaaggagcacgagaatgatcctgaaatgctggtggatttgcaatattccctggccaagtcttacgcatcgacccccgaactgaggaagacctggttggactccatggcccgcatccatgtcaagaacggagacttgtcagaggcagccatgtgctatgtacacgtgacagcactggtggccgaataccttacaaggaaagaagctgtccagtgggagcctccactcctcccgcactcccatagcgcctgtctcaggagaagccgcggaggggtctttcgacaaggctgcaccgcgtttcgagtcatcaccccaaatatcgatgaagaggcttcgatgatggaggatgtggggatgcaagatgttcacttcaatgaggacgtgcttatggaactcctcgaacagtgtgcggatggtctgtggaaagcggaacgctacgaattgattgccgacatttacaagctgattatccccatttatgaaaagaggagagattttgaacggctcgcccatctgtacgacaccctgcaccgtgcatattccaaggtcacagaggtaatgcactcaggacggaggctcctgggtacctactttagggttgcattctttgggcaggcagcccaataccagttcacggacagcgaaactgatgtagaggggttctttgaagatgaggacggtaaggagtatatttacaaagaaccaaaactgacacccctgtccgaaataagccagagactgctgaaactctattccgacaaatttggatccgaaaacgttaagatgattcaggattcggggaaagtcaatcccaaagacctcgatagcaaatacgcatatatccaggtcacccatgtaatcccatttttcgatgaaaaggagctacaggagcggaagaccgaattcgaaagatcccataacattcggcggttcatgtttgaaatgccatttacacaaaccggtaagcggcaggggggagtggaggaacagtgcaaacgccgtacaatcctcaccgctatccattgttttccctatgtaaagaaaagaatccccgtgatgtaccagcatcataccgatctgaatccgatcgaagtggctatagacgaaatgtcaaagaaggtggcggaactgcggcagctgtgtagtagcgcagaggtcgacatgataaagctccagctgaagctacaggggtcagtgagtgtgcaggttaatgccggaccactggcctatgcccgcgccttccttgatgataccaacaccaagaggtacccagacaacaaagtgaaacttcttaaggaagtctttcgccagttcgtagaggcttgtgggcaagccttggctgtgaacgaacgactgattaaggaagaccagctggagtaccaggaggagatgaaggcaaactaccgcgaaatggcaaaagagctcagtgagattatgcacgagcagttgggctag

SEQ ID NO: 47316 - DNA, 6207 bp, Artificial Sequence
  derived and/or modified sequence
atgcaggccgacaagtgcaggaccagcagccgctctgtgaagaaggagctggtgattgagagccccctgcagtacaaggatgctgcccagggcgaggtggaggccgagagccctggccctgtgcctgccaagcccaagctgattgagcccctggactatgaaaatgtgattgtgcagaagaagacccagatcctgaatgactgcctgcgggagatgctgctcttcccctatgatgacttccagacagccatcctgcggcggcagggccgctacatctgcagcacagtgcctgccaaggccgaggaggaggcccagagcctgtttgtgacagagtgcatcaagacctacaacagcgactggcacctggtgaactacaagtatgaggactacagcggggagttccggcagctgcccaacaaggtggtgaagctggacaagctgcctgtgcacgtgtatgaggtggatgaggaggtggacaaggatgaagatgctgccagcctgggcagccagaagggcggcatcaccaagcacggctggctgtacaagggcaacatgaacagcgccatctctgtgaccatgaggagcttcaagaggcgcttcttccacctgatccagctgggagatggcagctacaacctgaacttctacaaggatgagaagatcagcaaggagcccaagggcagcatcttcctggacagctgcatgggcgtggtgcagaacaacaaggtgagaagatttgcctttgagctgaagatgcaggacaagagcagctacctgctggccgctgacagcgaggtggagatggaggagtggatcaccatcctgaacaagatcctgcagctgaactttgaagctgccatgcaggagaagagaaatggagacagccatgaagatgatgagcagagcaagctggagggcagcggcagcggcctggacagctacctgcctgagctggccaagagcgcccgggaggccgagatcaagctgaagtctgagagccgggtgaagctgttctacctggaccctgatgcccagaagctggacttcagcagcgctgagcctgaggtgaagagctttgaggagaagtttgggaagaggatcctggtgaagtgcaatgacctgtccttcaacctgcagtgctgcgtggccgagaatgaggagggccccaccaccaacgtggagcccttctttgtgaccctgagcctgtttgacatcaagtacaacaggaagatctctgctgacttccacgtggacctgaaccacttctctgtgcggcagatgctggccaccaccagccctgccctgatgaatggaagtggccagagccccagcgtgctgaagggcatcctgcatgaagctgccatgcagtaccccaagcagggcatcttctctgtgacctgcccccacccagacatcttcctggtggcccgcatcgagaaggtgctgcagggcagcatcacccactgtgccgagccctacatgaagagcagtgacagcagcaaggtggcccagaaggtgctgaagaatgccaagcaggcctgccagaggctgggccagtacaggatgccctttgcctgggccgcccggaccctcttcaaggatgccagcggcaacctggacaagaatgcccgcttcagcgccatctaccggcaggacagcaacaagctgagcaatgatgacatgctgaagctgctggccgacttcaggaagccagagaagatggccaagctgcccgtcatcctgggcaacctggacatcaccatcgacaacgtgtccagtgacttccccaactacgtgaacagcagctacatccccaccaagcagtttgagacctgcagcaagacccccatcacctttgaggtggaggagtttgtgccctgcatccccaagcacacccagccctacaccatctacaccaaccacctgtatgtgtaccccaagtacctgaagtatgacagccagaagagctttgccaaggccagaaatattgccatctgcatcgagttcaaggacagtgatgaggaggacagccagcccctgaagtgcatctacggccggcctgggggccctgtgttcaccaggtctgcctttgctgctgtgctgcaccaccaccagaaccctgagttctatgatgagatcaagattgagctgcccacccagctgcacgagaagcaccacctgctgctgaccttcttccacgtgtcctgtgacaacagcagcaagggcagcaccaagaagagagatgtggtggagacccaggtgggctacagctggctgcccctgctgaaggatggccgggtggtgaccagcgagcagcacatccctgtgtctgccaacctgcccagcggctacctgggctaccaggagctgggcatgggccgccactacggccctgagatcaagtgggtggatggcggcaagcccctgctgaagatcagcacccacctggtgtccacagtgtacacccaggaccagcacctgcacaacttcttccagtactgccagaagacagaaagtggggcccaggccctgggcaatgagctggtgaagtacctgaagagcctgcacgccatggagggccacgtgatgattgccttcctgcccaccatcctgaaccagctgttccgggtgctgacccgggccacccaggaggaggtggccgtgaatgtgaccagggtcatcatccacgtggtggcccagtgccacgaggagggcctggagagccacctgcggagctatgtgaagtatgcctacaaggccgagccctacgtggccagcgagtacaagacagtgcatgaggagctgaccaagtccatgaccaccatcctgaagcccagcgctgacttcctgaccagcaacaagctgctgaagtacagctggttcttctttgatgtgctgatcaagtccatggcccagcacctgattgagaacagcaaggtgaagctgctgaggaaccagcgcttccctgccagctaccaccacgctgtggagaccgtggtgaacatgctgatgccccacatcacccagaagttccgggacaaccctgaggccagcaagaatgccaaccacagcctggccgtgttcatcaagcgctgcttcaccttcatggaccggggctttgtgttcaagcagatcaacaactacatcagctgctttgcccctggggaccccaagaccctgtttgagtacaagtttgagttcctgcgggtggtgtgcaaccacgagcactacatccccctgaacctgcccatgccctttgggaagggccgcatccagcgctaccaggacctgcagctggactacagcctgacagatgagttctgcaggaaccacttcctggtgggcctgctgctgcgggaggtgggcacagccctgcaggagttccgggaggtgcggctcatcgccatctctgtgctgaagaacctgctgatcaagcacagctttgatgacagatatgccagccgcagccaccaggccagaattgccaccctgtacctgcccctgtttggcctgctgattgaaaatgtgcagaggatcaacgtgagagatgtgagccccttccctgtgaatgccggcatgacagtgaaggatgagagcctggccctgcctgctgtgaaccccctggtgaccccccagaagggcagcaccctggacaacagcctgcacaaggacctgctgggcgccatcagcggcatcgccagcccctacaccaccagcacccccaacatcaacagcgtgagaaatgctgacagccggggcagcctcatcagcacagacagcggcaacagcctgcctgagagaaattctgagaagagcaacagcctggacaagcaccagcagagcagcaccctgggcaacagcgtggtgcgctgtgacaagctggaccagagcgagatcaagagcctgctgatgtgcttcctgtacatcctgaagtccatgtctgatgatgccctcttcacctactggaacaaggccagcaccagcgagctgatggacttcttcaccatcagcgaggtgtgcctgcaccagttccagtacatgggcaagcgctacatcgccaggacaggcatgatgcacgcccggctgcagcagctgggcagcctggacaacagcctgaccttcaaccacagctatggccacagtgatgctgatgtgctgcaccagagcctgctggaggccaacatcgccacagaggtgtgcctgacagccctggacaccctgagcctcttcaccctggccttcaagaaccagctgctggccgaccacggccacaaccccctgatgaagaaggtgtttgatgtgtacctgtgcttcctgcagaagcaccagagcgagacagccctgaagaatgtgttcaccgccctgcggagcctcatctacaagttccccagcaccttctatgagggccgggctgacatgtgtgccgccctgtgctatgagatcctgaagtgctgcaacagcaagctgagcagcatcagaacagaggccagccagctgctgtacttcctgatgaggaacaactttgactacacaggcaagaagagctttgtgaggacccacctgcaggtgatcatctctgtgtcccagctgattgctgatgtggtgggcattggaggcacccgcttccagcagagcctgagcatcatcaacaactgtgccaacagcgacaggctcatcaagcacaccagcttcagcagtgatgtgaaggacctgaccaagaggatcagaacagtgctgatggccacagcccagatgaaggagcatgaaaatgaccctgagatgctggtggacctgcagtacagcctggccaagagctatgccagcaccccagagctgaggaagacctggctggacagcatggcccgcatccacgtgaagaatggagacctgtctgaggccgccatgtgctacgtgcacgtgacagccctggtggccgagtacctgaccaggaaggaggccgtgcagtgggagccccccctgctgccccacagccacagcgcctgcctgcggcgcagccggggcggcgtcttccggcagggctgcacagccttccgggtcatcacccccaacattgatgaggaggcctccatgatggaggatgtgggcatgcaggatgtgcacttcaatgaagatgtgctgatggagctgctggagcagtgtgctgatggcctgtggaaggccgagagatatgagctgattgctgacatctacaagctgatcatccccatctatgagaagagaagagactttgagcggctggcccacctgtatgacaccctgcaccgggcctacagcaaggtgacagaggtgatgcacagcggccgccgcctgctgggcacctacttccgggtggccttcttcggccaggccgcccagtaccagttcacagacagcgagacagatgtggagggcttctttgaagatgaagatggcaaggagtacatctacaaggagcccaagctgacccccctgtctgagatcagccagaggctgctgaagctgtacagcgacaagtttggaagtgaaaatgtgaagatgatccaggacagcggcaaggtgaaccccaaggacctggacagcaaatatgcctacatccaggtgacccacgtgatccccttctttgatgagaaggagctgcaggagaggaagacagaatttgagaggagccacaacatccgccgcttcatgtttgagatgcccttcacccagacaggcaagaggcagggcggcgtggaggagcagtgcaagaggaggaccatcctgacagccatccactgcttcccctacgtgaagaagagaattcctgtgatgtaccagcaccacacagacctgaaccccatcgaggtggccattgatgagatgagcaagaaggtggccgagctgcggcagctgtgcagcagcgctgaggtggacatgatcaagctgcagctgaagctgcagggctctgtgtctgtgcaggtgaatgccggccccctggcctatgcccgggccttcctggatgacaccaacaccaagcgctacccagacaacaaggtgaagctgctgaaggaggtgttccggcagtttgtggaggcctgtggccaggccctggccgtgaatgaaagactcatcaaggaggaccagctggagtaccaggaggagatgaaggccaactaccgggagatggccaaggagctgtctgagatcatgcatgagcagctgggctag

SEQ ID NO: 47317 - DNA, 6207 bp, Artificial Sequence
  derived and/or modified sequence
atgcaggccgacaagtgccggaccagcagccggagcgtgaagaaggaactcgtgattgagtccccactgcagtataaagacgccgcacagggagaggtggaggcggaaagtcctgggcccgtgccagccaaaccaaaattaatcgagccactcgactatgagaatgttattgtgcagaagaaaacacagatcctgaatgattgcctgcgggagatgttactgtttccgtatgatgactttcagactgctattttgagacgccagggccgctacatctgctccaccgtgcccgccaaagccgaagaagaggctcagagtttgttcgttactgagtgcattaaaacctacaattctgactggcaccttgtgaattataagtacgaggattacagcggcgagtttcgccagctgcctaacaaggtggtgaaattggacaagcttccagttcacgtctatgaggttgacgaagaagtggacaaagatgaagatgcggcaagcctgggaagccagaaaggtggcattaccaagcatgggtggctctacaagggcaacatgaactccgccattagtgtgacgatgaggtcgtttaaacggagattctttcacttaatccagttgggagatggttcgtataacctcaatttttataaggatgaaaagatctcgaaggaaccaaaagggtctatctttctagacagttgcatgggcgttgttcagaataataaggtgaggagattcgcctttgagctgaagatgcaggacaaatcctcctatctgctcgccgccgactccgaagtggagatggaggagtggataacaatcctcaacaaaatcctgcagctgaatttcgaggcagctatgcaggagaagcggaacggcgactctcacgaggatgacgagcagagcaagctagagggatcaggctccggactcgactcatatttacctgaactggcaaagtctgctagagaggccgaaatcaaactgaagtcagagagtcgcgtgaagttattctatctcgacccggatgctcagaagctcgatttttctagtgccgaaccagaggtgaagtcctttgaagaaaaatttgggaagagaatactagtcaaatgcaacgacctgtcgtttaatctccaatgttgcgtagccgaaaatgaggaaggccctactaccaatgtcgagccttttttcgtgaccctgagcctctttgatataaagtataacagaaagatttcagcggattttcacgtcgatctgaaccattttagtgttagacagatgctggcaacaacttcacccgcgctgatgaacgggtcaggacagtccccgtccgtgcttaagggcattctccacgaggcagccatgcagtatccaaagcaggggatcttttctgtcacatgtccacatcccgacattttcctggtggcccgtattgaaaaggttctgcagggcagcattactcattgtgcagaaccttatatgaagagctctgacagctcaaaagtcgcccagaaggtgctgaaaaatgcgaagcaggcatgccagagactaggacagtaccgcatgccattcgcctgggccgcccgtaccctattcaaagatgccagtggcaacctggacaaaaacgctcggttctcagcaatttacagacaggatagtaacaagctttctaacgacgacatgttgaagctgttggcagacttcaggaaaccagagaagatggccaagctccctgtgatcctcgggaatctagacattaccatagacaatgtgtcctctgatttccccaattacgtgaactcctcttacatcccaacaaagcagttcgaaacatgctcaaagacacctataacgttcgaagtcgaggaattcgtgccttgtatcccaaagcacactcagccgtatactatctatactaatcacctctatgtgtaccctaaatacctaaaatatgactcccaaaagagctttgcaaaggcccgcaacattgctatttgtattgaatttaaagactctgacgaggaagatagccagcctctcaagtgcatctacggaagacccgggggccctgtctttacgaggagtgcctttgcagccgtgttgcaccaccatcagaatcctgagttctacgatgaaattaaaatcgagctgcccactcagctgcacgagaagcatcacctgctcttgactttcttccatgtgagctgcgacaacagcagcaagggctccacaaagaagagagatgtagtagaaacccaagtaggatactcttggctcccattactgaaagacggtcgagtcgtgacctccgaacaacatatccctgtgagcgctaatctcccttctggctatctgggctatcaagaactcggtatgggacggcattatggacccgagataaagtgggtggacggtggtaagcccctgctgaagatctcgactcatctcgtgtccaccgtatatacccaggatcagcatctccacaatttttttcagtactgtcaaaagactgagtccggggcccaagccctgggcaacgaactggtgaagtacctgaaaagtctgcacgccatggaagggcacgtgatgatcgcattcctgcccacaatcctcaaccagctgttccgcgtgttgaccagagccacccaggaggaggtcgccgtcaatgtgactagagttataatccacgtggtggcccagtgtcatgaggaggggttagagtctcatctgcggtcatacgtcaagtacgcctacaaagctgaaccgtacgttgccagtgaatataagactgtccacgaggaattgacaaagagcatgaccactatactcaagccaagcgcagacttcttgacgtctaataagctgctgaagtactcgtggttcttcttcgacgttctgatcaagagtatggctcagcatcttatagaaaactctaaggttaaactgcttaggaatcagcggtttccagcaagctatcatcatgccgtggagacggtggtcaatatgctcatgcctcacataacccaaaagtttagagataacccggaggcaagcaaaaacgccaatcatagcttggccgtgtttattaaacgctgtttcaccttcatggatcgaggatttgtgttcaagcaaattaacaattatatcagctgtttcgcaccaggggacccaaaaaccctatttgagtacaaatttgaatttcttagggtggtgtgtaatcacgagcactatatccccctcaacctccctatgccttttggcaagggacgcattcagaggtaccaagacctgcagctggattactcactgacggacgagttctgccgcaatcatttcctggttggattgctgttgcgggaagtgggaaccgcactacaggaattcagggaagtgaggttgatcgcaatttccgtgttaaaaaatctcttgattaagcactcctttgatgatcggtacgcatctcgttctcaccaggctcggatcgccaccctttatctgcctctctttggcctcttaatagagaatgtgcaaaggatcaatgtgagggatgtgagccccttccccgtcaacgccggtatgacggtgaaagatgaatctctggctcttccagcagtgaatccactggtgacccctcaaaaaggtagtacactggacaactcgctccataaggatctactcggcgccatcagtggaattgctagcccatatacaaccagcaccccaaacatcaactctgtgcgaaacgccgactcaaggggttccttaatcagtacagatagtggcaactcattgcccgagcgaaacagcgagaagagcaactcactggacaaacatcagcagtcttcaaccctcggcaacagtgtggtgcgttgtgataaactcgatcagtctgaaatcaaaagcttgttgatgtgctttctgtatattttgaaatctatgagcgatgatgccctttttacatattggaacaaggccagtacctctgagctgatggacttctttactatttctgaggtgtgtttgcatcagttccaatacatgggtaaaagatacatcgctcggactgggatgatgcacgcccgtctgcaacagctgggcagcctggataatagtctgaccttcaaccactcctatgggcattcggatgccgatgtgctccatcagtccttactagaggcaaatattgccactgaggtttgcctcaccgcacttgacactttgagcctcttcactctggcgttcaagaaccagctcctggcggatcatgggcacaaccccctgatgaagaaggtgtttgacgtctacttatgctttcttcaaaaacaccagtccgaaactgccctgaaaaacgttttcaccgccctgcgcagcctcatttataaattcccttccactttctacgaggggagggccgacatgtgtgctgctctttgttatgaaatcctaaagtgttgcaactctaagctgtcatctataaggacagaagccagtcagcttctctatttcctaatgcggaacaacttcgactacacagggaaaaagtccttcgtccgcacacatctgcaggtgatcatcagcgtgtcccagcttattgccgatgtggtaggaattggcggtacacgatttcaacagtcattgagcataattaataattgtgctaatagtgatagactcattaagcatacgtccttttcatctgacgttaaagacttgacaaaacggattaggacggtcctcatggcaaccgcacagatgaaggagcatgaaaatgacccagagatgctggtggacctgcagtactcactcgctaagagttacgcaagcactccagagctgcggaaaacctggctggattctatggctcgcatacatgttaaaaatggagacctgtccgaagccgccatgtgttatgtccacgtaaccgctcttgttgccgagtatctgacgaggaaggaagccgttcagtgggaacctccccttctgccacactcgcatagcgcttgcctgcggcgctctcggggtggagtgttcagacaggggtgtaccgcctttagggtaattaccccaaatatcgatgaagaggcttccatgatggaagatgtaggaatgcaggacgtccatttcaatgaagacgtcctcatggaacttcttgaacagtgtgctgacggtctgtggaaggccgagcggtacgagctgatcgcagatatttataaactgatcatacccatttacgagaagaggcgcgatttcgagaggctggcccatctgtatgacacccttcatcgagcgtatagcaaggtaacagaggtgatgcactcaggtcgcaggcttctcggaacctactttcgagtggcattctttggccaggccgcacagtaccagtttacagattccgagaccgacgtcgagggcttcttcgaggacgaagacggaaaagagtacatctacaaagaacccaaattgactcccctttctgagatatctcagcggctcttaaagctgtactctgacaagttcggttccgaaaacgtaaaaatgatacaagattcaggcaaggtgaaccctaaagacttggactccaaatacgcttatatacaggtgacccatgtaattcctttcttcgatgagaaagagctgcaggagcgcaagactgaatttgaacgtagccataatattcgacgatttatgtttgaaatgcccttcacccagacagggaaaagacaagggggggtggaagaacagtgtaagcgtcgcaccatactaacagccatacactgcttcccgtacgtgaaaaagcgtatcccggtgatgtaccagcaccatacggacttaaatcccattgaagtggccatcgatgagatgtcaaagaaggtggccgagctccggcagttgtgctcaagtgccgaggttgacatgatcaagttgcagctaaaattacagggcagtgtgagtgtgcaggtgaatgcaggcccgctcgcgtacgcaagagctttcctcgatgacacaaacactaagcgttacccagacaacaaggtgaagctcttaaaggaggtttttcggcagttcgtggaagcctgcggacaggctctcgcagtgaacgaaagactcatcaaagaagaccagcttgagtaccaggaggaaatgaaagccaattatcgcgagatggctaaagagctcagcgaaatcatgcacgagcagctaggctag

SEQ ID NO: 47318 - DNA, 6207 bp, Artificial Sequence
  derived and/or modified sequence
atgcaggcagataagtgccgcactagctcacggagcgtcaaaaaagaacttgttatcgaatctcccctacagtacaaggatgcagctcagggggaagtggaagccgagtcacctggtcctgtgcccgcaaaacctaaactaattgaacccctggactatgagaatgttattgtgcagaagaaaactcagatcctcaatgattgcctgcgagagatgctattattcccatatgatgacttccaaaccgccattctgagaaggcaagggcgttatatctgttctactgtgccggctaaggcagaggaggaagctcaatccctgtttgtgactgagtgtatcaaaacgtacaattctgattggcatttggttaactataaatatgaagattactctggagaatttaggcagctgcccaacaaagtggtaaaacttgacaagttacccgtgcacgtctacgaagttgacgaggaagtggacaaggacgaagacgctgcttctttaggatctcaaaagggcggaattaccaagcatggctggctctataagggaaatatgaactccgcaattagcgtcaccatgaggtcctttaaacgacgattttttcacctgattcagctgggcgacgggtcttataacctgaacttctacaaggatgaaaaaatttcaaaagaacctaagggttctatcttcctcgactcctgtatgggagtagtacagaacaataaggtgcgacggttcgcattcgaactgaagatgcaggataagagttcgtatcttcttgcagcggattctgaggttgaaatggaagagtggattactattctgaataagatcctacagcttaattttgaggccgcaatgcaggagaaaagaaatggggattcccatgaagatgatgaacaatcaaagctcgaaggtagcggctccggactggactcatacttgcctgagctcgcaaaatccgccagagaagccgagataaagctgaaatccgagtcacgcgtgaagctcttttacctggaccctgacgcccagaagctagatttcagttccgccgaacctgaagtgaaaagcttcgaggagaagtttgggaagagaatcctggtgaagtgcaacgatctgagttttaacctccagtgttgtgtggctgaaaacgaagaaggcccaacaaccaacgtcgagccattttttgtcacgctttcactcttcgacataaaatataatagaaagatttctgccgacttccatgtggacctgaatcacttctcagtgcgtcagatgctggccactaccagtccagcacttatgaacgggtcagggcagtccccctccgtgctcaaaggcatcctccatgaagcggctatgcagtatcccaaacaggggatctttagtgtcacatgcccacaccctgacatctttcttgtagcaaggattgagaaggtcctccaagggagcattacacattgtgcagagccctatatgaagtccagtgacagtagcaaggtcgctcagaaagtgctgaaaaacgcaaagcaggcgtgccagcgactgggccaataccggatgccatttgcttgggctgctagaacactatttaaggacgcctctgggaacttggacaagaacgcccgattttcagctatttacagacaagacagcaataaactatccaatgatgacatgttgaagctcctggctgatttccgaaaaccggaaaagatggctaagctccctgtgattcttggaaatctggacatcactatagataatgtctcctctgacttccctaattacgtgaacagttcttacattcctacaaagcagtttgaaacttgcagcaagacacccattaccttcgaagtggaagaatttgtgccctgcatccctaagcacacgcagccttatacaatatataccaaccatctttacgtatatcctaaatatctgaagtacgactctcaaaagtcctttgctaaggccaggaatattgccatctgcattgagtttaaagactcggacgaggaggacagtcagccactaaaatgcatctatggtaggccaggtggccctgttttcactcgctctgcattcgccgcagtgttgcatcaccatcagaatccagagttctacgatgagatcaagatcgaattacccacacaactgcatgaaaagcaccatttgttgctgacattcttccacgtgagttgtgacaattcctcaaaagggtccactaaaaaaagagacgtcgtcgaaacacaggttggctatagctggcttccattgctgaaggacggtagagtggtgacaagcgaacagcatattcccgtctcggcgaacctgcccagcggatacttaggctatcaggaactgggtatgggacgccactacggcccagagatcaaatgggtggatggcggtaagccactgctgaaaatttccacccatctggtgtcgacagtgtacacacaggaccaacaccttcataacttcttccaatattgtcaaaagacagaaagtggcgctcaggccctgggcaacgaactagtgaagtacctcaagagcttgcacgccatggagggccatgtcatgattgcgttcctccccactatattgaaccagctgttcagagtgctgacccgggctacccaggaggaggtggccgtgaacgtgacacgggttatcattcacgtcgtcgcacagtgtcatgaggagggcttagagtcccacttacggtcttacgtgaagtacgcgtacaaggctgagccttacgttgcctcagagtataaaaccgtgcacgaggaacttacaaagtcaatgaccacgatattgaagccgagtgcagattttctgaccagcaacaagctgttaaaatacagctggttcttttttgacgtgcttataaagtctatggcccagcatctcatcgaaaacagcaaagtgaagttgctgaggaatcagagattcccagcctcataccatcacgccgtcgaaaccgtggttaatatgctgatgccgcatatcacccagaaattccgcgataatcccgaagccagcaagaacgccaaccactctctggctgtttttattaagcggtgtttcacatttatggacagggggtttgtgttcaagcagataaacaactatatttcctgctttgctcctggcgaccccaaaacactgttcgaatacaagtttgagttcctccgggtggtctgcaatcacgagcattacatcccactgaatcttcctatgccctttggcaaagggagaattcagaggtatcaggacctacagctcgactatagccttaccgacgaattctgccggaatcatttcctcgtgggactgctgttgcgcgaagttggtaccgctttacaggagtttagagaggtccgtctgatagccatttccgtgctgaaaaacctgttgattaaacactcgttcgacgaccgatatgcaagtcggagtcaccaggccaggatagcaaccctctacctccctctgtttggattactgatcgagaacgtgcaaaggattaacgtcagggatgtgtcaccctttcctgtgaacgcaggcatgaccgtgaaggatgaatcgctggccctgcctgccgttaaccctctggttaccccgcagaagggtagcaccctggataatagcttgcacaaagacctcctgggggctatatcaggcattgcctccccttacactaccagtacgcctaatatcaatagcgttcgcaacgccgatagccgaggttccctgattagcacagactctggaaactctttgccagaaagaaactcagagaagtctaatagccttgacaagcaccagcagtcctccaccctcggaaattctgtggtgcgttgtgacaaactcgaccagagcgaaattaaaagcctgctgatgtgcttcctttatattttaaagtctatgagcgatgatgccctctttacctactggaataaggcctcaaccagcgaactgatggattttttcacaatttcagaggtgtgtctgcaccagttccagtacatgggaaaacggtatattgccaggacaggcatgatgcatgctaggctccagcagctgggttcactggacaatagcctaacttttaaccattcatatgggcattccgacgccgatgtcctacaccagtccctactcgaggctaacatcgctacagaggtttgtctgactgccctggacacattatctttgttcacactggcattcaaaaatcagttactggccgaccacggccataaccctctgatgaagaaggtctttgacgtgtatctgtgcttcctgcaaaagcaccaaagcgagaccgcgctcaagaatgtcttcacagccctgcgctcactaatttacaagttccccagtacgttctacgaaggccgtgctgatatgtgcgccgctctctgctacgaaattcttaaatgctgtaatagcaagctgtcctctattaggaccgaggcatcgcagctgctgtattttctgatgcgcaacaacttcgactatactgggaaaaagtctttcgtccgcacccacctgcaggtgataataagcgtcagtcaactgattgccgacgtggtgggtattggcggtacgcgattccagcagagcctctccatcattaacaattgtgccaattctgataggctgatcaagcacaccagtttctcttctgacgtaaaggatttgactaagaggatacgtactgtgctcatggcaacagcacagatgaaggagcatgaaaacgaccctgaaatgcttgtagatctccagtactctctggcaaaatcatatgcctccacccctgagctcaggaagacttggctggattccatggccaggatccacgtaaagaacggagacctctccgaggctgctatgtgctatgtccatgtgactgccctggtggctgaatatcttaccagaaaagaagctgtacaatgggaacctcccttgctaccccattctcacagcgcctgtctccgccgatctagaggtggggtgttcaggcaagggtgtacagctttccgagtgatcactccaaacatcgacgaggaagccagcatgatggaggatgttggtatgcaggacgtccattttaacgaggatgtcctgatggagctactggaacagtgcgcggatggactctggaaggccgagcgttatgaactgattgctgacatttacaagctgatcatcccaatctatgaaaaacggcgtgactttgagaggttggctcacctctacgacactctgcacagagcatactccaaggtgacggaagtaatgcattccggcagaagattgctgggtacctacttccgggtcgccttcttcgggcaggccgcacagtatcagtttaccgacagcgaaaccgatgtcgagggatttttcgaggatgaagacggcaaagagtacatctacaaggagcctaaactgactccactgagtgaaattagccaacgactgctgaaactgtactccgacaagtttggctccgaaaacgtgaagatgatacaggactcgggcaaagtgaatccaaaggatctggacagcaaatatgcctacatccaggtgacacacgtaatcccattcttcgacgagaaggagctccaggaacggaaaaccgagtttgaacgctcccacaacattagacgcttcatgttcgaaatgccattcacacagacaggaaaacggcagggaggagtggaggaacagtgtaaaagaagaacaattctcacagcaattcattgcttcccgtacgttaaaaaaagaatccccgtgatgtatcagcatcataccgacctgaatccaattgaggtggctattgacgagatgagtaaaaaggtggcggagttgcgacaactttgctcttccgctgaggtcgatatgatcaagctgcaactcaagctgcaagggagtgtatccgttcaggtcaacgcgggtcctctggcctatgctagagcctttctcgatgataccaacacaaagcgctatccggataacaaggttaaactcctcaaagaggtgtttcgccagtttgttgaggcgtgtggccaggccctcgccgtgaacgagaggctcatcaaagaagatcagctggagtaccaagaggagatgaaggccaattacagggaaatggccaaggaactctctgagataatgcacgagcagctgggctaa

SEQ ID NO: 47319 - DNA, 588 bp, Artificial Sequence
  derived and/or modified sequence
atgagccagccccccctgctgcccgccagcgccgagaccagaaagttcaccagagccctgagcaagcccggcaccgccgccgagctgagacagagcgtgagcgaggtggtgagaggcagcgtgctgctggccaagcccaagctgatcgagcccctggactacgagaacgtgatcgtgcagaagaagacccagatcctgaacgactgcctgagagagatgctgctgttcccctacgacgacttccagaccgccatcctgagaagacagggcagatacatctgcagcaccgtgcccgccaaggccgaggaggaggcccagagcctgttcgtgaccgagtgcatcaagacctacaacagcgactggcacctggtgaactacaagtacgaggactacagcggcgagttcagacagctgcccaacaaggtggtgaagctggacaagctgcccgtgcacgtgtacgaggtggacgaggaggtggacaaggacgaggacgccgccagcctgggcagccagaagggcggcatcaccaagcacggctggctgtacaagggcaacatgaacagcgccatcagcgtgaccatgagatag

SEQ ID NO: 47320 - DNA, 859 bp, Artificial Sequence
  derived and/or modified sequence
cgccacacgcacggtcgcccggagcgagcccgggcgctgctgcgatcgcggggggccgcggacgccgaggggggcgccttggggcgtgacacggtgcagagggcgcggcctgggctgcggcggccggactcgcggcgagcagcggggggagcaggcggcggcggcgccgggagcggcgggcggagcgggccgggcgccgagggcgcacctggcggccgcgcggccgggccgggccgcgggagcaggcggaggcggaggcggcgggggcaggaggatgtcgcagccgccgctgctccccgcctcggcggagactcggaagttcacccgggcgctgagtaagccgggcacggcggccgagctgcggcagagcgtgtctgaggtggtgcgcggctccgtgctcctggcaaagccaaagctaattgagccactcgactatgaaaatgtcatcgtccagaagaagactcagatcctgaacgactgtttacgggagatgctgctcttcccttacgatgactttcagacggccatcctgagacgacagggtcgatacatatgctcaacagtgcctgcgaaggcggaagaggaagcacagagcttgtttgttacagagtgcatcaaaacctataactctgactggcatcttgtgaactataaatatgaagattactcaggagagtttcgacagcttccgaacaaagtggtcaagttggataaacttccagttcatgtctatgaagttgacgaggaggtcgacaaagatgaggatgctgcctcccttggttcccagaagggtgggatcaccaagcatggctggctgtacaaaggcaacatgaacagtgccatcagcgtgaccatgagg

SEQ ID NO: 47321 - DNA, 588 bp, Artificial Sequence
  derived and/or modified sequence
atgagccaaccccctctgttgccagcatctgctgaaacgcggaagtttacccgagctcttagcaaaccaggcactgctgcagagcttagacagagtgttagcgaagtcgtccgcggatccgtactgctcgcaaaacccaagctaattgaacccctggactatgaaaatgtgatcgttcagaaaaaaacacagatcttgaatgactgcttgcgcgaaatgcttctttttccctacgacgatttccaaaccgccatcctgaggcggcaggggcggtatatttgctcaactgtcccagctaaggcagaggaggaagctcagtctctgtttgtcactgaatgcattaagacatataattccgattggcacctggtcaattataagtatgaagattactctggcgaattcagacaactgcccaataaggtagtcaagctcgacaagctgcccgtgcatgtttacgaggtggatgaggaagttgataaggatgaagacgccgcctcactgggaagtcagaagggcggtatcacaaaacatgggtggctgtataagggcaatatgaactcagctattagcgtgacaatgcgctag

SEQ ID NO: 47322 - DNA, 588 bp, Artificial Sequence
  derived and/or modified sequence
atgagccagccccccctgctgcctgccagcgctgagaccaggaagttcacccgggccctgagcaagccaggcacagctgctgagctgcggcagagcgtgtctgaggtggtgcggggctctgtgctgctggccaagcccaagctgattgagcccctggactatgaaaatgtcatcgtgcagaagaagacccagatcctgaatgactgcctgcgggagatgctgctcttcccctatgatgacttccagacagccatcctgcggcggcagggccgctacatctgcagcacagtgcctgccaaggccgaggaggaggcccagagcctgtttgtgacagagtgcatcaagacctacaacagcgactggcacctggtgaactacaagtatgaggactacagcggggagttccggcagctgcccaacaaggtggtgaagctggacaagctgcctgtgcacgtgtatgaggtggatgaggaggtggacaaggatgaagatgctgccagcctgggcagccagaagggcggcatcaccaagcacggctggctgtacaagggcaacatgaacagcgccatctctgtgaccatgaggtag

SEQ ID NO: 47323 - DNA, 588 bp, Artificial Sequence
  derived and/or modified sequence
atgagccagccccccctgctgcccgccagcgccgagacccggaagttcacaagggctctgagtaaaccagggaccgccgccgaactgcggcagagcgtgtccgaagtagtgcgggggagcgtgctgctagccaaaccaaagttaatagagccactagactatgaaaacgtcatcgtacaaaagaagacacagatactcaatgattgcctgagagagatgcttctgttcccttacgatgatttccaaaccgcgatcttgcgacggcaggggcgctacatctgttcaactgtacctgcaaaggcagaagaggaggcgcagtcattgttcgtaacggagtgcatcaaaacatacaattccgattggcacttggtcaattacaaatatgaagattacagcggagagttccgacagctgcctaacaaggtagtgaaactagataaattaccggtacatgtgtacgaggttgatgaggaagtcgacaaggacgaggatgcagcatcactgggatctcagaagggaggaattacgaagcatggctggctctacaagggtaatatgaattcagctatctcagtcaccatgagatag

SEQ ID NO: 47324 - DNA, 588 bp, Artificial Sequence
  derived and/or modified sequence
atgagtcagccaccactgctgcctgcctccgccgaaacccggaaatttactagggcccttagcaagcccggtacagcggctgaactgcgccagtctgtgagcgaggttgtgagggggtccgtgcttttagccaagcccaaattaattgaacctctggactatgaaaacgtcatcgtgcagaagaaaactcagattttaaatgattgtctgagagagatgctgctcttcccttatgacgatttccagactgctattctgagacggcaggggagatacatctgcagtaccgtgcctgctaaggcagaagaggaagcacagtccttgttcgtcactgaatgcataaaaacatataacagcgactggcacttggtcaattacaagtacgaagactattctggggagttccggcagcttcctaacaaagtggtaaagctggacaaactgcccgtacacgtgtacgaagtcgacgaggaagtagataaggatgaggacgccgctagccttgggagccaaaaaggagggattaccaaacacggttggctttacaaaggcaacatgaattccgccattagcgtgacaatgagatag

SEQ ID NO: 47325 - protein, 1253 aa, Artificial Sequence
  derived and/or modified sequence
MQADKCRTSSRSVKKELVIESPLQYKDAAQGEVEAESPGPVPAKPKLIEPLDYENVIVQKKTQILNDCLREMLLFPYDDFQTAILRRQGRYICSTVPAKAEEEAQSLFVTECIKTYNSDWHLVNYKYEDYSGEFRQLPNKVVKLDKLPVHVYEVDEEVDKDEDAASLGSQKGGITKHGWLYKGNMNSAISVTMRSFKRRFFHLIQLGDGSYNLNFYKDEKISKEPKGSIFLDSCMGVVQNNKVRRFAFELKMQDKSSYLLAADSEVEMEEWITILNKILQLNFEAAMQEKRNGDSHEDDEQSKLEGSGSGLDSYLPELAKSAREAEIKLKSESRVKLFYLDPDAQKLDFSSAEPEVKSFEEKFGKRILVKCNDLSFNLQCCVAENEEGPTTNVEPFFVTLSLFDIKYNRKISADFHVDLNHFSVRQMLATTSPALMNGSGQSPSVLKGILHEAAMQYPKQGIFSVTCPHPDIFLVARIEKVLQGSITHCAEPYMKSSDSSKVAQKVLKNAKQACQRLGQYRMPFAWAARTLFKDASGNLDKNARFSAIYRQDSNKLSNDDMLKLLADFRKPEKMAKLPVILGNLDITIDNVSSDFPNYVNSSYIPTKQFETCSKTPITFEVEEFVPCIPKHTQPYTIYTNHLYVYPKYLKYDSQKSFAKARNIAICIEFKDSDEEDSQPLKCIYGRPGGPVFTRSAFAAVLHHHQNPEFYDEIKIELPTQLHEKHHLLLTFFHVSCDNSSKGSTKKRDVVETQVGYSWLPLLKDGRVVTSEQHIPVSANLPSGYLGYQELGMGRHYGPEIKWVDGGKPLLKISTHLVSTVYTQDQHLHNFFQYCQKTESGAQALGNELVKYLKSLHAMEGHVMIAFLPTILNQLFRVLTRATQEEVAVNVTRVIIHVVAQCHEEGLESHLRSYVKYAYKAEPYVASEYKTVHEELTKSMTTILKPSADFLTSNKLLKYSWFFFDVLIKSMAQHLIENSKVKLLRNQRFPASYHHAVETVVNMLMPHITQKFRDNPEASKNANHSLAVFIKRCFTFMDRGFVFKQINNYISCFAPGDPKTLFEYKFEFLRVVCNHEHYIPLNLPMPFGKGRIQRYQDLQLDYSLTDEFCRNHFLVGLLLREVGTALQEFREVRLIAISVLKNLLIKHSFDDRYASRSHQARIATLYLPLFGLLIENVQRINVRDVSPFPVNAGMTVKDESLALPAVNPLVTPQKGSTLDNSLHKDLLGAISGIGNAPCSCGLLSTITLKVSWSQ

SEQ ID NO: 47326 - DNA, 3762 bp, Artificial Sequence
  derived and/or modified sequence
atgcaggccgacaagtgcagaaccagcagcagaagcgtgaagaaggagctggtgatcgagagccccctgcagtacaaggacgccgcccagggcgaggtggaggccgagagccccggccccgtgcccgccaagcccaagctgatcgagcccctggactacgagaacgtgatcgtgcagaagaagacccagatcctgaacgactgcctgagagagatgctgctgttcccctacgacgacttccagaccgccatcctgagaagacagggcagatacatctgcagcaccgtgcccgccaaggccgaggaggaggcccagagcctgttcgtgaccgagtgcatcaagacctacaacagcgactggcacctggtgaactacaagtacgaggactacagcggcgagttcagacagctgcccaacaaggtggtgaagctggacaagctgcccgtgcacgtgtacgaggtggacgaggaggtggacaaggacgaggacgccgccagcctgggcagccagaagggcggcatcaccaagcacggctggctgtacaagggcaacatgaacagcgccatcagcgtgaccatgagaagcttcaagagaagattcttccacctgatccagctgggcgacggcagctacaacctgaacttctacaaggacgagaagatcagcaaggagcccaagggcagcatcttcctggacagctgcatgggcgtggtgcagaacaacaaggtgagaagattcgccttcgagctgaagatgcaggacaagagcagctacctgctggccgccgacagcgaggtggagatggaggagtggatcaccatcctgaacaagatcctgcagctgaacttcgaggccgccatgcaggagaagagaaacggcgacagccacgaggacgacgagcagagcaagctggagggcagcggcagcggcctggacagctacctgcccgagctggccaagagcgccagagaggccgagatcaagctgaagagcgagagcagagtgaagctgttctacctggaccccgacgcccagaagctggacttcagcagcgccgagcccgaggtgaagagcttcgaggagaagttcggcaagagaatcctggtgaagtgcaacgacctgagcttcaacctgcagtgctgcgtggccgagaacgaggagggccccaccaccaacgtggagcccttcttcgtgaccctgagcctgttcgacatcaagtacaacagaaagatcagcgccgacttccacgtggacctgaaccacttcagcgtgagacagatgctggccaccaccagccccgccctgatgaacggcagcggccagagccccagcgtgctgaagggcatcctgcacgaggccgccatgcagtaccccaagcagggcatcttcagcgtgacctgcccccaccccgacatcttcctggtggccagaatcgagaaggtgctgcagggcagcatcacccactgcgccgagccctacatgaagagcagcgacagcagcaaggtggcccagaaggtgctgaagaacgccaagcaggcctgccagagactgggccagtacagaatgcccttcgcctgggccgccagaaccctgttcaaggacgccagcggcaacctggacaagaacgccagattcagcgccatctacagacaggacagcaacaagctgagcaacgacgacatgctgaagctgctggccgacttcagaaagcccgagaagatggccaagctgcccgtgatcctgggcaacctggacatcaccatcgacaacgtgagcagcgacttccccaactacgtgaacagcagctacatccccaccaagcagttcgagacctgcagcaagacccccatcaccttcgaggtggaggagttcgtgccctgcatccccaagcacacccagccctacaccatctacaccaaccacctgtacgtgtaccccaagtacctgaagtacgacagccagaagagcttcgccaaggccagaaacatcgccatctgcatcgagttcaaggacagcgacgaggaggacagccagcccctgaagtgcatctacggcagacccggcggccccgtgttcaccagaagcgccttcgccgccgtgctgcaccaccaccagaaccccgagttctacgacgagatcaagatcgagctgcccacccagctgcacgagaagcaccacctgctgctgaccttcttccacgtgagctgcgacaacagcagcaagggcagcaccaagaagagagacgtggtggagacccaggtgggctacagctggctgcccctgctgaaggacggcagagtggtgaccagcgagcagcacatccccgtgagcgccaacctgcccagcggctacctgggctaccaggagctgggcatgggcagacactacggccccgagatcaagtgggtggacggcggcaagcccctgctgaagatcagcacccacctggtgagcaccgtgtacacccaggaccagcacctgcacaacttcttccagtactgccagaagaccgagagcggcgcccaggccctgggcaacgagctggtgaagtacctgaagagcctgcacgccatggagggccacgtgatgatcgccttcctgcccaccatcctgaaccagctgttcagagtgctgaccagagccacccaggaggaggtggccgtgaacgtgaccagagtgatcatccacgtggtggcccagtgccacgaggagggcctggagagccacctgagaagctacgtgaagtacgcctacaaggccgagccctacgtggccagcgagtacaagaccgtgcacgaggagctgaccaagagcatgaccaccatcctgaagcccagcgccgacttcctgaccagcaacaagctgctgaagtacagctggttcttcttcgacgtgctgatcaagagcatggcccagcacctgatcgagaacagcaaggtgaagctgctgagaaaccagagattccccgccagctaccaccacgccgtggagaccgtggtgaacatgctgatgccccacatcacccagaagttcagagacaaccccgaggccagcaagaacgccaaccacagcctggccgtgttcatcaagagatgcttcaccttcatggacagaggcttcgtgttcaagcagatcaacaactacatcagctgcttcgcccccggcgaccccaagaccctgttcgagtacaagttcgagttcctgagagtggtgtgcaaccacgagcactacatccccctgaacctgcccatgcccttcggcaagggcagaatccagagataccaggacctgcagctggactacagcctgaccgacgagttctgcagaaaccacttcctggtgggcctgctgctgagagaggtgggcaccgccctgcaggagttcagagaggtgagactgatcgccatcagcgtgctgaagaacctgctgatcaagcacagcttcgacgacagatacgccagcagaagccaccaggccagaatcgccaccctgtacctgcccctgttcggcctgctgatcgagaacgtgcagagaatcaacgtgagagacgtgagccccttccccgtgaacgccggcatgaccgtgaaggacgagagcctggccctgcccgccgtgaaccccctggtgaccccccagaagggcagcaccctggacaacagcctgcacaaggacctgctgggcgccatcagcggcatcggcaacgccccctgcagctgcggcctgctgagcaccatcaccctgaaggtgagctggagccagtag

SEQ ID NO: 47327 - DNA, 4094 bp, Artificial Sequence
  derived and/or modified sequence
gtcatgccttcccaccccacaggctctgcagacccagccagcggggctgaccacttgtgcctgggaagccagtttcctttccttccttggaccactggcatgcctgtgccttgcacggccagggactcgcagctgttccagttgcagactttctgacttgcgttttcagccgagaatgcaggctgataaatgcaggacaagtagtagaagtgtcaaaaaggaactggtgattgagtcccccctgcaatacaaggatgcagctcagggcgaagtggaagcagagagcccgggccctgtgccggcaaagccaaagctaattgagccactcgactatgaaaatgtcatcgtccagaagaagactcagatcctgaacgactgtttacgggagatgctgctcttcccttacgatgactttcagacggccatcctgagacgacagggtcgatacatatgctcaacagtgcctgcgaaggcggaagaggaagcacagagcttgtttgttacagagtgcatcaaaacctataactctgactggcatcttgtgaactataaatatgaagattactcaggagagtttcgacagcttccgaacaaagtggtcaagttggataaacttccagttcatgtctatgaagttgacgaggaggtcgacaaagatgaggatgctgcctcccttggttcccagaagggtgggatcaccaagcatggctggctgtacaaaggcaacatgaacagtgccatcagcgtgaccatgaggtcatttaagagacgatttttccacctgattcaacttggcgatggatcctataatttgaatttttataaagatgaaaagatctccaaagaaccaaaaggatcaatatttctggattcctgtatgggtgtcgttcagaacaacaaagtcaggcgttttgcttttgagctcaagatgcaggacaaaagtagttatctcttggcagcagacagtgaagtggaaatggaagaatggatcacaattctaaataagatcctccagctcaactttgaagctgcaatgcaagaaaagcgaaatggcgactctcacgaagatgatgaacaaagcaaattggaaggttctggttccggtttagatagctacctgccggaacttgccaagagtgcaagagaagcagaaatcaaactgaaaagtgaaagcagagtcaaacttttttatttggacccagatgcccagaagcttgacttctcatcagctgagccagaagtgaagtcatttgaagagaagtttggaaaaaggatccttgtcaagtgcaatgatttatctttcaatttgcaatgctgtgttgccgaaaatgaagaaggacccactacaaatgttgaacctttctttgttactctatccctgtttgacataaaatacaaccggaagatttctgccgatttccacgtagacctgaaccatttctcagtgaggcaaatgctcgccaccacgtccccggcgctgatgaatggcagtgggcagagcccatctgtcctcaagggcatccttcatgaagccgccatgcagtatccgaagcagggaatattttcagtcacttgtcctcatccagatatatttcttgtggccagaattgaaaaagtccttcaggggagcatcacacattgcgctgagccatatatgaaaagttcagactcttctaaggtggcccagaaggtgctgaagaatgccaagcaggcatgccaaagactaggacagtatagaatgccatttgcttgggcagcaaggacattgtttaaggatgcatctggaaatcttgacaaaaatgccagattttctgccatctacaggcaagacagcaataagctatccaatgatgacatgctcaagttacttgcagactttcggaaacctgagaagatggctaagctcccagtgattttaggcaatctagacattacaattgataatgtttcctcagacttccctaattatgttaattcatcatacattcccacaaaacaatttgaaacctgcagtaaaactcccatcacgtttgaagtggaggaatttgtgccctgcataccaaaacacactcagccttacaccatctacaccaatcacctttacgtttatcctaagtacttgaaatacgacagtcagaagtcttttgccaaggctagaaatattgcgatttgcattgaattcaaagattcagatgaggaagactctcagccccttaagtgcatttatggcagacctggtgggccagttttcacaagaagcgcctttgctgcagttttacaccatcaccaaaacccagaattttatgatgagattaaaatagagttgcccactcagctgcatgaaaagcaccacctgttgctcacattcttccatgtcagctgtgacaactcaagtaaaggaagcacgaagaagagggatgtcgttgaaacccaagttggctactcctggcttcccctcctgaaagacggaagggtggtgacaagcgagcagcacatcccggtctcggcgaaccttccttcgggctatcttggctaccaggagcttgggatgggcaggcattatggtccggaaattaaatgggtagatggaggcaagccactgctgaaaatttccactcatctggtttctacagtgtatactcaggatcagcatttacataattttttccagtactgtcagaaaaccgaatctggagcccaagccttaggaaacgaacttgtaaagtaccttaagagtctgcatgcgatggaaggccacgtgatgatcgccttcttgcccactatcctaaaccagctgttccgagtcctcaccagagccacacaggaagaagtcgcggttaacgtgactcgggtcattattcatgtggttgcccagtgccatgaggaaggattggagagccacttgaggtcatatgttaagtacgcgtataaggctgagccatatgttgcctctgaatacaagacagtgcatgaagaactgaccaaatccatgaccacgattctcaagccttctgccgatttcctcaccagcaacaaactactgaagtactcatggtttttctttgatgtactgatcaaatctatggctcagcatttgatagagaactccaaagttaagttgctgcgaaaccagagatttcctgcatcctatcatcatgcagtggaaaccgttgtaaatatgctgatgccacacatcactcagaagtttcgagataatccagaggcatctaagaacgcgaatcatagccttgctgtcttcatcaagagatgtttcaccttcatggacaggggctttgtcttcaagcagatcaacaactacattagctgttttgctcctggagacccaaagaccctctttgaatacaagtttgaatttctccgtgtagtgtgcaaccatgaacattatattccgttgaacttaccaatgccatttggaaaaggcaggattcaaagataccaagacctccagcttgactactcattaacagatgagttctgcagaaaccacttcttggtgggactgttactgagggaggtggggacagccctccaggagttccgggaggtccgtctgatcgccatcagtgtgctcaagaacctgctgataaagcattcttttgatgacagatatgcttcaaggagccatcaggcaaggatagccaccctctacctgcctctgtttggtctgctgattgaaaacgtccagcggatcaatgtgagggatgtgtcacccttccctgtgaacgcgggcatgactgtgaaggatgaatccctggctctaccagctgtgaatccgctggtgacgccgcagaagggaagcaccctggacaacagcctgcacaaggacctgctgggcgccatctccggcattggtaacgctccatgctcttgtgggcttctctccaccatcactctgaaagtgtcttggagccaatagttggtgaacgtgtcacacttgtgtggtaggaccttgaagtctaagttgctttcctgagtattcttttcctgcttgtgatagtcaacaactgaaacccctcagccatgccctgaaataaaggtcccggatgcctgtgactcctcaggatcatacagtt

SEQ ID NO: 47328 - DNA, 3762 bp, Artificial Sequence
  derived and/or modified sequence
atgcaggctgacaaatgtcggacctctagccgatccgttaaaaaagagttggtgattgaaagcccactccagtacaaagacgccgctcagggtgaagtggaagccgaaagtccagggccggtgccagccaagccaaaacttatcgagcctctggactacgaaaacgtcattgtccagaaaaagacacaaattttaaacgactgccttcgagagatgcttctgtttccctacgatgactttcagactgctatcctgcgccgacaggggagatatatctgttctaccgtcccagccaaggctgaagaagaagcccagagtctatttgtcactgagtgcattaaaacctacaactcagattggcatctcgtgaattacaagtatgaggactatagtggcgagttccgccagcttcctaataaggtggttaaactggacaagttaccagtacacgtttacgaagtcgacgaagaggtcgataaagacgaggatgccgctagtctcggatctcaaaagggaggaatcactaaacatgggtggctttacaaaggtaatatgaatagcgccattagtgtgaccatgcggagttttaaacgaaggtttttccacctgatccaactgggggacggcagctacaatttaaatttttacaaggatgaaaaaatatccaaggagccgaaggggtctatctttcttgattcgtgtatgggcgtcgtccagaataacaaggtgcgacggtttgcctttgaacttaaaatgcaagacaagtcatcttaccttctggccgcggatagtgaggtggagatggaggagtggataaccatcctgaacaagatcctgcagctgaattttgaggcagccatgcaggaaaagcggaacggagactctcacgaagacgacgaacagagcaaactagagggcagcggtagtgggctggactcttacctccccgaacttgccaagagcgctcgggaggctgaaatcaagttaaagtccgagtcacgtgtgaagttattttatctggatcccgacgctcaaaagctggatttcagttcagccgaacctgaagtgaagagttttgaggagaagtttggcaaaaggattctcgtgaagtgcaacgacctgtcttttaacctgcagtgttgtgtagcggagaacgaggaggggcccaccacaaatgtggagcccttctttgtgacactctccctgtttgatatcaaatataaccggaaaatatccgccgattttcatgttgatttaaaccactttagcgtccgccagatgttagccactacttctcctgcactgatgaatggctctgggcagagcccaagtgtcttaaaaggcattttgcacgaagccgccatgcagtacccaaaacagggaatcttttcagtgacatgcccacaccctgatatcttccttgtggccagaattgagaaagtgctccagggctcaattacccattgtgcagaaccatacatgaagtccagcgattcctcgaaagttgcacagaaggtattgaagaatgctaagcaagcatgtcaaaggctgggccagtatcgtatgcccttcgcctgggccgctcgaactttgttcaaagacgcatcagggaacctggataaaaacgctagattctccgctatctacaggcaggacagcaacaagctgtcaaatgacgacatgctgaagctgcttgctgactttcgtaaaccagaaaaaatggctaaactgcctgttattctggggaacctggatataactatcgataacgtgagcagtgattttcccaattacgtgaacagtagttacatccctaccaagcagttcgagacctgctctaagacgccaatcacattcgaagtcgaggagtttgtgccttgtatccctaaacacacccagccgtacacgatttacacgaaccacctctacgtatatcccaaatacctgaagtacgattcgcagaagtcattcgctaaggcgcggaacatagctatttgtatagagttcaaggattcagatgaagaagactctcagcctctgaaatgtatttatggacgccctggcggacccgtcttcacccgctccgcatttgcagcagttttgcaccatcaccagaatcccgaattctatgatgagatcaagatagagctgcccactcagctgcatgagaaacatcacttactgctgacctttttccacgtgtcttgcgacaattctagtaaaggcagcaccaaaaagcgagacgtcgtggagacacaggtgggatacagctggttgcccctgctgaaagatggtcgggtcgtgactagtgagcaacacatcccagtttcagccaacctgccaagcggttatttggggtaccaggagttggggatgggccgccattatgggccagaaataaagtgggtggacggcggcaagccacttctcaaaatttctacacatctcgtctccacggtgtatacacaggatcaacatctgcacaatttttttcagtactgtcaaaaaaccgaaagtggcgcacaggccctgggcaacgagctcgtcaagtacctcaagtctctgcatgccatggaggggcatgtgatgatcgcgttcctgccaaccatactgaatcagctcttcagggttttaaccagagccacccaggaggaagtagcggtgaacgtgacacgcgtcattattcatgtggttgcacagtgccacgaagaggggctcgagtcgcacttacgcagttatgtgaaatatgcgtacaaagccgaaccatacgtggcctccgagtacaaaacggtacatgaggaactgaccaaaagcatgacaacaatcctgaaaccctctgctgattttctcacgagcaataagctgctgaaatacagttggttcttcttcgatgttctgataaagagcatggcgcaacacctcatcgagaacagcaaggtaaagcttctcaggaaccagagattcccagccagttatcaccacgctgtagagaccgtggtcaatatgcttatgccacacatcactcaaaagtttagggataatccagaagccagcaaaaatgcaaaccactcgttggccgtctttattaagaggtgcttcaccttcatggatcgcggatttgtgtttaagcagatcaataactacatttcgtgtttcgcgcccggcgacccaaagaccctgtttgagtataaattcgagtttcttcgggttgtttgtaaccacgagcactacatccccctcaatctccccatgccattcggcaaaggaaggatccaacggtatcaggatctgcaattggactatagcctgactgatgagttttgtagaaatcactttctggtgggtctcctccttagggaagtcggtaccgccttacaagaatttcgtgaagtacggctgattgcgatttccgtgctgaagaatttactgattaaacactcatttgacgaccgctacgcctcccgatcccaccaagcaaggattgctacattgtatctacctctcttcggccttctgattgaaaacgtgcagcggattaatgtccgcgacgtctcaccatttcctgtgaatgctggcatgacagtgaaggacgaatcactagcactcccagcagtcaacccactcgttacaccccagaagggtagcactctggacaactctctccataaggacttacttggcgcaatcagtgggatcggtaatgctccctgctcctgtggcctgttatccactataacccttaaggtctcttggtcccagtag

SEQ ID NO: 47329 - DNA, 3762 bp, Artificial Sequence
  derived and/or modified sequence
atgcaggccgacaagtgcaggaccagcagccgctctgtgaagaaggagctggtgattgagagccccctgcagtacaaggatgctgcccagggcgaggtggaggccgagagccctggccctgtgcctgccaagcccaagctgattgagcccctggactatgaaaatgtgattgtgcagaagaagacccagatcctgaatgactgcctgcgggagatgctgctcttcccctatgatgacttccagacagccatcctgcggcggcagggccgctacatctgcagcacagtgcctgccaaggccgaggaggaggcccagagcctgtttgtgacagagtgcatcaagacctacaacagcgactggcacctggtgaactacaagtatgaggactacagcggggagttccggcagctgcccaacaaggtggtgaagctggacaagctgcctgtgcacgtgtatgaggtggatgaggaggtggacaaggatgaagatgctgccagcctgggcagccagaagggcggcatcaccaagcacggctggctgtacaagggcaacatgaacagcgccatctctgtgaccatgaggagcttcaagaggcgcttcttccacctgatccagctgggagatggcagctacaacctgaacttctacaaggatgagaagatcagcaaggagcccaagggcagcatcttcctggacagctgcatgggcgtggtgcagaacaacaaggtgagaagatttgcctttgagctgaagatgcaggacaagagcagctacctgctggccgctgacagcgaggtggagatggaggagtggatcaccatcctgaacaagatcctgcagctgaactttgaagctgccatgcaggagaagagaaatggagacagccatgaagatgatgagcagagcaagctggagggcagcggcagcggcctggacagctacctgcctgagctggccaagagcgcccgggaggccgagatcaagctgaagtctgagagccgggtgaagctgttctacctggaccctgatgcccagaagctggacttcagcagcgctgagcctgaggtgaagagctttgaggagaagtttgggaagaggatcctggtgaagtgcaatgacctgtccttcaacctgcagtgctgcgtggccgagaatgaggagggccccaccaccaacgtggagcccttctttgtgaccctgagcctgtttgacatcaagtacaacaggaagatctctgctgacttccacgtggacctgaaccacttctctgtgcggcagatgctggccaccaccagccctgccctgatgaatggaagtggccagagccccagcgtgctgaagggcatcctgcatgaagctgccatgcagtaccccaagcagggcatcttctctgtgacctgcccccacccagacatcttcctggtggcccgcatcgagaaggtgctgcagggcagcatcacccactgtgccgagccctacatgaagagcagtgacagcagcaaggtggcccagaaggtgctgaagaatgccaagcaggcctgccagaggctgggccagtacaggatgccctttgcctgggccgcccggaccctcttcaaggatgccagcggcaacctggacaagaatgcccgcttcagcgccatctaccggcaggacagcaacaagctgagcaatgatgacatgctgaagctgctggccgacttcaggaagccagagaagatggccaagctgcccgtcatcctgggcaacctggacatcaccatcgacaacgtgtccagtgacttccccaactacgtgaacagcagctacatccccaccaagcagtttgagacctgcagcaagacccccatcacctttgaggtggaggagtttgtgccctgcatccccaagcacacccagccctacaccatctacaccaaccacctgtatgtgtaccccaagtacctgaagtatgacagccagaagagctttgccaaggccagaaatattgccatctgcatcgagttcaaggacagtgatgaggaggacagccagcccctgaagtgcatctacggccggcctgggggccctgtgttcaccaggtctgcctttgctgctgtgctgcaccaccaccagaaccctgagttctatgatgagatcaagattgagctgcccacccagctgcacgagaagcaccacctgctgctgaccttcttccacgtgtcctgtgacaacagcagcaagggcagcaccaagaagagagatgtggtggagacccaggtgggctacagctggctgcccctgctgaaggatggccgggtggtgaccagcgagcagcacatccctgtgtctgccaacctgcccagcggctacctgggctaccaggagctgggcatgggccgccactacggccctgagatcaagtgggtggatggcggcaagcccctgctgaagatcagcacccacctggtgtccacagtgtacacccaggaccagcacctgcacaacttcttccagtactgccagaagacagaaagtggggcccaggccctgggcaatgagctggtgaagtacctgaagagcctgcacgccatggagggccacgtgatgattgccttcctgcccaccatcctgaaccagctgttccgggtgctgacccgggccacccaggaggaggtggccgtgaatgtgaccagggtcatcatccacgtggtggcccagtgccacgaggagggcctggagagccacctgcggagctatgtgaagtatgcctacaaggccgagccctacgtggccagcgagtacaagacagtgcatgaggagctgaccaagtccatgaccaccatcctgaagcccagcgctgacttcctgaccagcaacaagctgctgaagtacagctggttcttctttgatgtgctgatcaagtccatggcccagcacctgattgagaacagcaaggtgaagctgctgaggaaccagcgcttccctgccagctaccaccacgctgtggagaccgtggtgaacatgctgatgccccacatcacccagaagttccgggacaaccctgaggccagcaagaatgccaaccacagcctggccgtgttcatcaagcgctgcttcaccttcatggaccggggctttgtgttcaagcagatcaacaactacatcagctgctttgcccctggggaccccaagaccctgtttgagtacaagtttgagttcctgcgggtggtgtgcaaccacgagcactacatccccctgaacctgcccatgccctttgggaagggccgcatccagcgctaccaggacctgcagctggactacagcctgacagatgagttctgcaggaaccacttcctggtgggcctgctgctgcgggaggtgggcacagccctgcaggagttccgggaggtgcggctcatcgccatctctgtgctgaagaacctgctgatcaagcacagctttgatgacagatatgccagccgcagccaccaggccagaattgccaccctgtacctgcccctgtttggcctgctgattgaaaatgtgcagaggatcaacgtgagagatgtgagccccttccctgtgaatgccggcatgacagtgaaggatgagagcctggccctgcctgctgtgaaccccctggtgaccccccagaagggcagcaccctggacaacagcctgcacaaggacctgctgggcgccatcagcggcattggaaatgccccctgcagctgtggcctgctgagcaccatcaccctgaaggtgtcctggagccagtag

SEQ ID NO: 47330 - DNA, 3762 bp, Artificial Sequence
  derived and/or modified sequence
atgcaggccgacaagtgccggaccagcagccggagcgtgaagaaggagttggtaatcgaaagtcccctgcagtacaaggatgccgcacaaggcgaggtcgaggccgagtctccaggacctgtgcctgccaaacctaaacttattgagccattagattacgagaatgtgattgtccagaagaaaacgcagatcctgaacgattgcctgcgagagatgctgttgttcccatatgacgattttcagaccgccatcttacggcgtcaaggaagatatatctgctccactgtcccggccaaagccgaagaggaggctcagtcactgtttgttactgaatgcatcaaaacctacaatagcgactggcacctggtcaattacaagtatgaagattattcgggcgagttccggcaactgccgaataaggtggttaagctggataaattaccagtgcacgtgtacgaagttgacgaagaagtggataaagatgaagatgctgcttctctgggttcccagaaaggcgggattactaagcacggatggctttataaaggcaatatgaacagtgcgatctctgtcaccatgaggtcatttaaaaggcgtttcttccatctcatccagcttggcgatggctcttacaacctaaacttctataaagatgagaagatctctaaagaacctaagggctcaatctttcttgattcgtgtatgggcgtcgtgcagaacaataaagtccgacggttcgcctttgagttgaaaatgcaggacaagagttcctatctgttggctgccgattctgaagtagagatggaggaatggataaccattctcaacaagattctgcagctgaacttcgaggcagccatgcaggagaaacgaaacggtgacagccacgaggacgatgagcagtcaaagcttgaaggctccggtagcggattggactcgtatctgccggagcttgcaaaatccgcaagagaggcagagataaaacttaaaagcgagtccagagtgaagttgttctacctggatccagacgcccagaagctcgatttcagctctgcagagcccgaagtgaagtccttcgaggagaagtttgggaaaagaatcttggtgaagtgcaatgacctgtcctttaacctgcaatgttgcgtggctgagaacgaggaggggcctactactaatgtggagcccttcttcgtgactctgagcctcttcgacatcaagtataatcggaagatttccgctgattttcacgtggacctcaaccatttcagcgtgcgtcagatgctggccaccacatcacctgccctgatgaacggaagcgggcaatctccatccgtgctcaagggcattttacacgaggcagcaatgcagtaccctaagcaaggaatcttttctgtcacgtgcccgcaccccgacatattcttggtggctcgaatcgaaaaggtgctccagggttccattactcattgcgccgagccttacatgaaaagcagcgatagcagtaaggtggcccaaaaagtcttgaagaacgctaagcaggcttgtcaacgcttaggacagtaccggatgccctttgcctgggctgctcgaactctctttaaagacgcttccggcaatttagataaaaacgccaggttttcagccatctaccgccaggattctaataaactgtctaacgacgacatgttgaagctgctagctgactttagaaagcccgaaaaaatggccaagctgccagtgatcctagggaacttagacatcaccatcgacaacgtttcatctgatttccccaactatgtgaactcaagctatatccctactaaacagtttgaaacgtgttccaagaccccaatcacctttgaggtggaggagttcgttccatgtatccctaagcatactcagccctacacgatttatacgaatcatctttacgtttatcccaagtacttaaaatacgattcacaaaaaagtttcgctaaagcaaggaacatcgccatttgcattgagtttaaagattccgatgaggaggattctcagccgcttaagtgcatatatggcaggcctgggggcccagtcttcactcgaagtgcctttgctgcagttctacaccatcaccagaatcccgagttctatgacgagatcaaaattgagctcccgacacagctccacgaaaagcaccatctcctgctgaccttctttcatgtgagctgtgataatagttctaagggcagcacaaaaaaacgagatgtggtcgagacccaagtaggttattcttggctgccactactaaaagatgggcgcgtggtgacgagcgaacagcacattcctgtcagcgctaacctgcctagcgggtatctcggttatcaagagctgggtatgggccggcactacggccccgagatcaagtgggtagatggcggcaagcctcttttgaagatctcaacccacctggtgtctactgtctatacacaggatcagcatttgcacaactttttccagtactgtcagaagaccgagagtggcgcacaggcactgggcaacgagctggtgaagtatcttaaatcactgcatgccatggagggacacgtcatgatcgcctttctcccaaccatcttgaatcagttgtttagagtcctgactagagccacacaggaagaggttgcagttaacgtgaccagggtgataatacacgtggttgcacaatgtcatgaagagggactggaatcccacctgcggtcatacgttaagtatgcatacaaagcagaaccctacgtggcctcagaatacaagacagtgcacgaagagctgacaaaaagtatgaccaccatactgaagccaagtgccgacttcctgacttccaataagctactgaagtactcctggttcttcttcgacgtgctgatcaagagcatggctcaacatctgatcgaaaacagcaaggtaaaactactgagaaatcaaaggttccccgcaagttaccaccatgcagtggaaaccgtggtgaatatgctgatgccacatattacacagaagttccgggataaccctgaagcctctaagaacgccaaccacagcctggctgtgttcattaagcgctgctttacatttatggaccggggattcgtgtttaaacagatcaataactacatcagctgcttcgctccgggagaccccaagacgttattcgagtataagttcgagttcttaagggtcgtatgcaatcacgaacactacataccccttaacctgcccatgccctttggaaagggtagaatccaaagatatcaggatctccaactggattattcactgactgatgaattctgccggaatcacttcctggtgggcttattgctaagagaggtggggaccgccctccaagaatttagggaggtgagactgatcgccatatccgtgctgaagaacctcctcattaaacacagttttgatgatcggtacgcttctagatctcatcaggcccggattgcaaccctatatcttcccctgttcggactcctcatagagaacgtgcagcgcattaacgtgagagacgtatccccctttcctgtaaacgcggggatgactgttaaggacgagtctttggcattacccgccgtcaaccctctcgtgactccacagaaggggagtacactggacaatagcttacacaaagacttgctcggagctatttctggaatcgggaacgccccttgttcttgcggactcttatcaaccatcacccttaaggtgtcgtggtcccagtag

SEQ ID NO: 47331 - DNA, 3762 bp, Artificial Sequence
  derived and/or modified sequence
atgcaggccgacaagtgccggacgtcaagtaggtcggtaaagaaggaactggttattgaatccccgctgcagtacaaagacgcagcccagggcgaggtcgaggcggagtctcccggtccagtgccggcaaaaccaaaactcattgaacctctggattatgagaatgtcatcgtgcaaaaaaagacccagattctgaatgattgcctccgggagatgttattgttcccgtatgacgacttccagaccgccatcctcagacggcagggacggtacatttgttcaacagttccagcaaaagctgaggaagaggcccaaagcctcttcgtcaccgagtgtattaaaacctacaattccgactggcatttggtgaattataagtacgaggattactctggggaatttaggcagctgcccaacaaagtggtgaagcttgataagctgccagtgcacgtctatgaagttgatgaggaggttgacaaggatgaggatgctgccagcctggggtcccagaagggaggcattacaaaacatgggtggctttacaagggaaatatgaactctgccataagtgtgacaatgcgatcctttaaacgcaggtttttccacctgatccagctgggcgacggcagttacaatctgaatttttacaaggatgagaagatctccaaggagcctaaggggagcatatttctggacagttgtatgggggtggtgcaaaataacaaggtgaggcggttcgcttttgaattgaaaatgcaagataaatcctcctatttgctggctgccgactccgaagtggagatggaagagtggattaccattcttaacaagatcctgcagctgaatttcgaggcggctatgcaagagaagagaaatggcgatagccacgaagatgacgaacagtctaagctggaagggtccggtagcggcctggactcctatctacccgaactggccaagagtgcccgagaggccgagatcaagcttaaatcagaaagtcgggtgaagctattctatcttgatccggacgcacaaaaattggacttttcttctgctgagcctgaggtgaagtcgttcgaagagaagttcggcaagaggattctggtcaagtgcaacgacctgtcctttaatctccagtgctgtgtggccgaaaatgaagaggggcctaccacgaacgtcgagcccttcttcgtcactctcagccttttcgacattaagtacaaccgaaagatttcagccgacttccacgtcgacctaaaccatttcagtgtcagacagatgttggctactacttcaccagccttgatgaatggaagtgggcagagtccaagtgttctaaagggaatactgcatgaagccgctatgcagtacccaaagcagggaatcttttccgttacgtgtcctcatcccgacatttttcttgtggcacgcatcgagaaggtgctgcagggatccataactcattgcgcggagccctatatgaagtcctctgactccagtaaagtcgctcagaaggtgctcaagaacgccaagcaggcgtgccaacgtctagggcagtacaggatgcccttcgcttgggccgcacggaccttgtttaaagatgcaagcgggaacctcgataaaaacgcgcgattcagcgctatataccgccaggactcaaacaagctatccaatgacgatatgttaaaactgctcgcagacttcagaaagcccgaaaagatggccaagttacccgtcatcttgggtaatctggacattactatcgacaacgtaagctccgattttcccaactacgtgaactctagctacatcccaacgaaacagttcgaaacgtgtagcaaaacccctattaccttcgaggtggaggagtttgtgccttgcatacctaagcacacccagccttacaccatttatactaatcatctctatgtctatcccaaatacctgaaatatgactcacaaaagagcttcgccaaagcgcgaaacattgctatctgcatagagttcaaggactctgatgaggaggattctcaacccttaaagtgtatctacggcagacccggaggacctgtgttcactcggtcggctttcgcagctgttttgcatcaccaccagaaccctgaattctatgacgagattaagatcgaactacccacccagctccatgagaagcaccacctgctcctcacgttcttccacgtgtcttgtgataactcttccaagggaagtaccaagaaacgcgacgtggttgaaactcaggtgggatactcatggcttcccctattgaaggatgggagagtggttactagtgagcagcacatcccagttagtgccaacctccccagcggctatctgggatatcaggaacttggcatgggccgtcattacgggcctgagattaaatgggttgatggaggtaaacccttactgaagattagtactcatctggtatccacagtgtatactcaagaccagcacttgcataatttcttccaatattgtcagaaaacggagtcaggagcgcaggccttaggcaatgagctggtgaaatacctcaaatctcttcatgctatggaaggccatgtcatgatagcctttctgcccacaatcctcaatcaactgtttcgggtgctgacacgcgctacgcaagaggaggttgccgtgaatgtaacccgggtaattattcatgttgtggcacaatgtcatgaggagggtctggagagccaccttcggagctacgtcaaatatgcttacaaagccgagccctatgtcgcctcagaatacaagactgtccacgaagaactgaccaaaagtatgacaaccatactaaagcctagcgcagacttcctgacctctaataaactactgaaatactcttggttcttcttcgacgtgcttatcaagagcatggcccagcatttgattgagaattccaaggtaaagctgctgagaaatcagcgcttccccgcttcctatcaccacgctgtagaaaccgtagtgaatatgctgatgccacatattacgcagaagttccgcgacaatcctgaagcgtccaaaaacgctaaccatagcctggccgtcttcataaagaggtgcttcactttcatggatagagggttcgtcttcaagcaaattaataactatatctcttgctttgctccaggcgatcccaaaacgctgttcgagtacaaatttgagttcctgcgggtggtttgtaatcacgagcactatattcctttgaacctgcccatgcccttcggtaagggccgaattcagcgttatcaggatctccagttggactactccctgacggacgagttttgcagaaaccattttttggtggggctacttctgcgcgaagtaggtacagctctgcaggaattcagggaagtccgtctgatcgcaatcagcgttctgaagaatttactgattaaacattctttcgatgacagatacgccagtcggtcacatcaggctcgtatcgcaaccctgtatctccctttatttggcttactgatagagaacgtccagaggataaacgtgcgggacgttagcccatttcctgttaacgccggtatgacagtgaaggatgaaagtctcgctctgccggcagtcaatcctctggtaaccccccagaaaggctcgaccctggataactcgttacataaagatttgctgggagctatttcgggaattgggaatgccccatgcagttgcggcttactgagcaccatcaccctcaaagtgtcatggagtcaatag

SEQ ID NO: 47332 - protein, 181 aa, Artificial Sequence
  derived and/or modified sequence
MRSGKASCTLETVWEDKHKYEEAERRFYEHEATQAAASAQQLPAEGPAMNGPGQDDPEDADEAEAPDGGSRRDPRKSQDSRKPLQKKRKRSPKSGLGPADLALLGLSAERVWLDKSLFDQAESSYRQKLADVAAQAAWPPALAPWGLCTHGNQVACHHVTWGIWVNKSSFDQAERAFVEWS

SEQ ID NO: 47333 - protein, 63 aa, Artificial Sequence
  derived and/or modified sequence
MRSGKASCTLETVWEDKHKYEEAERRFYEHEATQAAASAQQLPAEGPAMNGPGQDDPEDADEA

SEQ ID NO: 47334 - protein, 81 aa, Artificial Sequence
  derived and/or modified sequence
MRSGKASCTLETVWEDKHKYEEAERRFYEHEATQAAASAQQLPAEGPAMNGPGQDDPEDADEAEAPDGGSRRDPRKSQDSR

SEQ ID NO: 47335 - protein, 53 aa, Artificial Sequence
  derived and/or modified sequence
MRSGKASCTLETVWEDKHKYEEAERRFYEHEATQAAASAQQLPAEGPAMNGPG

SEQ ID NO: 47336 - protein, 157 aa, Artificial Sequence
  derived and/or modified sequence
MRSGKASCTLETVWEDKHKYEEAERRFYEHEATQAAASAQQLPAEGPAMNGPGQDDPEDADEAEAPDGGSRRDPRKSQDSRKPLQKKRKRSPKSGLGPADLALLGLSAERVWLDKSLFDQAESSYRQKLADVAAQAAWPPALAPWGLCTHGNQVACH

SEQ ID NO: 47337 - protein, 146 aa, Artificial Sequence
  derived and/or modified sequence
MRSGKASCTLETVWEDKHKYEEAERRFYEHEATQAAASAQQLPAEGPAMNGPGQDDPEDADEAEAPDGGSRRDPRKSQDSRKPLQKKRKRSPKSGLGPADLALLGLSAERVWLDKSLFDQAESSYRQKLADVAAQAAWPPALAPWG

SEQ ID NO: 47338 - protein, 129 aa, Artificial Sequence
  derived and/or modified sequence
MRSGKASCTLETVWEDKHKYEEAERRFYEHEATQAAASAQQLPAEGPAMNGPGQDDPEDADEAEAPDGGSRRDPRKSQDSRKPLQKKRKRSPKSGLGPADLALLGLSAERVWLDKSLFDQAESSYRQKL

SEQ ID NO: 47339 - protein, 84 aa, Artificial Sequence
  derived and/or modified sequence
MRSGKASCTLETVWEDKHKYEEAERRFYEHEATQAAASAQQLPAEGPAMNGPGQDDPEDADEAEAPDGGSRRDPRKSQDSRKPL

SEQ ID NO: 47340 - protein, 179 aa, Artificial Sequence
  derived and/or modified sequence
MRSGKASCTLETVWEDKHKYEEAERRFYEHEATQAAASAQQLPAEGPAMNGPGQDDPEDADEAEAPDGGSRRDPRKSQDSRKPLQKKRKRSPKSGLGPADLALLGLSAERVWLDKSLFDQAESSYRQKLADVAAQAAWPPALAPWGLCTHGNQVACHHVTWGIWVNKSSFDQAERAFVE

SEQ ID NO: 47341 - protein, 49 aa, Artificial Sequence
  derived and/or modified sequence
MRSGKASCTLETVWEDKHKYEEAERRFYEHEATQAAASAQQLPAEGPAM

SEQ ID NO: 47342 - protein, 68 aa, Artificial Sequence
  derived and/or modified sequence
MRSGKASCTLETVWEDKHKYEEAERRFYEHEATQAAASAQQLPAEGPAMNGPGQDDPEDADEAEAPDG

SEQ ID NO: 47343 - DNA, 546 bp, Artificial Sequence
  derived and/or modified sequence
atgagaagcggtaaagctagctgcacactggaaacagtgtgggaagataagcacaaatatgaagaagcggaacgtaggttttacgagcacgaggccacccaggccgccgctagcgcccagcagctgcccgccgaaggacccgcaatgaacggcccagggcaggacgatccagaagatgccgacgaagcagaagcacctgacggaggtagcagacgggaccctcggaagtcacaggattctaggaagcccctgcaaaaaaaacggaagaggagccctaaatcaggtctcggccccgccgatctggccttgttaggcctgtcggctgagagagtgtggctcgataagagtctcttcgatcaagctgaatcctcctatagacagaaattggcagatgtggcggctcaggccgcatggcccccagctctggccccatggggtctctgtacccacggaaaccaggtagcttgccaccacgtgacatggggaatatgggtcaacaaatcaagttttgaccaggcggagagggcgttcgtcgaatggagttag

SEQ ID NO: 47344 - DNA, 192 bp, Artificial Sequence
  derived and/or modified sequence
atgcggagcggaaaagcaagctgcaccctggagaccgtctgggaagacaagcacaagtacgaagaagcagagcgtaggttttacgagcacgaggccactcaggctgccgcttccgcccagcagctgcctgcagaggggccggccatgaatgggcctgggcaggacgacccagaagatgccgacgaggcatag

SEQ ID NO: 47345 - DNA, 246 bp, Artificial Sequence
  derived and/or modified sequence
atgcggagcggcaaagcttcctgcacacttgaaactgtgtgggaggacaaacacaagtacgaagaagcagaaagaagattctatgaacatgaagcaacacaggcagccgcctctgctcagcaattaccagccgagggccccgcgatgaatggccctggacaagatgatccagaggacgctgacgaggcagaggctcctgacggcggctctaggcgcgacccgcgtaaatcacaggacagcaggtag

SEQ ID NO: 47346 - DNA, 162 bp, Artificial Sequence
  derived and/or modified sequence
atgcggtcaggcaaggcgtcatgtacccttgaaacagtttgggaggacaaacacaaatatgaggaagccgagcgaagattctacgagcatgaggccactcaggcggccgctagcgcacagcagctgcccgcagagggccccgctatgaacgggcctgggtag

SEQ ID NO: 47347 - DNA, 474 bp, Artificial Sequence
  derived and/or modified sequence
atgcgttcagggaaagccagttgtaccctggagaccgtgtgggaggacaaacacaagtacgaagaggccgagaggagattttacgagcatgaggcaacgcaggctgctgcatcagctcagcagcttcctgccgaaggaccagctatgaacggccccgggcaagacgaccccgaggatgcagacgaagctgaggcccctgatggagggagcagacgggaccctcgaaagagtcaggactcacgtaaaccactccaaaagaagaggaaacgtagtccaaaatccggtctaggtcccgcagacctggcccttctagggttgtctgcagagagagtgtggctggataaaagcctgttcgaccaagccgagtccagctacaggcagaagctagctgatgtcgctgctcaggccgcctggccaccagcactggcaccatggggcttgtgcacacatgggaatcaggtggcttgtcattag

SEQ ID NO: 47348 - DNA, 441 bp, Artificial Sequence
  derived and/or modified sequence
atgaggagtggaaaagcatcctgcacccttgagacagtgtgggaagacaaacacaaatacgaggaagccgaacggaggttttatgagcacgaggctacgcaggccgccgcttctgctcagcagctgccagccgaaggtcccgctatgaacggaccaggccaggacgatccagaagatgctgatgaagccgaggctccggatggcggatccaggcgtgatcctcgcaaatctcaagattctcgtaagccactccagaagaaaagaaaacgctccccaaagtccggtctcggcccagcagaccttgctttactagggttatcggctgaaagagtgtggctggataagagtttgtttgaccaagccgagtcttcatacagacagaagctggcggatgtggccgctcaggcggcttggcctcccgcactggctccgtggggatag

SEQ ID NO: 47349 - DNA, 390 bp, Artificial Sequence
  derived and/or modified sequence
atgcgttctggaaaagcgagctgtacactggagactgtgtgggaggataagcacaagtacgaggaagccgagaggaggttttacgagcacgaagctacacaagccgccgccagtgctcagcagttgcctgcggagggcccagccatgaatgggcccggtcaggatgatccggaagatgctgatgaggcggaggctccagacggcggctctcgcagggaccctcggaaatctcaggactctcgcaagccattacagaaaaagcgcaagagatcccccaaatccgggctgggccctgcggacctggccctgctgggcctgtccgctgagcgcgtttggctcgataagagtctgtttgaccaagctgagagtagttatcgccagaagctgtag

SEQ ID NO: 47350 - DNA, 255 bp, Artificial Sequence
  derived and/or modified sequence
atgcgctccggtaaagccagttgcacgttggaaactgtctgggaggacaaacacaagtatgaggaggccgagcggcgcttctacgaacatgaagctacccaggcggctgctagcgcgcagcagctgccagctgagggacccgccatgaacgggcccggtcaggacgaccctgaggacgccgacgaagccgaagcccccgatggcgggtcccgtagggatccccgcaaaagccaggatagcagaaaaccgttgtag

SEQ ID NO: 47351 - DNA, 540 bp, Artificial Sequence
  derived and/or modified sequence
atgcggtccgggaaagcctcttgcactctggagacagtctgggaagataagcacaagtatgaggaagcggaaagacggttttatgagcacgaggccacacaggccgcagcttctgcccagcagctgccagccgagggcccggccatgaacggtccagggcaagatgacccagaggatgccgacgaagcagaagcacccgatggtggctccagaagggatccaagaaaaagccaagattcaaggaaacccttgcagaagaagagaaaaagatcccctaaatctggcctaggccccgcagacttggctttactgggcctgtctgccgagcgtgtctggctggacaaaagtctctttgaccaggctgagagcagctaccgccagaagctcgccgatgtggctgcccaagcagcttggccgcctgcgctggctccttggggcctctgcacacacggaaatcaagtcgcctgtcatcatgtaacctggggaatctgggtcaacaaatcttcatttgatcaggctgagagggctttcgtcgaatag

SEQ ID NO: 47352 - DNA, 150 bp, Artificial Sequence
  derived and/or modified sequence
atgcggtctggaaaagctagctgcaccctggagacagtgtgggaagacaagcataagtacgaagaggcagaaaggagattctatgaacatgaagccactcaggcagccgcatcggcacaacagctccctgccgagggccctgcgatgtag

SEQ ID NO: 47353 - DNA, 207 bp, Artificial Sequence
  derived and/or modified sequence
atgcggagcggcaaggcatcgtgcacactggagactgtgtgggaagacaaacacaaatatgaagaggccgagaggaggttttacgagcacgaggccactcaggcggctgcgtcagcacagcaacttcctgctgaagggccagcgatgaacggtccggggcaggacgacccagaagatgccgacgaggctgaggcccccgatggctag

SEQ ID NO: 47354 - DNA, 546 bp, Artificial Sequence
  derived and/or modified sequence
atgaggtctgggaaggccagctgcaccctggagaccgtgtgggaggacaagcacaagtatgaggaggccgagcggcgcttctatgagcacgaggccacccaggccgccgccagcgcccagcagctgcctgctgagggccctgccatgaatggacctggccaggatgatcctgaagatgctgatgaagctgaggccccagatggcggcagcagaagagaccccaggaagagccaggacagcaggaagcccctgcagaagaagaggaagaggagccccaagagcggcctgggccctgctgacctggccctgctgggcctgtctgctgagcgggtgtggctggacaagagcctgtttgaccaggccgagagcagctaccggcagaagctggctgatgtggccgcccaggccgcctggcccccagccctggccccctggggcctgtgcacccacggcaaccaggtggcctgccaccacgtgacctggggcatctgggtgaacaagagcagctttgaccaggccgagcgggcctttgtggagtggagctag

SEQ ID NO: 47355 - DNA, 192 bp, Artificial Sequence
  derived and/or modified sequence
atgaggtctgggaaggccagctgcaccctggagaccgtgtgggaggacaagcacaagtatgaggaggccgagcggcgcttctatgagcacgaggccacccaggccgccgccagcgcccagcagctgcctgctgagggccctgccatgaatggacctggccaggatgatcctgaagatgctgatgaggcctag

SEQ ID NO: 47356 - DNA, 246 bp, Artificial Sequence
  derived and/or modified sequence
atgaggtctgggaaggccagctgcaccctggagaccgtgtgggaggacaagcacaagtatgaggaggccgagcggcgcttctatgagcacgaggccacccaggccgccgccagcgcccagcagctgcctgctgagggccctgccatgaatggacctggccaggatgatcctgaagatgctgatgaagctgaggccccagatggcggcagcagaagagaccccaggaagagccaggacagcaggtag

SEQ ID NO: 47357 - DNA, 162 bp, Artificial Sequence
  derived and/or modified sequence
atgaggtctgggaaggccagctgcaccctggagaccgtgtgggaggacaagcacaagtatgaggaggccgagcggcgcttctatgagcacgaggccacccaggccgccgccagcgcccagcagctgcctgctgagggccctgccatgaatggacctggatag

SEQ ID NO: 47358 - DNA, 474 bp, Artificial Sequence
  derived and/or modified sequence
atgaggtctgggaaggccagctgcaccctggagaccgtgtgggaggacaagcacaagtatgaggaggccgagcggcgcttctatgagcacgaggccacccaggccgccgccagcgcccagcagctgcctgctgagggccctgccatgaatggacctggccaggatgatcctgaagatgctgatgaagctgaggccccagatggcggcagcagaagagaccccaggaagagccaggacagcaggaagcccctgcagaagaagaggaagaggagccccaagagcggcctgggccctgctgacctggccctgctgggcctgtctgctgagcgggtgtggctggacaagagcctgtttgaccaggccgagagcagctaccggcagaagctggctgatgtggccgcccaggccgcctggcccccagccctggccccctggggcctgtgcacccacggcaaccaggtggcctgccactag

SEQ ID NO: 47359 - DNA, 441 bp, Artificial Sequence
  derived and/or modified sequence
atgaggtctgggaaggccagctgcaccctggagaccgtgtgggaggacaagcacaagtatgaggaggccgagcggcgcttctatgagcacgaggccacccaggccgccgccagcgcccagcagctgcctgctgagggccctgccatgaatggacctggccaggatgatcctgaagatgctgatgaagctgaggccccagatggcggcagcagaagagaccccaggaagagccaggacagcaggaagcccctgcagaagaagaggaagaggagccccaagagcggcctgggccctgctgacctggccctgctgggcctgtctgctgagcgggtgtggctggacaagagcctgtttgaccaggccgagagcagctaccggcagaagctggctgatgtggccgcccaggccgcctggcccccagccctggccccctggggctag

SEQ ID NO: 47360 - DNA, 390 bp, Artificial Sequence
  derived and/or modified sequence
atgaggtctgggaaggccagctgcaccctggagaccgtgtgggaggacaagcacaagtatgaggaggccgagcggcgcttctatgagcacgaggccacccaggccgccgccagcgcccagcagctgcctgctgagggccctgccatgaatggacctggccaggatgatcctgaagatgctgatgaagctgaggccccagatggcggcagcagaagagaccccaggaagagccaggacagcaggaagcccctgcagaagaagaggaagaggagccccaagagcggcctgggccctgctgacctggccctgctgggcctgtctgctgagcgggtgtggctggacaagagcctgtttgaccaggccgagagcagctaccggcagaagctgtag

SEQ ID NO: 47361 - DNA, 255 bp, Artificial Sequence
  derived and/or modified sequence
atgaggtctgggaaggccagctgcaccctggagaccgtgtgggaggacaagcacaagtatgaggaggccgagcggcgcttctatgagcacgaggccacccaggccgccgccagcgcccagcagctgcctgctgagggccctgccatgaatggacctggccaggatgatcctgaagatgctgatgaagctgaggccccagatggcggcagcagaagagaccccaggaagagccaggacagcaggaagcccctgtag

SEQ ID NO: 47362 - DNA, 540 bp, Artificial Sequence
  derived and/or modified sequence
atgaggtctgggaaggccagctgcaccctggagaccgtgtgggaggacaagcacaagtatgaggaggccgagcggcgcttctatgagcacgaggccacccaggccgccgccagcgcccagcagctgcctgctgagggccctgccatgaatggacctggccaggatgatcctgaagatgctgatgaagctgaggccccagatggcggcagcagaagagaccccaggaagagccaggacagcaggaagcccctgcagaagaagaggaagaggagccccaagagcggcctgggccctgctgacctggccctgctgggcctgtctgctgagcgggtgtggctggacaagagcctgtttgaccaggccgagagcagctaccggcagaagctggctgatgtggccgcccaggccgcctggcccccagccctggccccctggggcctgtgcacccacggcaaccaggtggcctgccaccacgtgacctggggcatctgggtgaacaagagcagctttgaccaggccgagcgggcctttgtggagtag

SEQ ID NO: 47363 - DNA, 150 bp, Artificial Sequence
  derived and/or modified sequence
atgaggtctgggaaggccagctgcaccctggagaccgtgtgggaggacaagcacaagtatgaggaggccgagcggcgcttctatgagcacgaggccacccaggccgccgccagcgcccagcagctgcctgctgagggccctgccatgtag

SEQ ID NO: 47364 - DNA, 207 bp, Artificial Sequence
  derived and/or modified sequence
atgaggtctgggaaggccagctgcaccctggagaccgtgtgggaggacaagcacaagtatgaggaggccgagcggcgcttctatgagcacgaggccacccaggccgccgccagcgcccagcagctgcctgctgagggccctgccatgaatggacctggccaggatgatcctgaagatgctgatgaagctgaggccccagatggatag

SEQ ID NO: 47365 - DNA, 546 bp, Artificial Sequence
  derived and/or modified sequence
atgcggagcggcaaggccagctgcaccctggagaccgtgtgggaggataaacataaatacgaagaggctgagaggagattttacgagcacgaggcaacccaggcggcagcaagcgcacaacagctgccagcagagggaccagccatgaatggtccaggtcaggatgaccccgaagacgctgatgaagccgaggccccggacggaggctcccgtcgcgaccctcgcaagtcacaggactcaagaaaaccccttcaaaaaaaacgaaaacgctcaccaaagagcggcctagggccagccgatttagccctccttggccttagcgcggagcgggtatggctggacaagtcccttttcgatcaagccgaatcaagctataggcaaaagctcgccgatgtggccgctcaggctgcatggccccccgccctggccccatggggcctgtgcactcacggcaaccaggtggcctgccaccacgttacatggggcatctgggtaaataagtcatcattcgatcaggctgagcgggcttttgttgagtggagctag

SEQ ID NO: 47366 - DNA, 192 bp, Artificial Sequence
  derived and/or modified sequence
atgcggagcggcaaggccagctgcaccctggagaccgtgtgggaggacaaacataagtatgaagaagccgaacgaaggttctacgaacatgaggcgacccaggctgctgcctctgctcaacagctgcctgccgaagggcccgcgatgaatggtcccggtcaggatgatcccgaagacgcagacgaggcatag

SEQ ID NO: 47367 - DNA, 246 bp, Artificial Sequence
  derived and/or modified sequence
atgcggagcggcaaggccagctgcaccctggagaccgtgtgggaggataagcataaatacgaagaggcagaacggcggttttatgaacacgaagccacccaagcggctgccagtgcacaacaacttccagcggaggggcccgccatgaacggtccgggacaggatgaccccgaggatgccgatgaagcagaagcacccgacggaggctcaagacgcgatccccgcaagagccaggattccaggtag

SEQ ID NO: 47368 - DNA, 162 bp, Artificial Sequence
  derived and/or modified sequence
atgcggagcggcaaggccagctgcaccctggagaccgtgtgggaggacaagcataaatatgaagaggccgagcgccgattttacgagcacgaggccacgcaggcagccgcctccgctcagcagctgccagctgagggaccagctatgaacggaccagggtag

SEQ ID NO: 47369 - DNA, 474 bp, Artificial Sequence
  derived and/or modified sequence
atgcggagcggcaaggccagctgcaccctggagaccgtgtgggaggacaaacacaagtacgaggaagcggagcggcgcttctacgagcacgaggccactcaagcggctgcgtctgctcagcagctcccagccgaagggccagcaatgaatgggcccggccaggatgatcctgaggacgcggatgaggcggaagcccccgacggaggtagccggagggatccgcgcaagagtcaagacagccgaaagccattgcagaaaaaacggaagcggtcccctaagtcggggctcggaccagccgacttagccctgctgggattatccgctgagcgagtgtggctcgacaaatctctgttcgaccaggctgagtcgtcctacaggcagaaactggcggacgtggccgcccaagcggcttggccacccgcactggctccctgggggctctgcacccacggcaaccaggtggcctgtcattag

SEQ ID NO: 47370 - DNA, 441 bp, Artificial Sequence
  derived and/or modified sequence
atgcggagcggcaaggccagctgcaccctggagaccgtgtgggaggataagcataaatacgaggaagccgagcggcggttctacgaacatgaagctacccaggctgctgctagtgcccagcagctgcccgctgagggtcccgccatgaacggacctggccaggacgatccagaggacgcggacgaggcagaagctcctgatggtggctcgaggagagacccacgaaagtctcaagatagccgaaagcccctgcagaagaagcgcaagcggtctccgaaatcaggacttggaccagctgacctggcattattggggttaagtgccgagagagtgtggctcgataaatctttgttcgaccaggccgaatcgtcatatagacaaaagctggcagatgtggccgcccaggctgcctggccgcctgctttagctccctgggggtag

SEQ ID NO: 47371 - DNA, 390 bp, Artificial Sequence
  derived and/or modified sequence
atgcggagcggcaaggccagctgcaccctggagaccgtgtgggaggacaagcataaatacgaagaggcagagcggcggttctacgaacatgaagccacccaagccgccgccagcgcccagcagctgcccgcagaggggcccgcgatgaacgggcctgggcaggatgacccagaagacgcagatgaggcagaggcccccgacggaggaagtaggcgggatcccagaaaaagccaagactcacgaaaacccttgcagaagaagcgcaaacggagccccaagagtggactgggacccgctgacctggccctgctcggcttgtccgccgagcgtgtctggctcgacaagagcttatttgatcaggcagaaagtagctaccggcagaagctctag

SEQ ID NO: 47372 - DNA, 255 bp, Artificial Sequence
  derived and/or modified sequence
atgcggagcggcaaggccagctgcaccctggagaccgtgtgggaggataagcacaaatacgaggaagcagagcggaggttttatgaacatgaagcaacgcaggctgccgcatcagctcagcagctgcctgctgagggaccagcaatgaatggaccaggtcaagacgaccccgaggacgctgatgaagcagaagctcctgacggaggttctcgccgtgacccaaggaaatcccaggattcaaggaagcccctttag

SEQ ID NO: 47373 - DNA, 540 bp, Artificial Sequence
  derived and/or modified sequence
atgcggagcggcaaggccagctgcaccctggagaccgtgtgggaggacaaacacaagtatgaagaggctgagcggagattctatgagcatgaggccactcaggcggccgcgtccgctcagcagttgcccgcggagggcccggccatgaacggtcctgggcaggatgacccagaagacgcagacgaagccgaagcacccgacggcggaagccgccgtgaccccagaaagtctcaggactcacgtaaacccctgcagaagaaaaggaagcggtcccccaagagtggcctgggccccgcagatttggcactgctagggctttcagctgaaagagtgtggctcgataagtcactcttcgatcaggcagaatctagctaccgccagaagttggccgacgtggctgcccaagctgcctggcccccagccctggccccgtggggactttgcacccatggcaaccaggtagcctgtcaccatgtgacgtggggcatttgggtcaataagtctagcttcgatcaggcagagcgtgctttcgtagaatag

SEQ ID NO: 47374 - DNA, 150 bp, Artificial Sequence
  derived and/or modified sequence
atgcggagcggcaaggccagctgcaccctggagaccgtgtgggaggacaagcacaaatatgaagaagctgaacgacggttctacgagcatgaagccacacaggcagctgcaagcgcccaacagttacccgctgaaggacctgccatgtag

SEQ ID NO: 47375 - DNA, 207 bp, Artificial Sequence
  derived and/or modified sequence
atgcggagcggcaaggccagctgcaccctggagaccgtgtgggaggacaagcataagtacgaagaagcggagaggaggttctatgagcatgaggcaacccaggccgcagcctctgctcagcagttacctgcagaaggtcctgcaatgaacgggcctgggcaggacgacccggaagatgccgacgaggcggaggctcctgacgggtag

SEQ ID NO: 47376 - DNA, 546 bp, Artificial Sequence
  derived and/or modified sequence
atgcggtctggtaaagcctcatgtaccttagaaacagtctgggaagacaaacacaagtacgaagaggccgaaagaagattctatgagcatgaagcaacgcaggccgcagcttcagcacaacagttaccagcagaggggcctgcaatgaacgggcctggacaggatgacccagaggatgcagacgaagcagaggctcccgacggcggaagcaggagagaccctagaaagagccaggattctagaaagcccctgcagaaaaaacgtaagcgctcccctaagtctggtctaggtcccgctgatctggcactactgggtctctcagcagagagggtgtggctagataaaagcctgttcgaccaggccgagagctcctacaggcagaagctggctgacgtagctgctcaggccgcatggccacctgcactcgccccttggggactctgtactcatggcaaccaggtcgcatgccaccacgtgacgtggggcatctgggtcaacaagagttctttcgaccaggccgagagagcttttgtggaatggagctag

SEQ ID NO: 47377 - DNA, 192 bp, Artificial Sequence
  derived and/or modified sequence
atgcgaagtgggaaagccagctgtacactggagacagtgtgggaggacaagcacaaatacgaggaggcagagaggcgtttttacgaacacgaggctacccaggctgccgctagcgcacagcagctaccagccgaaggcccagccatgaacggcccaggccaggatgatcccgaagatgccgatgaagcctag

SEQ ID NO: 47378 - DNA, 246 bp, Artificial Sequence
  derived and/or modified sequence
atgaggtcaggtaaagccagctgcacactcgagacagtttgggaggataaacataagtacgaagaggctgagaggcgattctacgagcatgaagctacccaggccgctgcatccgctcaacagctgcctgcagagggaccagccatgaacgggcctggtcaggatgatcccgaagacgccgatgaggcagaagccccagacggtgggtccagaagagatccgcgtaagagccaggacagcaggtag

SEQ ID NO: 47379 - DNA, 162 bp, Artificial Sequence
  derived and/or modified sequence
atgagaagcggcaaggcgtcttgcacgctcgaaacagtttgggaggacaaacataagtatgaggaagcagaacgcaggttttacgagcacgaagccactcaggctgctgctagcgcgcagcaactccctgctgaaggccctgccatgaacggccctggatag

SEQ ID NO: 47380 - DNA, 474 bp, Artificial Sequence
  derived and/or modified sequence
atgaggtcaggcaaggccagctgtactttagaaacagtctgggaagacaagcacaaatatgaggaagccgagcggcgattctacgagcatgaggcaacccaggcagcagcttcagcacagcagctgcctgcagaaggcccagccatgaatggtccgggacaggacgaccctgaggacgcagacgaggctgaggctcctgacgggggaagtcggagagacccacggaagtcccaggactcacgcaagccactgcaaaaaaaacgaaaaagatctccaaagtccgggctgggccctgctgatttggccctgctgggactgtctgctgagagagtttggctcgacaaaagcctattcgaccaggcagagtcttcataccgtcaaaagctggccgacgtagccgctcaggcagcatggcccccagctctagcgccttggggcttgtgtacgcatggtaatcaggttgcctgtcattag

SEQ ID NO: 47381 - DNA, 441 bp, Artificial Sequence
  derived and/or modified sequence
atgcgatcaggtaaggccagctgtactcttgagaccgtatgggaggataaacacaagtacgaggaagcggagcgcagattttatgaacatgaggctacacaggcagctgctagcgcccagcagctacctgccgagggtccggctatgaatggccctggacaagacgaccctgaggatgctgacgaggcagaggccccagatggagggagcaggagagacccacgtaaaagccaggactcgcgcaaaccactacaaaaaaaacggaaaagatctccaaagtcaggccttgggcctgccgacctagcgctgcttggactctctgcagagagagtttggctggataaatctctctttgatcaggccgagtcctcatacagacagaaactggccgacgtcgcggcacaggcagcctggccacccgcactagcgccatggggttag

SEQ ID NO: 47382 - DNA, 390 bp, Artificial Sequence
  derived and/or modified sequence
atgcgctctggtaaggccagttgcactctcgagacagtctgggaagacaaacacaaatacgaggaagctgaaaggcgcttctacgaacacgaggctacgcaggcagcagctagcgcccagcaactgcctgctgagggtcctgctatgaatgggccaggacaggatgacccagaggacgccgacgaagccgaggcccctgacggaggcagtcgtcgcgatccccgtaagtctcaggatagccgaaaaccacttcagaaaaagcggaagcgcagtcccaaaagcggtctaggaccagccgacctggctctgttggggctgtccgcagaacgggtttggcttgataaatctttgttcgaccaggccgagagctcttaccggcaaaagctttag

SEQ ID NO: 47383 - DNA, 255 bp, Artificial Sequence
  derived and/or modified sequence
atgcggtcgggtaaggcgagctgcacactggaaaccgtttgggaggacaagcacaaatatgaagaggccgaacgaaggttctacgaacatgaagctacacaagccgcagcatcagcacagcaactgcccgcagaaggaccagccatgaacgggccaggccaggatgacccggaggacgccgacgaggctgaggcccctgatggtggaagccgaagagatccccgaaaatctcaggatagtcggaagcccctgtag

SEQ ID NO: 47384 - DNA, 540 bp, Artificial Sequence
  derived and/or modified sequence
atgcgttcaggaaaggcatcgtgcaccctggaaaccgtgtgggaagacaaacataaatacgaggaggccgagaggcgcttttacgaacatgaagccacccaggccgctgcatcagcccagcaactgccagcagagggacccgctatgaacggtcccggtcaagatgatccagaggacgcagatgaagctgaagctccagatggagggtctagacgggaccctcggaaaagtcaagacagccgcaaaccactccagaaaaagaggaagcgatctccgaagtcaggtctcggacccgcagatctggctctgctgggactgtccgccgaaagagtatggctggacaaatccttgttcgatcaggccgaatcctcgtatcgtcaaaagctcgcagatgtggccgcacaggccgcatggccaccagcactagctccctggggtttgtgcacacacggtaatcaagtagcatgtcaccacgttacttggggcatttgggttaacaagagcagttttgaccaggccgagcgcgctttcgtggaatag

SEQ ID NO: 47385 - DNA, 150 bp, Artificial Sequence
  derived and/or modified sequence
atgcgttctgggaaagcaagctgcacattagaaaccgtgtgggaagataagcacaagtatgaggaggcagaacgcaggttttacgaacacgaggctactcaggccgctgcatcggcccagcaacttcctgcagagggccctgccatgtag

SEQ ID NO: 47386 - DNA, 207 bp, Artificial Sequence
  derived and/or modified sequence
atgcgttctggcaaggcatcatgtaccctggagaccgtgtgggaggacaaacacaagtatgaggaggctgaacgcaggttttacgagcacgaggccacacaggcagctgcctcagctcaacagctgcctgccgaaggacctgccatgaatggcccagggcaggatgaccccgaagacgcagatgaagctgaggcccctgacggttag

SEQ ID NO: 47387 - DNA, 546 bp, Artificial Sequence
  derived and/or modified sequence
atgagaagcggcaaggccagctgcaccctggagaccgtgtgggaggacaagcacaagtacgaggaggccgagagaagattctacgagcacgaggccacccaggccgccgccagcgcccagcagctgcccgccgagggccccgccatgaacggccccggccaggacgaccccgaggacgccgacgaggccgaggcccccgacggcggcagcagaagagaccccagaaagagccaggacagcagaaagcccctgcagaagaagagaaagagaagccccaagagcggcctgggccccgccgacctggccctgctgggcctgagcgccgagagagtgtggctggacaagagcctgttcgaccaggccgagagcagctacagacagaagctggccgacgtggccgcccaggccgcctggccccccgccctggccccctggggcctgtgcacccacggcaaccaggtggcctgccaccacgtgacctggggcatctgggtgaacaagagcagcttcgaccaggccgagagagccttcgtggagtggagctag

SEQ ID NO: 47388 - DNA, 192 bp, Artificial Sequence
  derived and/or modified sequence
atgagaagcggcaaggccagctgcaccctggagaccgtgtgggaggacaagcacaagtacgaggaggccgagagaagattctacgagcacgaggccacccaggccgccgccagcgcccagcagctgcccgccgagggccccgccatgaacggccccggccaggacgaccccgaggacgccgacgaggcctag

SEQ ID NO: 47389 - DNA, 246 bp, Artificial Sequence
  derived and/or modified sequence
atgagaagcggcaaggccagctgcaccctggagaccgtgtgggaggacaagcacaagtacgaggaggccgagagaagattctacgagcacgaggccacccaggccgccgccagcgcccagcagctgcccgccgagggccccgccatgaacggccccggccaggacgaccccgaggacgccgacgaggccgaggcccccgacggcggcagcagaagagaccccagaaagagccaggacagcagatag

SEQ ID NO: 47390 - DNA, 162 bp, Artificial Sequence
  derived and/or modified sequence
atgagaagcggcaaggccagctgcaccctggagaccgtgtgggaggacaagcacaagtacgaggaggccgagagaagattctacgagcacgaggccacccaggccgccgccagcgcccagcagctgcccgccgagggccccgccatgaacggccccggctag

SEQ ID NO: 47391 - DNA, 474 bp, Artificial Sequence
  derived and/or modified sequence
atgagaagcggcaaggccagctgcaccctggagaccgtgtgggaggacaagcacaagtacgaggaggccgagagaagattctacgagcacgaggccacccaggccgccgccagcgcccagcagctgcccgccgagggccccgccatgaacggccccggccaggacgaccccgaggacgccgacgaggccgaggcccccgacggcggcagcagaagagaccccagaaagagccaggacagcagaaagcccctgcagaagaagagaaagagaagccccaagagcggcctgggccccgccgacctggccctgctgggcctgagcgccgagagagtgtggctggacaagagcctgttcgaccaggccgagagcagctacagacagaagctggccgacgtggccgcccaggccgcctggccccccgccctggccccctggggcctgtgcacccacggcaaccaggtggcctgccactag

SEQ ID NO: 47392 - DNA, 441 bp, Artificial Sequence
  derived and/or modified sequence
atgagaagcggcaaggccagctgcaccctggagaccgtgtgggaggacaagcacaagtacgaggaggccgagagaagattctacgagcacgaggccacccaggccgccgccagcgcccagcagctgcccgccgagggccccgccatgaacggccccggccaggacgaccccgaggacgccgacgaggccgaggcccccgacggcggcagcagaagagaccccagaaagagccaggacagcagaaagcccctgcagaagaagagaaagagaagccccaagagcggcctgggccccgccgacctggccctgctgggcctgagcgccgagagagtgtggctggacaagagcctgttcgaccaggccgagagcagctacagacagaagctggccgacgtggccgcccaggccgcctggccccccgccctggccccctggggctag

SEQ ID NO: 47393 - DNA, 390 bp, Artificial Sequence
  derived and/or modified sequence
atgagaagcggcaaggccagctgcaccctggagaccgtgtgggaggacaagcacaagtacgaggaggccgagagaagattctacgagcacgaggccacccaggccgccgccagcgcccagcagctgcccgccgagggccccgccatgaacggccccggccaggacgaccccgaggacgccgacgaggccgaggcccccgacggcggcagcagaagagaccccagaaagagccaggacagcagaaagcccctgcagaagaagagaaagagaagccccaagagcggcctgggccccgccgacctggccctgctgggcctgagcgccgagagagtgtggctggacaagagcctgttcgaccaggccgagagcagctacagacagaagctgtag

SEQ ID NO: 47394 - DNA, 255 bp, Artificial Sequence
  derived and/or modified sequence
atgagaagcggcaaggccagctgcaccctggagaccgtgtgggaggacaagcacaagtacgaggaggccgagagaagattctacgagcacgaggccacccaggccgccgccagcgcccagcagctgcccgccgagggccccgccatgaacggccccggccaggacgaccccgaggacgccgacgaggccgaggcccccgacggcggcagcagaagagaccccagaaagagccaggacagcagaaagcccctgtag

SEQ ID NO: 47395 - DNA, 540 bp, Artificial Sequence
  derived and/or modified sequence
atgagaagcggcaaggccagctgcaccctggagaccgtgtgggaggacaagcacaagtacgaggaggccgagagaagattctacgagcacgaggccacccaggccgccgccagcgcccagcagctgcccgccgagggccccgccatgaacggccccggccaggacgaccccgaggacgccgacgaggccgaggcccccgacggcggcagcagaagagaccccagaaagagccaggacagcagaaagcccctgcagaagaagagaaagagaagccccaagagcggcctgggccccgccgacctggccctgctgggcctgagcgccgagagagtgtggctggacaagagcctgttcgaccaggccgagagcagctacagacagaagctggccgacgtggccgcccaggccgcctggccccccgccctggccccctggggcctgtgcacccacggcaaccaggtggcctgccaccacgtgacctggggcatctgggtgaacaagagcagcttcgaccaggccgagagagccttcgtggagtag

SEQ ID NO: 47396 - DNA, 150 bp, Artificial Sequence
  derived and/or modified sequence
atgagaagcggcaaggccagctgcaccctggagaccgtgtgggaggacaagcacaagtacgaggaggccgagagaagattctacgagcacgaggccacccaggccgccgccagcgcccagcagctgcccgccgagggccccgccatgtag

SEQ ID NO: 47397 - DNA, 207 bp, Artificial Sequence
  derived and/or modified sequence
atgagaagcggcaaggccagctgcaccctggagaccgtgtgggaggacaagcacaagtacgaggaggccgagagaagattctacgagcacgaggccacccaggccgccgccagcgcccagcagctgcccgccgagggccccgccatgaacggccccggccaggacgaccccgaggacgccgacgaggccgaggcccccgacggctag

SEQ ID NO: 47398 - DNA, 343 bp, Artificial Sequence
  derived and/or modified sequence
ctttcatcagtcttcccgcgtccgccgattcctcctccttggtcgccgcgtccttggctggcgtagacagggtttcaacgtgttagccaggatggtctcagtctccagaccctgtgatccgcccgcctcggcctcccaaagtgttgggattacagatgaggagcgggaaggcctcctgcaccctggagaccgtgtgggaagacaagcacaagtatgaggaggccgagcggcgcttctacgaacacgaggccacacaggcggccgcctccgcccagcagctgccagccgaggggccagccatgaatgggcccggccaggacgaccctgaggacgctgatgaggc

SEQ ID NO: 47399 - DNA, 559 bp, Artificial Sequence
  derived and/or modified sequence
ctccctttcatcagtcttcccgcgtccgccgattcctcctccttggtcgccgcgtccttggctggcgtgggatgacggagtgacgtcacctgtgtggactcagctgccacctgggattgtggtggcggcgggtctgtctggcgctcagcttccatctccaccagtgtcacctccacaccacctcgccaagcagcttctggaaaggcccccggccgccccgggctgacctgctgctgtgtctgacccggttagtctttctggctgcctctaaccttgctgcttttccttcatgctgtcctaggaggccaaagcaaaatgaggagcgggaaggcctcctgcaccctggagaccgtgtgggaagacaagcacaagtatgaggaggccgagcggcgcttctacgaacacgaggccacacaggcggccgcctccgcccagcagctgccagccgaggggccagccatgaatgggcccggccaggacgaccctgaggacgctgatgaggcggaagcccctgacggcggcagcaggcgtgatcccaggaagagccaggacagcagga

SEQ ID NO: 47400 - DNA, 367 bp, Artificial Sequence
  derived and/or modified sequence
gggagcactgtctcacggcgcatcccggtcgtggaagcccctcggccaggctgctggggcctaaggcctgtgtttgctgccgtctccgtgggagaccagacatctgccccagctgtttctctggcctgcagaccttcgtacaccacgtctttgtcaagcaccagttactgcacgcatcagctgagcacggaggggataggcacggacgcaacacttttggaacttagacgctagtgagcacggaaaggaataagcctatgaggagcgggaaggcctcctgcaccctggagaccgtgtgggaagacaagcacaagtatgaggaggccgagcggcgcttctacgaacacgaggccacacaggcggccgc

SEQ ID NO: 47401 - DNA, 558 bp, Artificial Sequence
  derived and/or modified sequence
ctccctttcatcagtcttcccgcgtccgccgattcctcctccttggtcgccgcgtccttggctggcgtaaagctcctcctgagcttggataaactgcaggagcgaaggggctgaccgtttgtcgggacgcagttgaaagagtcgctgtgtcctgctccgggctctcctgctggagaggagaggcttgcacgtgcctgtcgtctgcgcaagctttgaagctcagacttggtctctgttaggagagatggggatgacggagtgacgtcacctgtgtggactcagctgccacctgggattgtggtggcggcgggtctgtctggcgctcagcttccatctccaccagtgtcacctccacaccacctcgccaagcagcttctggaaaggcccccggccgccccgggctgacctgctgctgtgtctgacccggttagtctttctggctgcctctaaccttgctgcttttccttcatgctgtcctaggaggccaaagcaaaatgaggagcgggaaggcctcctgcaccctggagaccgtgtgggaagacaagcacaagtatgagg

SEQ ID NO: 47402 - DNA, 600 bp, Artificial Sequence
  derived and/or modified sequence
ctccctttcatcagtcttcccgcgtccgccgattcctcctccttggtcgccgcgtccttggctggcgttagagacagggtttcaacgtgttagccaggatggtctcagtctccagaccctgtgatccgcccgcctcggcctcccaaagtgttgggattacagatgaggagcgggaaggcctcctgcaccctggagaccgtgtgggaagacaagcacaagtatgaggaggccgagcggcgcttctacgaacacgaggccacacaggcggccgcctccgcccagcagctgccagccgaggggccagccatgaatgggcccggccaggacgaccctgaggacgctgatgaggcggaagcccctgacggcggcagcaggcgtgatcccaggaagagccaggacagcaggaagcccctgcagaaaaagaggaagcgctcccccaagagcgggctcggccccgcggacctggccctcctgggcctctcggccgaacgcgtgtggctggacaagtcacttttcgaccaggcagagagctcctaccgccagaagctggcagatgtggctgcccaggcagcctggcctcctgccttggccccttggggt

SEQ ID NO: 47403 - DNA, 616 bp, Artificial Sequence
  derived and/or modified sequence
ctccctttcatcagtcttcccgcgtccgccgattcctcctccttggtcgccgcgtccttggctggcgtggcctgcctaggctccaactgacagtaatcccaagagctcccctttcaggggatgacggagtgacgtcacctgtgtggactcagctgccacctgggattgtggtggcggcgggtctgtctggcgctcagcttccatctccaccagtgtcacctccacaccacctcgccaagcagcttctggaaaggcccccggccgccccgggctgacctgctgctgtgtctgacccggttagtctttctggctgcctctaaccttgctgcttttccttcatgctgtcctaggaggccaaagcaaaatgaggagcgggaaggcctcctgcaccctggagaccgtgtgggaagacaagcacaagtatgaggaggccgagcggcgcttctacgaacacgaggccacacaggcggccgcctccgcccagcagctgccagccgaggggccagccatgaatgggcccggccaggacgaccctgaggacgctgatgaggcggaagcccctgacggcggcagcaggcgtgatcccaggaagagccaggacagcaggaagcccctg

SEQ ID NO: 47404 - DNA, 614 bp, Artificial Sequence
  derived and/or modified sequence
ccctttcatcagtcttcccgcgtccgccgattcctcctccttggtcgccgcgtccttggctggcgtgtgagtaccgcggcccccgccggaaggagtcgggcgcgacagagacgcccgaggggccgggagggcgggcggcccgggctgcgccagaagctcgcgccgttagggactgaggcacaagtgcgccagcgcgggcttaggggccgtgggccaagtgcggcacttggggcgagcgcagagaggcggggcgacggaggccacgtggccggcttggagggcgtccgcgggacgggggcgccgggagcactgtctcacggcgcatcccggtcgtggaagcccctcggccaggctgctggggcctaaggcctgtgtttgctgccgtctccgtgggagaccagacatctgccccagctgtttctctggcctgcagaccttcgtacaccacgtctttgtcaagcaccagttactgcacgcatcagctgagcacggaggggatagcagaaaaatggctacaaacttcctagcacatgagaagatctggttcgacaagttcaaatatgacgacgcagaaaggagattctacgagcagatgaacgggcctgtggcaggtg

SEQ ID NO: 47405 - protein, 257 aa, Artificial Sequence
  derived and/or modified sequence
MATNFLAHEKIWFDKFKYDDAERRFYEQMNGPVAGASRQSSGPGASSGTSGDHGELVVRIASLEVENQSLRGVVQELQQAISKLEARLNVLEKSSPGHRATAPQTQHVSPMRQVEPPAKKPATPAEDDEDDDIDLFGSDNEEEDKEAAQLREERLRQYAEKKAKKPALVAKSSILLDVKPWDDETDMAQLEACVRSIQLDGLVWGASKLVPVGYGIRKLQIQCVVEDDKVGTDLLEEEITKFEEHVQSVDIAAFNKI

SEQ ID NO: 47406 - DNA, 774 bp, Artificial Sequence
  derived and/or modified sequence
atggccacaaatttcctggcccacgagaagatctggttcgacaaatttaagtatgacgatgctgaaagacgcttttacgagcagatgaatggcccagtggccggagctagtcgtcaatctagcggtcccggggccagtagcggcactagcggcgaccacggggagctggtcgtgcgcatcgcttcattagaggtggagaatcagtcattgcgcggagtggtgcaggagctgcagcaagccatctcaaagctggaggctagactcaacgtgttggaaaagtcgagtccagggcacagggccacagctccacagacccagcatgtgagccccatgcgccaggttgaacccccagcaaaaaaacccgctaccccagctgaggatgatgaggatgatgacatcgatctcttcgggtctgataacgaggaggaggacaaagaggcggcgcagcttcgagaagaacgactgcgccagtatgccgaaaagaaggcaaagaaacctgcgctggttgccaagtccagcatcctgctggacgtcaaaccctgggatgacgaaacagacatggcccagctcgaggcctgcgtgcgaagcattcagctggatggtcttgtctggggcgcctcaaaactggtcccggttgggtacggaattcggaaacttcagatccagtgtgtggtcgaggacgataaggtgggaacagacctcttggaagaggagattacaaagtttgaggaacacgtgcaaagcgttgacattgccgcctttaacaaaatctag

SEQ ID NO: 47407 - DNA, 120 bp, Artificial Sequence
  derived and/or modified sequence
atggccactaattttcttgctcacgaaaaaatttggttcgataagttcaagtacgatgacgccgaacgccgattctacgagcagatgaatggaccggtggctggggcttctcgtcaatag

SEQ ID NO: 47408 - DNA, 774 bp, Artificial Sequence
  derived and/or modified sequence
atggccaccaactttctggcccacgagaagatatggtttgataagtttaagtacgatgatgctgaacggcgcttctatgaacaaatgaatggcccggtcgccggtgcgtcaagacaaagtagtgggccgggggcctcgagcggtacttccggggatcatggggagttagtggtaagaattgcctctcttgaggtcgagaatcagagcctccgcggggttgtccaggaactacaacaagcaatctccaaactggaggcaagattgaatgtgctcgagaaatcttcccctggacaccgggctactgcccctcaaacccagcatgtatcacctatgcgccaagtggagcccccagccaagaagcctgcgactccagctgaggacgacgaagacgacgatatcgatctgttcggcagcgataatgaggaggaagataaggaagctgcgcagctgagggaagaacgactgcggcagtatgcagagaaaaaagctaagaagccagcgctcgtggcaaaatccagtatcctgctcgacgtgaagccctgggatgacgaaactgatatggctcagctcgaggcatgcgttcgttcgatccagctcgatggcctggtatggggggcttccaaactagtgcccgtgggttacggtatcagaaagctgcaaattcagtgtgtggttgaagacgataaggtgggcaccgatttactagaagaagaaattaccaaattcgaagaacatgttcagagtgttgatatcgcggctttcaacaagatttag

SEQ ID NO: 47409 - DNA, 108 bp, Artificial Sequence
  derived and/or modified sequence
atggctacaaactttctcgctcacgaaaagatctggtttgacaagttcaagtacgatgacgctgaacgccgattctatgagcagatgaacgggccagttgcagggtag

SEQ ID NO: 47410 - DNA, 120 bp, Artificial Sequence
  derived and/or modified sequence
atggccactaactttctggcccatgagaaaatctggttcgataagtttaagtatgatgatgcagagagacgcttctacgaacaaatgaatggcccagtggcaggggcttctcgacaatag

SEQ ID NO: 47411 - DNA, 774 bp, Artificial Sequence
  derived and/or modified sequence
atggccaccaacttcctggcccacgagaagatctggtttgacaagttcaagtatgatgatgctgagcggcgcttctatgagcagatgaatggacctgtggccggggccagccggcagagcagcggccctggggccagcagcggcaccagcggggaccatggagagctggtggtgcgcatcgccagcctggaggtggagaaccagagcctgcggggcgtggtgcaggagctgcagcaggccatcagcaagctggaggcccggctgaatgtgctggagaagagcagccctggccaccgggccacagccccccagacccagcacgtgagccccatgaggcaggtggagcccccagccaagaagccagccaccccagcagaagatgatgaagatgatgacatcgacctgtttggaagtgacaatgaggaggaggacaaggaggccgcccagctgcgggaggagcggctgcggcagtatgcagagaagaaggccaagaagccagccctggtggccaagagcagcatcctgctggatgtgaagccctgggatgatgaaacagacatggcccagctggaggcctgtgtgcgcagcatccagctggatggcctggtgtggggcgccagcaagctggtgcctgtgggctacggcatcaggaagctgcagatccagtgtgtggtggaggatgacaaggtgggcacagacctgctggaggaggagatcaccaagtttgaggagcacgtgcagagcgtggacattgctgccttcaacaagatctag

SEQ ID NO: 47412 - DNA, 120 bp, Artificial Sequence
  derived and/or modified sequence
atggccaccaacttcctggcccacgagaagatctggtttgacaagttcaagtatgatgatgctgagcggcgcttctatgagcagatgaatggacctgtggccggggccagccggcagtag

SEQ ID NO: 47413 - DNA, 108 bp, Artificial Sequence
  derived and/or modified sequence
atggccaccaacttcctggcccacgagaagatctggtttgacaagttcaagtatgatgatgctgagcggcgcttctatgagcagatgaatggacctgtggccggctag

SEQ ID NO: 47414 - DNA, 774 bp, Artificial Sequence
  derived and/or modified sequence
atggccaccaacttcctggcccacgagaagatctggttcgacaagttcaagtatgacgatgcggagcggcggttttatgagcagatgaatggcccagtggctggggcctctagacagagctcagggcctggcgccagcagcggtactagtggggaccatggggagctcgttgtgcgtatagcctccttagaagtcgagaaccaatctttacggggagtagtacaggaactgcaacaggccatcagtaaactggaggcccgcctgaatgtactggaaaaaagcagcccgggccaccgtgccaccgcaccgcagactcagcatgtatccccaatgcgacaagtggaacccccagccaaaaaaccagcaacaccggccgaggacgacgaagacgatgacatcgatctgttcggttctgataatgaggaggaagataaagaggccgcacagctgcgcgaagagcggctgagacagtacgctgagaagaaggccaagaaacccgcgctggtggccaagtcatcaatcctcctggacgtgaagccttgggacgacgagactgacatggctcaacttgaagcctgcgttcgctcaatccagttagatggcctggtgtggggcgccagcaaattggtccccgtcggatacgggatcaggaagctgcagatccaatgtgttgttgaggacgataaagttggcaccgatctcctggaggaagagattacgaagtttgaggaacacgtgcaatctgtggacatcgccgcattcaacaagatctag

SEQ ID NO: 47415 - DNA, 120 bp, Artificial Sequence
  derived and/or modified sequence
atggccaccaacttcctggcccacgagaagatctggttcgacaagtttaagtatgatgatgctgaacggagattctacgagcagatgaacggtcctgtggctggtgcgtcaagacagtag

SEQ ID NO: 47416 - DNA, 774 bp, Artificial Sequence
  derived and/or modified sequence
atggccaccaacttcctggcccacgagaagatctggttcgacaagttcaagtacgacgacgccgagaggcgcttttatgagcagatgaacggtccagtcgctggcgcctcgcgtcagagtagcggccctggagccagcagtgggacatctggcgaccatggagagttagttgtgagaatcgccagcctggaagtggaaaaccaaagtcttcgaggcgtcgtacaggagttacagcaagcgatttccaaattagaagcgcgactgaacgtgttagaaaaatcctcccccgggcatcgcgcgacagcaccccagacccagcacgtgagccctatgagacaggtagagccaccggccaaaaaacccgcaactccagcagaggatgacgaagacgatgacattgacctgttcgggagcgacaatgaagaggaagacaaagaagctgcacagctaagggaggaacgcctccgtcaatacgctgagaagaaggccaagaaacccgctctggtggcgaaatcttcaatcctgctggatgtcaagccatgggacgatgaaaccgacatggcccagctcgaggcctgtgtacgtagcattcaattagatggtctcgtgtggggcgcttctaagctagtgcccgttgggtacggaatccgaaagctgcagatacagtgcgtcgttgaagatgataaggtcgggacagatctgcttgaagaggagattacaaagtttgaagagcatgtgcagtctgttgacattgctgccttcaacaagatctag

SEQ ID NO: 47417 - DNA, 108 bp, Artificial Sequence
  derived and/or modified sequence
atggccaccaacttcctggcccacgagaagatctggttcgacaagtttaagtatgatgatgccgagcggcgtttctacgaacagatgaatggacctgtcgctggctag

SEQ ID NO: 47418 - DNA, 120 bp, Artificial Sequence
  derived and/or modified sequence
atggccaccaacttcctggcccacgagaagatctggttcgacaagttcaaatacgatgacgcagaacggagattttatgagcaaatgaatggcccagtcgccggggctagcagacaatag

SEQ ID NO: 47419 - DNA, 774 bp, Artificial Sequence
  derived and/or modified sequence
atggcaaccaacttcctggcacacgaaaaaatttggttcgataagtttaagtatgatgatgctgagaggcggttttatgagcagatgaacggcccagtggccggagccagccgacagtcttccggcccaggagccagcagtggtacaagcggcgaccacggagaattggtggtgcggatcgccagtctggaagtcgaaaatcaatcactgagaggggtggtccaggagctccagcaagcgatatcaaaattggaggcaagactgaatgtcttggagaagtcctcaccaggccaccgggctaccgcgcctcagacccagcacgtgtcaccgatgagacaagtcgagcctcccgctaagaagcccgctacccccgctgaggacgacgaggacgacgatatcgacctgtttggctctgacaatgaggaggaagacaaagaggccgctcagctccgcgaggaacgcctcaggcagtatgcagagaaaaaggcaaagaagcccgctctggtagcaaaatctagtattcttctggatgttaaaccatgggacgacgagacggacatggcgcagcttgaggcatgcgttcggagcatccagctggacggtctcgtttggggtgcctccaaacttgttcctgtgggctacggcatccgcaaactgcagatacagtgtgtagtggaagatgacaaagtgggtactgatttgcttgaggaggaaattaccaagtttgaagagcacgtgcagagtgtagatattgcggcttttaacaagatctag

SEQ ID NO: 47420 - DNA, 120 bp, Artificial Sequence
  derived and/or modified sequence
atggccaccaatttcttagcgcacgaaaagatttggttcgacaagtttaagtatgacgatgcggaacggaggttttacgaacaaatgaacggtccagtggccggtgccagccgccagtag

SEQ ID NO: 47421 - DNA, 774 bp, Artificial Sequence
  derived and/or modified sequence
atggccaccaatttcctcgcccacgagaagatttggtttgataagtttaagtacgacgacgcagaacgtagattctatgagcaaatgaacggccctgttgccggagcgagtcgccagtccagcggtcctggcgctagctcaggtacgagcggcgaccatggcgagttggtcgtgcgcatcgctagccttgaagtggagaaccaaagtctccggggtgttgtacaggagctgcaacaagccatcagcaaactcgaggctaggctcaacgtcctggaaaaaagttctcccggacaccgtgccactgccccacaaacccaacatgtgagccctatgagacaagtagaacccccagctaagaaacctgccacaccagccgaggatgacgaagacgatgacattgaccttttcggatccgataatgaggaggaggataaggaggccgctcagttaagagaagaaaggctccgccagtatgcagaaaagaaagccaagaagccagccctggtggcaaagtcctctattttgctcgatgtgaagccttgggacgacgagacggatatggcccagctcgaggcttgcgtgcgtagtatacagcttgatggcctggtttggggggcttcgaagcttgtacctgtgggttatggcattcgcaagctgcagatacaatgcgtagtggaggacgataaggtaggtaccgacctccttgaagaagagatcaccaagtttgaggagcacgtgcagagcgtcgacatcgccgcttttaataaaatatag

SEQ ID NO: 47422 - DNA, 108 bp, Artificial Sequence
  derived and/or modified sequence
atggccactaactttctggcacatgaaaagatttggttcgacaagttcaagtatgacgatgccgagaggaggttttacgaacagatgaatggtccagtggccggatag

SEQ ID NO: 47423 - DNA, 120 bp, Artificial Sequence
  derived and/or modified sequence
atggccacaaatttcttggcccatgagaaaatctggtttgataagtttaagtacgatgatgccgagagaaggttttatgagcaaatgaacggcccagttgctggcgcatctagacagtag

SEQ ID NO: 47424 - DNA, 774 bp, Artificial Sequence
  derived and/or modified sequence
atggccaccaacttcctggcccacgagaagatctggttcgacaagttcaagtacgacgacgccgagagaagattctacgagcagatgaacggccccgtggccggcgccagcagacagagcagcggccccggcgccagcagcggcaccagcggcgaccacggcgagctggtggtgagaatcgccagcctggaggtggagaaccagagcctgagaggcgtggtgcaggagctgcagcaggccatcagcaagctggaggccagactgaacgtgctggagaagagcagccccggccacagagccaccgccccccagacccagcacgtgagccccatgagacaggtggagccccccgccaagaagcccgccacccccgccgaggacgacgaggacgacgacatcgacctgttcggcagcgacaacgaggaggaggacaaggaggccgcccagctgagagaggagagactgagacagtacgccgagaagaaggccaagaagcccgccctggtggccaagagcagcatcctgctggacgtgaagccctgggacgacgagaccgacatggcccagctggaggcctgcgtgagaagcatccagctggacggcctggtgtggggcgccagcaagctggtgcccgtgggctacggcatcagaaagctgcagatccagtgcgtggtggaggacgacaaggtgggcaccgacctgctggaggaggagatcaccaagttcgaggagcacgtgcagagcgtggacatcgccgccttcaacaagatctag

SEQ ID NO: 47425 - DNA, 120 bp, Artificial Sequence
  derived and/or modified sequence
atggccaccaacttcctggcccacgagaagatctggttcgacaagttcaagtacgacgacgccgagagaagattctacgagcagatgaacggccccgtggccggcgccagcagacagtag

SEQ ID NO: 47426 - DNA, 108 bp, Artificial Sequence
  derived and/or modified sequence
atggccaccaacttcctggcccacgagaagatctggttcgacaagttcaagtacgacgacgccgagagaagattctacgagcagatgaacggccccgtggccggctag

SEQ ID NO: 47427 - DNA, 1084 bp, Artificial Sequence
  derived and/or modified sequence
ctccctttcatcagtcttcccgcgtccgccgattcctcctccttggtcgccgcgtccttggctggcgtgggatgacggagtgacgtcacctgtgtggactcagctgccacctgggattgtggtggcggcgggtctgtctggcgctcagcttccatctccaccagtgtcacctccacaccacctcgccaagcagcttctggaaaggcccccggccgccccgggctgacctgctgctgtgtctgacccgcagaaaaatggctacaaacttcctagcacatgagaagatctggttcgacaagttcaaatatgacgacgcagaaaggagattctacgagcagatgaacgggcctgtggcaggtgcctcccgccagagctcaggccccggggcctccagcggcaccagcggagaccacggtgagctcgtcgtccggattgccagtctggaagtggagaaccagagtctgcgtggcgtggtacaggagctgcagcaggccatctccaagctggaggcccggctgaacgtgctggagaagagctcgcctggccaccgggccacggccccacagacccagcacgtatctcccatgcgccaagtggagcccccagccaagaagccagccacaccagcagaggatgacgaggatgatgacattgacctgtttggcagtgacaatgaggaggaggacaaggaggcggcacagctgcgggaggagcggctacggcagtacgcggagaagaaggccaagaagcctgcactggtggccaagtcctccatcctgctggatgtcaagccttgggatgatgagacggacatggcccagctggaggcctgtgtgcgctctatccagctggacgggctggtctggggggcttccaagctggtgcccgtgggctacggtatccggaagctacagattcagtgtgtggtggaggacgacaaggtggggacagacttgctggaggaggagatcaccaagtttgaggagcacgtgcagagtgtcgatatcgcagctttcaacaagatctgaagcctgagtgtgtgtacgtgcgcgcgtgcgtgaggccctgccacgattaaagactg

SEQ ID NO: 47428 - DNA, 923 bp, Artificial Sequence
  derived and/or modified sequence
ccgggcggccctccctttcatcagtcttcccgcgtccgccgattcctcctccttggtcgccgcgtccttggctggcgtcagaaaaatggctacaaacttcctagcacatgagaagatctggttcgacaagttcaaatatgacgacgcagaaaggagattctacgagcagatgaacgggcctgtggcaggtgcctcccgccagagctcaggccccggggcctccagcggcaccagcggagaccacggtgagctcgtcgtccggattgccagtctggaagtggagaaccagagtctgcgtggcgtggtacaggagctgcagcaggccatctccaagctggaggcccggctgaacgtgctggagaagagctcgcctggccaccgggccacggccccacagacccagcacgtatctcccatgcgccaagtggagcccccagccaagaagccagccacaccagcagaggatgacgaggatgatgacattgacctgtttggcagtgacaatgaggaggaggacaaggaggcggcacagctgcgggaggagcggctacggcagtacgcggagaagaaggccaagaagcctgcactggtggccaagtcctccatcctgctggatgtcaagccttgggatgatgagacggacatggcccagctggaggcctgtgtgcgctctatccagctggacgggctggtctggggggcttccaagctggtgcccgtgggctacggtatccggaagctacagattcagtgtgtggtggaggacgacaaggtggggacagacttgctggaggaggagatcaccaagtttgaggagcacgtgcagagtgtcgatatcgcagctttcaacaagatctgaagcctgagtgtgtgtacgtgcgcgcgtgcgtgaggccctgccacgattaaagactgagaccggc

SEQ ID NO: 47429 - protein, 462 aa, Artificial Sequence
  derived and/or modified sequence
MGDDRPFVCNAPGCGQRFTNEDHLAVHKHKHEMTLKFGPARTDSVIIADQTPTPTRFLKNCEEVGLFNELASSFEHEFKKAADEDEKKAAAGPLDMSLPSTPDIKIKEEEPVEEVTPKPVLISTPTPTIVRPGSLPLHLGYDPLHPTLPSPTSVITQAPPSNRQMGSPTGSLPLVMHLANGQTMPVLPGPPVQMPSVISLARPVSMVPNIPGIPGPPVNSSGSISPSGHPIPSEAKMRLKATLTHQVSSINGGCGMVVGTASTMVTARPEQSQILIQHPDAPSPAQPQVSPAQPTPSTGGRRRRTVDEDPDERRQRFLERNRAAASRCRQKRKLWVSSLEKKAEELTSQNIQLSNEVTLLRNEVAQLKQLLLAHKDCPVTALQKKTQGYLESPKESSEPTGSPAPVIQHSSATAPSNGLSVRSAAEAVATSVLTQMASQRTELSMPIQSHVIMTPQSQSAGR

SEQ ID NO: 47430 - DNA, 924 bp, Artificial Sequence
  derived and/or modified sequence
atgggggatgaccgcccttttgtttgtaacgcccctggctgtggccaaaggttcacaaatgaagaccatctggctgtgcacaagcacaaacatgaaatgaccctgaaatttggccccgccagaacagattctgtcattattgcagaccagacccccacaccgaccaggttcctcaagaattgcgaggaagtcggactgtttaatgagctggcatctagcttcgaacatgagtttaagaaagccgcggatgaggacgaaaaaaaagcagccgcagggccgctggatatgagccttccttcgacccctgacatcaagattaaggaggaggagcccgtagaagtggatagttcacctcccgattcgccggccagtagcccctgctcccccccactgaaggagaagtcgcccgcccagcccaccccctccacggggggacgcaggaggcggaccgtagatgaggacccagatgagaggcgccagaggttcctagagcggaatcgtgcggctgcatctaggtgtcgacaaaagaggaaactttgggtgtcttcattggaaaaaaaggccgaggagctcacctcccaaaacatccaactgtctaacgaagtgaccctcctgagaaacgaggtggcacagcttaagcagctactactagcgcataaggactgtcccgtaacagccttgcaaaaaaagactcaggggtatctggagagtcccaaggaatccagcgaaccaacaggcagcccagcccccgtcatccagcattcctctgcaacggccccgagcaacggactttctgtgcgaagtgccgccgaagcagtggccacctcagtcctgacccaaatggcctcgcagcgcaccgaactgagcatgccaatccagtcacacgtaattatgactccccagtcgcaatccgcgggaagatag

SEQ ID NO: 47431 - DNA, 1389 bp, Artificial Sequence
  derived and/or modified sequence
atgggtgacgatcggcccttcgtgtgtaatgcccctggctgtggccaaagatttactaatgaggaccatctcgccgtgcacaagcataagcatgaaatgacactcaagtttggccctgcgaggacagactcggtgattatcgcagatcagactcctacgcccaccaggttcctcaaaaattgcgaagaggtggggctgttcaatgagctcgcttcgagctttgaacacgaatttaagaaggccgcggacgaagacgagaaaaaggctgcagcaggtccactggatatgtctttgccctcaacccccgatataaaaattaaggaggaggagcctgtcgaagaagttacacccaagcctgtgctgatcagtactcctacacccactattgtgcgccccggttcactgccattgcatctcggatatgatcctctgcatcccacactcccctctcccacatccgtcatcacgcaggcgcccccctccaataggcagatggggtcccccaccggaagtctgcctctggttatgcatttggcaaacggccagaccatgcctgtcctcccaggcccccctgtgcaaatgccctccgtcatatctctggccaggccagttagtatggtccctaatatccctggcatcccagggcctccagtgaatagctccggaagtattagtccaagtggacatcctatacctagcgaagctaagatgagactcaaggccacgctgactcaccaggtgtcaagtatcaatgggggatgcgggatggtcgtaggcacggcttctactatggtgaccgctagacccgagcagagtcagatcctgatacagcatccagacgctccaagcccagctcagccccaggtgagccctgcccagcccacccccagcaccggggggaggcgccgccgaaccgtcgacgaggatcccgacgaacgaagacagaggtttctcgagcgcaacagggcagccgctagcagatgtcgccagaagcgaaaattgtgggtatccagtttggagaagaaagccgaggagttgacttctcaaaacatccaactctcaaacgaagtcaccctcctgcgcaacgaggtcgcccagttaaagcagctattgctcgctcacaaagactgtccggtaactgcattgcagaagaaaactcagggatacctggagtctccaaaggaatcgtcagagcccaccggatcaccagcacctgtgattcagcattctagtgcaacggcaccttcaaatggcctcagcgtgcgctccgcagctgaggcagtcgcaacgtcagtgctaacacagatggccagccagcgcacagagttgtctatgccaatacagtcccatgtcataatgacaccacagtcacaaagtgccggaagatag

SEQ ID NO: 47432 - DNA, 924 bp, Artificial Sequence
  derived and/or modified sequence
atgggagatgaccggccctttgtgtgcaatgcccctggctgcggccagcgcttcaccaatgaagaccacctggccgtgcacaagcacaagcatgagatgaccctgaagtttggacctgccaggacagacagcgtcatcatcgctgaccagacccccacccccacccgcttcctgaagaactgtgaggaggtgggcctcttcaatgagctggccagcagctttgagcacgagttcaagaaggccgcagatgaagatgagaagaaggctgctgctggccccctggacatgagcctgcccagcaccccagacatcaagatcaaggaggaggagcctgtggaggtggacagcagccccccagacagccctgccagcagcccctgcagcccccccctgaaggagaagagccctgcccagcccacccccagcactggaggaagaagaagaagaacagtggatgaagatcctgatgagcggcggcagcgcttcctggagaggaacagagctgctgccagccgctgccggcagaagaggaagctgtgggtgagcagcctggagaagaaggccgaggagctgaccagccagaacatccagctgagcaatgaggtgaccctgctgagaaatgaggtggcccagctgaagcagctgctgctggcccacaaggactgccctgtgacagccctgcagaagaagacccagggctacctggagagccccaaggagagcagcgagcccaccggcagccctgcccctgtgatccagcacagcagcgccacagcccccagcaatggcctgtctgtgcgctctgctgctgaggccgtggccacctctgtgctgacccagatggccagccagaggacagagctgtccatgcccatccagagccacgtgatcatgaccccccagagccagagcgctggaagatag

SEQ ID NO: 47433 - DNA, 1389 bp, Artificial Sequence
  derived and/or modified sequence
atgggagatgaccggccctttgtgtgcaatgcccctggctgcggccagcgcttcaccaatgaagaccacctggccgtgcacaagcacaagcatgagatgaccctgaagtttggacctgccaggacagacagcgtcatcatcgctgaccagacccccacccccacccgcttcctgaagaactgtgaggaggtgggcctcttcaatgagctggccagcagctttgagcacgagttcaagaaggccgcagatgaagatgagaagaaggctgctgctggccccctggacatgagcctgcccagcaccccagacatcaagatcaaggaggaggagcctgtggaggaggtgacccccaagcctgtgctgatcagcacccccacccccaccatcgtgcggcccggcagcctgcccctgcacctgggctatgaccccctgcaccccaccctgcccagccccaccagcgtcatcacccaggccccacccagcaaccggcagatgggcagccccaccggcagcctgcccctggtgatgcacctggccaacggccagaccatgcctgtgctgcccggcccccctgtgcagatgcccagcgtcatcagcctggcccggcctgtgtccatggtgcccaacatccctggcatccctggcccccctgtgaacagcagcggcagcatcagccccagcggccaccccatccccagcgaggccaagatgaggctgaaggccaccctgacccaccaggtgagcagcatcaatggaggctgcggcatggtggtgggcacagccagcaccatggtgacagcccggcctgagcagagccagatcctgatccagcacccagatgcccccagccctgcccagccccaggtgtccccagcccagcccacccccagcactggaggaagaagaagaagaacagtggatgaggaccctgatgaaagacggcagcgcttcctggagaggaacagagctgctgccagccgctgccggcagaagaggaagctgtgggtgagcagcctggagaagaaggccgaggagctgaccagccagaacatccagctgagcaatgaggtgaccctgctgagaaatgaggtggcccagctgaagcagctgctgctggcccacaaggactgccctgtgacagccctgcagaagaagacccagggctacctggagagccccaaggagagcagcgagcccaccggcagccctgcccctgtgatccagcacagcagcgccacagcccccagcaatggcctgtctgtgcgctctgctgctgaggccgtggccacctctgtgctgacccagatggccagccagaggacagagctgtccatgcccatccagagccacgtgatcatgaccccccagagccagagcgctggccgctag

SEQ ID NO: 47434 - DNA, 924 bp, Artificial Sequence
  derived and/or modified sequence
atgggcgacgaccggcccttcgtgtgcaacgcccccggctgcggccaacgcttcaccaatgaggaccacttagccgttcataagcacaagcacgagatgacgttgaagttcggccccgctcggacagactccgtaattatcgccgaccagacaccgactcccacaagattcctgaagaactgcgaggaagtggggctctttaatgagctggcctcttcattcgaacatgagttcaaaaaagctgccgacgaggacgagaaaaaggccgccgcaggcccgctggacatgagcctgccttccacacccgatattaaaatcaaggaggaagagccagtcgaggtcgacagctcgccgcccgacagtcccgcctctagcccttgttctccgcccctgaaagaaaagtcaccagcccagcccacccctagcactgggggacggcggcggcgcacggttgacgaggacccagacgagcggcggcaaagatttcttgagcggaatcgcgcagcagcttcccggtgtaggcagaagcggaagctttgggtgtccagcttggagaagaaggccgaagagcttaccagccagaatattcagctcagtaacgaggtgaccttgctgcggaacgaggtcgcccagctcaagcagttgcttttggcacacaaagactgtccagtcacagccctgcagaaaaaaacgcagggatacctggaaagcccaaaggaatccagcgaaccaactgggtcgcctgcccctgtgatccagcactctagcgcaacggcaccgtccaatgggttgtcagtccggagtgctgcagaggccgttgccacctctgttcttacacagatggcttcgcagagaaccgaactgtccatgccaatccagtcccacgtaatcatgacaccacagagccagtccgctggaagatag

SEQ ID NO: 47435 - DNA, 1389 bp, Artificial Sequence
  derived and/or modified sequence
atgggcgacgaccggcccttcgtgtgcaacgcccccggctgcggccagaggtttactaatgaggaccacctggcagtgcacaaacacaagcatgaaatgacactgaagtttggaccagctagaacggatagcgttataattgccgaccagacacccacacctacacgcttcctcaagaattgtgaggaggtcgggctattcaatgagctcgcttcttctttcgaacacgagtttaaaaaagcagctgacgaggacgaaaaaaaagcggctgcaggccccctggatatgtctctgccatcaacacctgacattaagattaaggaagaggagcccgtcgaggaggtgactccgaaaccagtccttatctctactcccacaccaaccatcgttcgcccaggcagcctgcccctgcatctaggttatgacccgttacacccaaccttgcctagccctacctcagttataacgcaggccccgccgagtaaccgtcagatgggatctcccactggctccctcccactggtgatgcatctggccaatggacagaccatgcccgtgctgccagggccacccgtgcaaatgccatctgtaatcagcttggctagacccgtctccatggtccccaatattcctggcatccctggccctccggtgaatagctccggctcaatatcccccagcggtcaccctattccctccgaggctaagatgcgactgaaagctactttgactcatcaagtcagctctataaacggggggtgtggtatggtggtggggacagcctcaaccatggtcactgctcgaccagaacagtcccagatcctgatccagcaccctgatgcaccgtcccccgcccagccacaggtgtcgccagcccaaccaaccccctccaccggtggcaggaggcgccgcaccgtcgatgaggaccctgacgaaagaaggcagcgttttctggagaggaatagggccgctgcgtcccgatgtagacagaagcgtaaattgtgggtttcatccctcgaaaaaaaggccgaagagctcacaagccagaatattcagctctctaatgaagtcacgctgcttcggaatgaggtggcccagttgaagcagttgttgctggcccataaagactgccctgtcacggcccttcaaaaaaagacacagggctaccttgaaagcccaaaagagagttccgagccaactgggagccctgctccagttatccagcacagctcagccaccgccccgagcaacggactgtccgtgcgatccgcggctgaagctgtggctacgagcgtgctgacccagatggcttctcaacgtactgagctctccatgcccatccagtcgcatgtgatcatgaccccgcaaagccagagcgcgggacggtag

SEQ ID NO: 47436 - DNA, 924 bp, Artificial Sequence
  derived and/or modified sequence
atgggcgacgaccgaccatttgtttgcaatgctcccggatgcggacagagatttactaacgaagatcacctcgccgtccataaacacaagcacgagatgaccttgaaatttggtcctgcacgcactgattcggtgattatcgctgaccagacacccacccctacgaggtttttgaagaactgcgaggaggtcgggttatttaatgagcttgcctccagctttgagcacgagttcaagaaagctgccgacgaagacgaaaagaaggccgcagcgggaccccttgatatgtccctgccgtctacccccgacatcaaaattaaggaggaggaacccgttgaggtggacagctctcctccagactctcccgcttcctctccctgctcgccacccctgaaggagaaatcacctgcccagccaactccctccactggtggcagaagaaggagaactgtggacgaagacccggacgagagacggcagcgtttcttggagcgtaatagggccgcagcaagccgatgcagacaaaagaggaagctttgggtgagttcactcgagaaaaaagctgaggagctcacaagccagaacatccaactttccaatgaagtaactctgctacgaaatgaggttgctcagctgaaacaactcctgctggctcataaggattgccctgtgactgccctgcagaaaaagacgcagggatacctagagtcccctaaggagagtagcgaacccacagggtcaccagcacctgtaatccagcattccagtgccactgcacccagcaacggactaagcgtccgctccgctgcagaggccgtcgcgacttctgtgctgacccagatggcatcgcagcgaaccgagctgagtatgccaatccaaagtcacgtgattatgactccccagtcccagtcagccggacggtag

SEQ ID NO: 47437 - DNA, 1389 bp, Artificial Sequence
  derived and/or modified sequence
atgggcgacgatcgaccattcgtttgcaatgcccctgggtgcgggcagaggttcaccaatgaagaccatctcgccgtccataaacacaagcatgagatgacattaaagtttgggccagccagaaccgacagcgtgattatcgctgaccaaacccccacccctaccagattcttaaagaattgcgaggaggtgggactatttaatgaactggcaagtagctttgagcacgaattcaaaaaagccgctgacgaggatgagaagaaggcggcagccggaccactggatatgagcctgccttcgacaccggacataaaaattaaagaagaagaaccggtggaggaagtgacccccaaacccgttcttattagcactcctactcccaccatcgtgcgtcccggttcgcttcccctgcacctcgggtatgaccccttacacccaaccttgccttctccaacatccgtcatcacccaggcccctccatccaaccgacagatggggagccccactggttcactaccactggtcatgcacttggccaatggccagaccatgcctgtgctcccgggaccgcctgtgcaaatgccttccgtcatttctctggcccgtcccgtatcgatggtgcctaacattcctggaatcccagggcctccagtgaactcctccgggtccatctcccctagcggtcaccccataccctctgaggctaaaatgagactaaaagccactcttactcatcaggtctcttcaatcaatggagggtgtggcatggtcgtggggacagcctccacaatggtcaccgcacgacccgagcaatcccagatattgatccagcaccctgacgcgcctagcccggctcagccacaggtttcacccgctcagccgacaccttcaactggtgggagaagacgaaggaccgtggacgaggacccagatgagcggagacagcgctttctggagagaaatagagccgctgcctctcggtgtcggcagaaaagaaagctgtgggtgtcctctctggagaagaaggctgaggagctcacatcccagaacatacaactgtcaaacgaggttacattgctgcggaacgaggttgcccagctcaagcaactgctgctggctcataaggactgccctgtgacagcactgcagaagaagacccagggctacttggaatcccccaaagaaagcagcgagccgaccggatcgcctgctccagtgatccagcactcgtcggcgacagccccatctaatgggctgtccgtgcgaagtgctgctgaagccgtcgccacttctgttctcacgcaaatggcttcgcagagaaccgagctgagcatgcctattcagtcgcatgtcataatgaccccccagagccagtctgccggtcggtag

SEQ ID NO: 47438 - DNA, 924 bp, Artificial Sequence
  derived and/or modified sequence
atgggcgacgacagacccttcgtgtgcaacgcccccggctgcggccagagattcaccaacgaggaccacctggccgtgcacaagcacaagcacgagatgaccctgaagttcggccccgccagaaccgacagcgtgatcatcgccgaccagacccccacccccaccagattcctgaagaactgcgaggaggtgggcctgttcaacgagctggccagcagcttcgagcacgagttcaagaaggccgccgacgaggacgagaagaaggccgccgccggccccctggacatgagcctgcccagcacccccgacatcaagatcaaggaggaggagcccgtggaggtggacagcagcccccccgacagccccgccagcagcccctgcagcccccccctgaaggagaagagccccgcccagcccacccccagcaccggcggcagaagaagaagaaccgtggacgaggaccccgacgagagaagacagagattcctggagagaaacagagccgccgccagcagatgcagacagaagagaaagctgtgggtgagcagcctggagaagaaggccgaggagctgaccagccagaacatccagctgagcaacgaggtgaccctgctgagaaacgaggtggcccagctgaagcagctgctgctggcccacaaggactgccccgtgaccgccctgcagaagaagacccagggctacctggagagccccaaggagagcagcgagcccaccggcagccccgcccccgtgatccagcacagcagcgccaccgcccccagcaacggcctgagcgtgagaagcgccgccgaggccgtggccaccagcgtgctgacccagatggccagccagagaaccgagctgagcatgcccatccagagccacgtgatcatgaccccccagagccagagcgccggcagatag

SEQ ID NO: 47439 - DNA, 1389 bp, Artificial Sequence
  derived and/or modified sequence
atgggcgacgacagacccttcgtgtgcaacgcccccggctgcggccagagattcaccaacgaggaccacctggccgtgcacaagcacaagcacgagatgaccctgaagttcggccccgccagaaccgacagcgtgatcatcgccgaccagacccccacccccaccagattcctgaagaactgcgaggaggtgggcctgttcaacgagctggccagcagcttcgagcacgagttcaagaaggccgccgacgaggacgagaagaaggccgccgccggccccctggacatgagcctgcccagcacccccgacatcaagatcaaggaggaggagcccgtggaggaggtgacccccaagcccgtgctgatcagcacccccacccccaccatcgtgagacccggcagcctgcccctgcacctgggctacgaccccctgcaccccaccctgcccagccccaccagcgtgatcacccaggccccccccagcaacagacagatgggcagccccaccggcagcctgcccctggtgatgcacctggccaacggccagaccatgcccgtgctgcccggcccccccgtgcagatgcccagcgtgatcagcctggccagacccgtgagcatggtgcccaacatccccggcatccccggcccccccgtgaacagcagcggcagcatcagccccagcggccaccccatccccagcgaggccaagatgagactgaaggccaccctgacccaccaggtgagcagcatcaacggcggctgcggcatggtggtgggcaccgccagcaccatggtgaccgccagacccgagcagagccagatcctgatccagcaccccgacgcccccagccccgcccagccccaggtgagccccgcccagcccacccccagcaccggcggcagaagaagaagaaccgtggacgaggaccccgacgagagaagacagagattcctggagagaaacagagccgccgccagcagatgcagacagaagagaaagctgtgggtgagcagcctggagaagaaggccgaggagctgaccagccagaacatccagctgagcaacgaggtgaccctgctgagaaacgaggtggcccagctgaagcagctgctgctggcccacaaggactgccccgtgaccgccctgcagaagaagacccagggctacctggagagccccaaggagagcagcgagcccaccggcagccccgcccccgtgatccagcacagcagcgccaccgcccccagcaacggcctgagcgtgagaagcgccgccgaggccgtggccaccagcgtgctgacccagatggccagccagagaaccgagctgagcatgcccatccagagccacgtgatcatgaccccccagagccagagcgccggcagatag

SEQ ID NO: 47440 - DNA, 6158 bp, Artificial Sequence
  derived and/or modified sequence
atgacttctcgcgagagttgagcgcgcctggccggacgggaggaaagtatccgttccgccaaggggggaaaggaggagctggagacagattgtaggaccgagcgcgggcaggcgggaggcaacggagctaccagccgctcctctctgctatatgaaatatgggagacgacagaccgtttgtgtgcaatgccccgggctgtggacagagatttacaaacgaggaccacctggcagttcataaacacaagcatgagatgacattgaaatttggcccagcccgaactgactcagtcatcattgcagatcaaacgcctactccaactagattcctgaagaactgtgaggaggtgggactcttcaatgaactagctagctcctttgaacatgaattcaagaaagctgcagatgaggatgagaaaaaggctgctgctgggccccttgacatgtctctgccttccacaccagacatcaaaatcaaagaagaagagccagtggaggtagactcatccccacctgatagccctgcctctagtccctgttccccaccactgaaggagaagtcaccagctcagcccacccctagtactggggggcgacggcggcgcacagtagatgaagatccagatgagcgacggcagcgctttctggagcgcaaccgggctgcagcctcccgctgccgccaaaagcgaaagctgtgggtgtcctccctagagaagaaggccgaagaactcacttctcagaacattcagctgagtaatgaagtcacattactacgcaatgaggtggcccagttgaaacagctactgttagctcataaagactgcccagtcactgcactacagaaaaagactcaaggctatttagaaagccccaaggaaagctcagagccaacgggttctccagcccctgtgattcagcacagctcagcaacagcccctagcaatggcctcagtgttcgctctgcagctgaagctgtggccacctcggtcctcactcagatggccagccaaaggacagaactgagcatgccgatacaatcgcatgtaatcatgaccccacagtcccagtctgcgggcagatgatgcctcctctggtggagaggtcctcagccagagctcgcccgcccaagagccaagagagatgtcatcttatcccctcccatctgccttggacatggcaatatgggtggggggaattgtgtgttgtgagtaatggacagatatggggctttttagccatgtggtcatgtacgtttgacacctgtgctgggggcctcccagccccggagcctcatagatcatcccccagggtggggtttctgatgcatccacagccaaaggcctttccagatggtccgaacaatcacccctgccccatgcacgtgtatctgtctcttttaacactaacccttggcacttctaggtttggggtttctcagttccctctcttcccactaagccgtggctgttacctttttgttccttaccagcatgccacttcctgccagatagagggaggctagatttgatgacatattacccgctgacccagccccagccaccccatggactcaggactcaggtctcccatagctgcttatttacccgtttcctttttcctcttccttaattctagttaaaacattcacttacggagaatgtaaggttacctttgatgtatgaagtagcagtattttccagtttttccataagctttattccttctctctacctgccaccaaaaagaaagaaaccctcaagagttctaattctttttcatctatttgcagagctatttgggtacctcattttgtcccttgactttagtgtagtggtggggtctttcccaccaccccactaagccttggcaacctcattttgtggccttattattaaagattgcttggtagtgaaaagggaagggcccagaatctgactggctgattctgtctcctcccctccctccttctttagtttaaccatcagggcagacaggaacaaagtatttcaaagcttgttccatcaagttagggattaatcgattcctttatgttttataagagtttaccggccaaagcatattgtcatctttggtcatttttctgctcctgcttctctctcttcattcccctatcaacattaccgcccctgtctctcttctgtaactacttcagactcagccctcctggaggctgtcatgtaggggactctcgagttcctttgttctaccccatctctccccctcacacatctgtctgcttttctgagctagagtcttctgttcacaagtgcccatcaccgtctggactatcttctttctctttcaccaggttcctagcttagccactaggtcttccaggtcctccagagtttcttcaacccatttcttctctcttctctttacatgcagtgctccaggatcttgaagcgtcatagccaagatgctgagtgggtttacttgagtataagattgaaaggagggaggaagaggagagggaaagtgcagaactggtcccagcaaaggaccccaggttctggcctgggaaattggtgactattgctctcaaccattcttactttgaagagttgggttgcagagggagcaattcatctctcttgtccctcttccacgttaaggcttctcatctccccttggctctgaactatgcagtttctaccaggaccataggaagcaattcagagccagaggcctgtggatagataggtcagctttaattgcctttccgtatgaaacccttccagttgtcccagagccactttctgccatctgtgcaagccaagaatgtccttctctccatctttcctacctccatcttaaacatacatacaaaataactgccagcttcctttcttattttgtctccaaaattgactgtcacaggggaatgagaaaatgttctaagctacaagattcccgtttccttaaagtgatatcctgtcctagtgaaccagtcaggtaacaggttctgctgcatttgttttaaatttcccctcctgcttttcagagctggtgctgaacaggccacacccctaaagacaaaggagagaaaacacggttttctcatcctctaccatcaggtacccaacaggaataggccctgaagtgattcagactagcaaatgttatggcagatggtcaggacgcaggttaccacatccagggacttcacttttgcctttaaaaattcacagccgtaacttgtgctcaggacttcccctttagctggctgctccctgggattttctcctgctttagagttttgtttcatttttttattgtcttgatttcccagtagcagccttgccctaaagcttgactgagtttatggctcctaaggagctttcctaagactcttgactatttttcttcccccttcagtcaagtgtttttacagttaagaattaatttgtaactgcatacatgccctgccagtctgtccctgtgttgggtggctaatttatgtagcgggtcttttttatttcttagcccccatgactaattatctagtcctaacttcatttttatcagtgggaagatgtgtacgggacctcagtgaggagcactgccagaaccacagtaacaaaatggcactgaaataaggaagcagcaggtcagaaccccctagatagttcttgagttggttctcagtctcactaaggaggcagaataattgctgccctgaaacttctctgatagtcaaaggtaacttcacttaccttgttattgctaccagccatgtggtcactctccccaaatctttgtcttccagatccatctggaccagaaccaaacatcatggaaggtgtcacttggcccttcctaaagtccatggcgtttctagaggcctaagggaggacactttcagaaaggagctgagtgtatggtgggtgtcctgaattcgttcatgtgaatacaggactcaggcttcccaccccactccaatgtgagtgctcgatacacaagcactctagctagctgccacgtacccaaggccacagagggaggggacagaaccaggtcttctggtctgctcactttctgccccattcccctaacagaaagtttgcttagagttgaaaagtctaagaaagcctcccacaatactagagaggccaacaaaaaaaaagtcatgccccctttacttactcttttgctgctggttatgcatctcaaatctgacttccttagccttcacctccctccttggccctaagcattagaccatgtactctaagtagtggttaaagagggactgagcaaactgaacctcctctcgctcacttctctatccctgttctgttggttttggctcctttcttgattcactgccctctagcaccacccatcctggtagatggagtgcttaaccccaaccgtgccctatgtacagcctgaaccaccaaacagacaccaaaaaaattcttcctgtggtttctggggctcccctgctccacactgagaggctccttaaaggtgctagcccctgatacagctatccccgccagttttctccttttttcataacttccttcccatccccaaatcattaatttttcattaatattgtacattatatacacaggaaggaaatacattattttttttaaatttcataaccagcctgtttagattccagtcttcctagctatatcacatatgccttgttgatatgctctttctgctttctttagacttaatgtttgacgggggtgggggtgtctggaagaacaggaaaggtggggatcctaaggcagattaaaggactccctccaccccactacagcctcccataactctagtcatccctctcatagtacaggactgatttctctgtgtctgtttgtacacacaaatgtgcatacagacataaattcccccaccccataccaaggtggttacctagcaggaatgagcgtaggtggctgctggccaccattaccaccgtctgcatcagctgtgttgtctctctttggggtaaagtcctaccccagaatgagaaaaggctggggagagtagggcaggttaaaggagcttatgtcctctgtagatgtaggtttgtatcatagctactagggtttatttttttaatggggggctaatagcacagagttatctcaccagcagtagctactggtgagtgatgttttagctgtaagaagtggctatgagcaatagtttcactgactttaccttagggcagtgccacagtaatctgggaacttgttagaaatacacattctcaggccccatcccagacttattgaatcacagactctgggggcagggtttaaaagcactccaagtgattctaatgcacactaaaggttgagaaccatttcttagggataagctgggaaatttttacaggtgtggaggatatttcaaatacatcttttgcctttgcactaacatgctttcatttctttcagtctcttcctccattccctttaaagtcttccccatcatatcactgatctcaaaagctagatttgtcttcattttagtcgtatccctaaaaccatgcattggtctggacaggagttgtcccatattcccttgcagactggtcactccatgttctctgttacagtaaggaccagccaagcttcagctgtcccattcctccccctacaacacacacacctttcaggcagggaggagatgagcttccagccccaagagtggaggctgccacatcctaacatagtatctattgaaaaggaagcagtgtgtatctatgattatatctctgttcatctatatatttttgacatgtagcaacacctctccatcttatcaaggaactcaactcggtctgggtctccccagtgcccagtggtggcctttgacaggtaggaggatgcagtgctgcaggctattttgttttttgttacaaaactgtcttttcccttttcccctccacctgattcagcatgatccctgtgagctggttctcacaatctcctgggactgggctgaggcaggggcttcgctctattctccctaaccatactgtcttcctttcccccttgccacttagcagttatccccccagctatgccttctccctccctcccttgccctggcatatattgtgccttatttatgctgcaaatataacattaaactatcaagtg

SEQ ID NO: 47441 - DNA, 6623 bp, Artificial Sequence
  derived and/or modified sequence
atgacttctcgcgagagttgagcgcgcctggccggacgggaggaaagtatccgttccgccaaggggggaaaggaggagctggagacagattgtaggaccgagcgcgggcaggcgggaggcaacggagctaccagccgctcctctctgctatatgaaatatgggagacgacagaccgtttgtgtgcaatgccccgggctgtggacagagatttacaaacgaggaccacctggcagttcataaacacaagcatgagatgacattgaaatttggcccagcccgaactgactcagtcatcattgcagatcaaacgcctactccaactagattcctgaagaactgtgaggaggtgggactcttcaatgaactagctagctcctttgaacatgaattcaagaaagctgcagatgaggatgagaaaaaggctgctgctgggccccttgacatgtctctgccttccacaccagacatcaaaatcaaagaagaagagccagtggaggaggttaccccaaagcctgttctgatctctacccccacacccaccattgtacgtcctggctccctgcctctccacttgggctatgatccacttcatccaacccttccctccccaacctctgtcatcacacaggctccaccatccaacaggcaaatggggtctcccactggctccctccctcttgtcatgcatcttgctaatggacagaccatgcctgtgttgccagggcctccagtacagatgccgtctgttatatcgctggccagacctgtgtccatggtgcccaacattcctggtatccctggcccaccagttaacagtagtggctccatttctccctctggccaccctataccatcagaagccaagatgagactgaaagccaccctaactcaccaagtctcctcaatcaatggtggttgtggaatggtggtgggtactgccagcaccatggtgacagcccgcccagagcagagccagattctcatccagcaccctgatgccccatcccctgcccagccacaggtctcaccagctcagcccacccctagtactggggggcgacggcggcgcacagtagatgaagatccagatgagcgacggcagcgctttctggagcgcaaccgggctgcagcctcccgctgccgccaaaagcgaaagctgtgggtgtcctccctagagaagaaggccgaagaactcacttctcagaacattcagctgagtaatgaagtcacattactacgcaatgaggtggcccagttgaaacagctactgttagctcataaagactgcccagtcactgcactacagaaaaagactcaaggctatttagaaagccccaaggaaagctcagagccaacgggttctccagcccctgtgattcagcacagctcagcaacagcccctagcaatggcctcagtgttcgctctgcagctgaagctgtggccacctcggtcctcactcagatggccagccaaaggacagaactgagcatgccgatacaatcgcatgtaatcatgaccccacagtcccagtctgcgggcagatgatgcctcctctggtggagaggtcctcagccagagctcgcccgcccaagagccaagagagatgtcatcttatcccctcccatctgccttggacatggcaatatgggtggggggaattgtgtgttgtgagtaatggacagatatggggctttttagccatgtggtcatgtacgtttgacacctgtgctgggggcctcccagccccggagcctcatagatcatcccccagggtggggtttctgatgcatccacagccaaaggcctttccagatggtccgaacaatcacccctgccccatgcacgtgtatctgtctcttttaacactaacccttggcacttctaggtttggggtttctcagttccctctcttcccactaagccgtggctgttacctttttgttccttaccagcatgccacttcctgccagatagagggaggctagatttgatgacatattacccgctgacccagccccagccaccccatggactcaggactcaggtctcccatagctgcttatttacccgtttcctttttcctcttccttaattctagttaaaacattcacttacggagaatgtaaggttacctttgatgtatgaagtagcagtattttccagtttttccataagctttattccttctctctacctgccaccaaaaagaaagaaaccctcaagagttctaattctttttcatctatttgcagagctatttgggtacctcattttgtcccttgactttagtgtagtggtggggtctttcccaccaccccactaagccttggcaacctcattttgtggccttattattaaagattgcttggtagtgaaaagggaagggcccagaatctgactggctgattctgtctcctcccctccctccttctttagtttaaccatcagggcagacaggaacaaagtatttcaaagcttgttccatcaagttagggattaatcgattcctttatgttttataagagtttaccggccaaagcatattgtcatctttggtcatttttctgctcctgcttctctctcttcattcccctatcaacattaccgcccctgtctctcttctgtaactacttcagactcagccctcctggaggctgtcatgtaggggactctcgagttcctttgttctaccccatctctccccctcacacatctgtctgcttttctgagctagagtcttctgttcacaagtgcccatcaccgtctggactatcttctttctctttcaccaggttcctagcttagccactaggtcttccaggtcctccagagtttcttcaacccatttcttctctcttctctttacatgcagtgctccaggatcttgaagcgtcatagccaagatgctgagtgggtttacttgagtataagattgaaaggagggaggaagaggagagggaaagtgcagaactggtcccagcaaaggaccccaggttctggcctgggaaattggtgactattgctctcaaccattcttactttgaagagttgggttgcagagggagcaattcatctctcttgtccctcttccacgttaaggcttctcatctccccttggctctgaactatgcagtttctaccaggaccataggaagcaattcagagccagaggcctgtggatagataggtcagctttaattgcctttccgtatgaaacccttccagttgtcccagagccactttctgccatctgtgcaagccaagaatgtccttctctccatctttcctacctccatcttaaacatacatacaaaataactgccagcttcctttcttattttgtctccaaaattgactgtcacaggggaatgagaaaatgttctaagctacaagattcccgtttccttaaagtgatatcctgtcctagtgaaccagtcaggtaacaggttctgctgcatttgttttaaatttcccctcctgcttttcagagctggtgctgaacaggccacacccctaaagacaaaggagagaaaacacggttttctcatcctctaccatcaggtacccaacaggaataggccctgaagtgattcagactagcaaatgttatggcagatggtcaggacgcaggttaccacatccagggacttcacttttgcctttaaaaattcacagccgtaacttgtgctcaggacttcccctttagctggctgctccctgggattttctcctgctttagagttttgtttcatttttttattgtcttgatttcccagtagcagccttgccctaaagcttgactgagtttatggctcctaaggagctttcctaagactcttgactatttttcttcccccttcagtcaagtgtttttacagttaagaattaatttgtaactgcatacatgccctgccagtctgtccctgtgttgggtggctaatttatgtagcgggtcttttttatttcttagcccccatgactaattatctagtcctaacttcatttttatcagtgggaagatgtgtacgggacctcagtgaggagcactgccagaaccacagtaacaaaatggcactgaaataaggaagcagcaggtcagaaccccctagatagttcttgagttggttctcagtctcactaaggaggcagaataattgctgccctgaaacttctctgatagtcaaaggtaacttcacttaccttgttattgctaccagccatgtggtcactctccccaaatctttgtcttccagatccatctggaccagaaccaaacatcatggaaggtgtcacttggcccttcctaaagtccatggcgtttctagaggcctaagggaggacactttcagaaaggagctgagtgtatggtgggtgtcctgaattcgttcatgtgaatacaggactcaggcttcccaccccactccaatgtgagtgctcgatacacaagcactctagctagctgccacgtacccaaggccacagagggaggggacagaaccaggtcttctggtctgctcactttctgccccattcccctaacagaaagtttgcttagagttgaaaagtctaagaaagcctcccacaatactagagaggccaacaaaaaaaaagtcatgccccctttacttactcttttgctgctggttatgcatctcaaatctgacttccttagccttcacctccctccttggccctaagcattagaccatgtactctaagtagtggttaaagagggactgagcaaactgaacctcctctcgctcacttctctatccctgttctgttggttttggctcctttcttgattcactgccctctagcaccacccatcctggtagatggagtgcttaaccccaaccgtgccctatgtacagcctgaaccaccaaacagacaccaaaaaaattcttcctgtggtttctggggctcccctgctccacactgagaggctccttaaaggtgctagcccctgatacagctatccccgccagttttctccttttttcataacttccttcccatccccaaatcattaatttttcattaatattgtacattatatacacaggaaggaaatacattattttttttaaatttcataaccagcctgtttagattccagtcttcctagctatatcacatatgccttgttgatatgctctttctgctttctttagacttaatgtttgacgggggtgggggtgtctggaagaacaggaaaggtggggatcctaaggcagattaaaggactccctccaccccactacagcctcccataactctagtcatccctctcatagtacaggactgatttctctgtgtctgtttgtacacacaaatgtgcatacagacataaattcccccaccccataccaaggtggttacctagcaggaatgagcgtaggtggctgctggccaccattaccaccgtctgcatcagctgtgttgtctctctttggggtaaagtcctaccccagaatgagaaaaggctggggagagtagggcaggttaaaggagcttatgtcctctgtagatgtaggtttgtatcatagctactagggtttatttttttaatggggggctaatagcacagagttatctcaccagcagtagctactggtgagtgatgttttagctgtaagaagtggctatgagcaatagtttcactgactttaccttagggcagtgccacagtaatctgggaacttgttagaaatacacattctcaggccccatcccagacttattgaatcacagactctgggggcagggtttaaaagcactccaagtgattctaatgcacactaaaggttgagaaccatttcttagggataagctgggaaatttttacaggtgtggaggatatttcaaatacatcttttgcctttgcactaacatgctttcatttctttcagtctcttcctccattccctttaaagtcttccccatcatatcactgatctcaaaagctagatttgtcttcattttagtcgtatccctaaaaccatgcattggtctggacaggagttgtcccatattcccttgcagactggtcactccatgttctctgttacagtaaggaccagccaagcttcagctgtcccattcctccccctacaacacacacacctttcaggcagggaggagatgagcttccagccccaagagtggaggctgccacatcctaacatagtatctattgaaaaggaagcagtgtgtatctatgattatatctctgttcatctatatatttttgacatgtagcaacacctctccatcttatcaaggaactcaactcggtctgggtctccccagtgcccagtggtggcctttgacaggtaggaggatgcagtgctgcaggctattttgttttttgttacaaaactgtcttttcccttttcccctccacctgattcagcatgatccctgtgagctggttctcacaatctcctgggactgggctgaggcaggggcttcgctctattctccctaaccatactgtcttcctttcccccttgccacttagcagttatccccccagctatgccttctccctccctcccttgccctggcatatattgtgccttatttatgctgcaaatataacattaaactatcaagtg

SEQ ID NO: 47442 - protein, 274 aa, Artificial Sequence
  derived and/or modified sequence
MTKSCSELCHPALHFLPCLGGLRKNLQRAVRPSPYSLGFLTFWISRVEKNDDDQKIEQDGIKPEDKAHKAATKIQASFRGHITRKKLKGEKKDDVQAAEAEANKKDEAPVADGVEKKGEGTTTAEAAPATGSKPDEPGKAGETPSEEKKGEGDAATEQAAPQAPASSEEKAGSAETESATKASTDNSPSSKAEDAPAKEEPKQADVPAAVTAAAATTPAAEDAAAKATAQPPTETGESSQAEENIEAVDETKPKESARQDEGKEEEPEADQEHA

SEQ ID NO: 47443 - DNA, 825 bp, Artificial Sequence
  derived and/or modified sequence
atgacgaaatcatgcagtgagttatgtcaccctgccctgcactttctaccttgcttggggggacttcggaagaacctgcagcgcgctgtgagaccttctccctattcgctgggatttctcacgttctggatcagtcgggttgaaaagaatgatgacgatcaaaagattgaacaagatggtatcaaaccagaggacaaagcccacaaggcagctaccaagattcaggcatcttttcggggtcatattacaaggaagaagctgaagggcgaaaaaaaagatgatgttcaggcagccgaggcagaggccaataaaaaggatgaagcgcccgtcgctgatggtgtggaaaaaaaaggggagggaacgacaacggcggaggccgctcccgctaccggctccaagccagatgagccaggcaaagcaggggagacaccgtccgaggaaaagaaaggggaaggtgatgccgcaaccgagcaggctgctcctcaggcccctgctagctcagaagagaaagctgggagcgccgagaccgagtctgctacgaaggccagtaccgataattccccctccagcaaggctgaggatgcgcccgccaaggaagaaccgaaacaggccgatgtgccagccgctgttacagctgctgcggccacaacacctgccgcagaagatgcagccgccaaggctaccgcccagccacctactgaaaccggagagtcaagtcaggccgaggagaatatcgaagccgtggacgagaccaaaccaaaggaaagcgcacggcaggacgaggggaaggaggaagagcccgaagccgaccaggagcatgcatag

SEQ ID NO: 47444 - DNA, 1901 bp, Artificial Sequence
  derived and/or modified sequence
acagttgctgctaactgccctggtgtgtgtgagggagagagagggagggagggagagagagcgcgctagcgcgagagagcgagtgagcaagcgagcagaaaagaggtggagagggggggaataagaaagagagagaaggaaaggagagaaggcaggaagaaggcaagggacgagacaaccatgctgtgctgtatgagaagaaccaaacagaattaaaagggaacctggtctctgggttgttttcaacatctcaagtgtgaattttccctgtcaaaatcttcacaaggaaaatgagtcacagcatcacctgggtgacgaggtcataacacctcagcccttgcttaaaaaattttatttctacttttctattgtaaagagatctcaaaacaggaagataaaattggactgacagctctacagcctagtcttttagacagtgaactaggccagcattggcagacactggcgatgacaaagtcctgctctgaattatgccaccccgcactccactttttaccttgcctgggaggcttgaggaaaaatcttcagagagcagttcgacctagtccttattcacttggcttcttgactttctggatttcaagggttgaaaaaaatgatgacgaccaaaagattgaacaagatggtatcaaaccagaagataaagctcataaggccgcaaccaaaattcaggctagcttccgtggacacataacaaggaaaaagctcaaaggagagaagaaggatgatgtccaagctgctgaggctgaagctaataagaaggatgaagcccctgttgccgatggggtggagaagaagggagaaggcaccactactgccgaagcagccccagccactggctccaagcctgatgagcccggcaaagcaggagaaactccttccgaggagaagaagggggagggtgatgctgccacagagcaggcagccccccaggctcctgcatcctcagaggagaaggccggctcagctgagacagaaagtgccactaaagcttccactgataactcgccgtcctccaaggctgaagatgccccagccaaggaggagcctaaacaagccgatgtgcctgctgctgtcactgctgctgctgccaccacccctgccgcagaggatgctgctgccaaggcaacagcccagcctccaacggagactggggagagcagccaagctgaagagaacatagaagctgtagatgaaaccaaacctaaggaaagtgcccggcaggacgagggtaaagaagaggaacctgaggctgaccaagaacatgcctgaactctaagaaatggctttccacatccccaccctcccctctcctgagcctgtctctccctaccctcttctcagctccactctgaagtcccttcctgtcctgctcacgtctgtgagtctgtcctttcccacccactagccctctttctctctgtgtggcaaacatttaaaaaaaaaaaaaaaaagcaggaaagatcccaagtcaaacagtgtggcttaaacattttttgtttcttggtgttgttatggcaagtttttggtaatgatgattcaatcattttgggaaattcttgcactgtatccaagttatttgatctggtgcgtgtggccctgtgggagtccactttcctctctctctctctctctgttccaagtgtgtgtgcaatgttccgttcatctgaggagtccaaaatatcgagtgaattcaaaatcatttttgttttcctccttttcaatgtgatggaatgaacaaaaaggaaaaaattcaaaaaacccagtttgttttaaaaataaataaataaagcaaatgtgccaattagcgtaaacttgcggctctaaggctcctttttcaacccgaatattaataaatcatgagagtaatcaaggtccaa

SEQ ID NO: 47445 - DNA, 825 bp, Artificial Sequence
  derived and/or modified sequence
atgaccaagagctgcagcgagctgtgccacccagccctgcacttcctgccctgcctgggcggcctgaggaagaacctgcagagagctgtgcggcccagcccctacagcctgggcttcctgaccttctggatcagccgggtggagaagaatgatgatgaccagaagattgagcaggacggcatcaagccagaggacaaggcccacaaggccgccaccaagatccaggccagcttccggggccacatcaccaggaagaagctgaagggggagaagaaggatgatgtgcaggccgctgaggccgaggccaacaagaaggatgaggcccctgtggctgatggagtggagaagaagggggagggcaccaccacagctgaggccgccccagccaccggcagcaagccagatgagcccgggaaggccggggagaccccatctgaggagaagaagggggagggagatgctgccacagagcaggccgccccccaggccccagccagcagcgaggagaaggccggcagcgctgagacagagagcgccaccaaggccagcacagacaacagccccagcagcaaggcagaagatgccccagccaaggaggagcccaagcaggctgatgtgcctgctgctgtgacagctgctgctgccaccaccccagctgctgaagatgctgctgccaaggccacagcccagcccccaacagaaacaggagagagcagccaggccgaggagaacattgaagctgtggatgagaccaagcccaaggagagcgcccggcaggatgagggcaaggaggaggagcctgaggccgaccaggagcacgcctag

SEQ ID NO: 47446 - DNA, 825 bp, Artificial Sequence
  derived and/or modified sequence
atgaccaagagctgcagcgagctgtgccaccccgccctgcacttcttaccctgcctaggaggtctccgaaagaatctacagagagcggttagacccagtccctactccctcggcttcctgacattttggatatcacgggtcgagaagaacgatgatgaccagaagatcgagcaggacggcattaagccagaggacaaagctcataaggctgcaactaaaatacaagcttccttcagaggacacattactcgtaaaaaactcaagggtgaaaagaaagacgatgtgcaagcagctgaagctgaggccaataagaaggacgaggcgcccgtggccgacggcgtggaaaaaaagggcgaggggacaacgacggccgaggccgcgccagccactggcagcaagcctgacgaacccggtaaagccggcgagactccaagcgaagagaaaaaaggggagggagatgccgcgacagagcaggcagccccccaagcgcccgcctccagtgaggaaaaggctggatccgccgaaactgagtctgccacgaaggcgagcaccgacaactctccctcttcaaaggctgaggatgctccggctaaagaggagccaaagcaagcagatgtcccagccgcggtgaccgctgccgcagccacaacacccgccgcggaggacgccgcagccaaggctaccgctcagccccccacagaaaccggtgaaagctcccaggccgaggagaacatcgaagcagtggacgagaccaaacccaaggaatctgctcgacaggacgaggggaaggaggaggaacccgaagccgatcaggaacacgcctag

SEQ ID NO: 47447 - DNA, 825 bp, Artificial Sequence
  derived and/or modified sequence
atgactaagtcttgcagcgagctgtgccatcccgctctgcactttttaccctgtcttggtggacttagaaaaaacctgcagagggcagtgcgcccaagcccctatagtctcggattcctgaccttttggatttctcgtgtcgaaaagaacgacgacgatcagaagattgaacaggacggtataaagcctgaagacaaagcccacaaggccgcaacaaagatccaggccagttttaggggccatatcacccggaagaagctcaagggggaaaaaaaagatgacgtgcaggccgcagaggccgaggccaataaaaaggacgaagcccctgtggctgacggggttgagaaaaagggcgagggaacaactacagctgaggccgcacccgcaactggctcaaagcccgatgagcccggaaaagccggagagactccttccgaggagaaaaaaggagagggcgatgcagcaacagagcaggccgctccccaggcccctgcaagttccgaagaaaaggcagggtccgctgagacagagtccgcaactaaagcttccacagacaatagtccttctagcaaagccgaagacgcgccagccaaggaagagccaaagcaggcggatgttccggcagctgttaccgctgccgctgctaccacccctgcagcggaggacgctgctgcaaaggccacagcccagcctcccacagagacaggggaatccagtcaagccgaggagaacatcgaagctgtagatgagactaaaccgaaagagtctgcacgacaagacgagggaaaagaagaggagcccgaagcagaccaggaacatgcatag

SEQ ID NO: 47448 - DNA, 825 bp, Artificial Sequence
  derived and/or modified sequence
atgaccaagagctgcagcgagctgtgccaccccgccctgcacttcctgccctgcctgggcggcctgagaaagaacctgcagagagccgtgagacccagcccctacagcctgggcttcctgaccttctggatcagcagagtggagaagaacgacgacgaccagaagatcgagcaggacggcatcaagcccgaggacaaggcccacaaggccgccaccaagatccaggccagcttcagaggccacatcaccagaaagaagctgaagggcgagaagaaggacgacgtgcaggccgccgaggccgaggccaacaagaaggacgaggcccccgtggccgacggcgtggagaagaagggcgagggcaccaccaccgccgaggccgcccccgccaccggcagcaagcccgacgagcccggcaaggccggcgagacccccagcgaggagaagaagggcgagggcgacgccgccaccgagcaggccgccccccaggcccccgccagcagcgaggagaaggccggcagcgccgagaccgagagcgccaccaaggccagcaccgacaacagccccagcagcaaggccgaggacgcccccgccaaggaggagcccaagcaggccgacgtgcccgccgccgtgaccgccgccgccgccaccacccccgccgccgaggacgccgccgccaaggccaccgcccagccccccaccgagaccggcgagagcagccaggccgaggagaacatcgaggccgtggacgagaccaagcccaaggagagcgccagacaggacgagggcaaggaggaggagcccgaggccgaccaggagcacgcctag

SEQ ID NO: 47449 - protein, 2022 aa, Artificial Sequence
  derived and/or modified sequence
MSVKEAGSSGRREQAAYHLHIYPQLSTTESQASCRVTATKDSTTSDVIKDAIASLRLDGTKCYVLVEVKESGGEEWVLDANDSPVHRVLLWPRRAQDEHPQEDGYYFLLQERNADGTIKYVHMQLVAQATATRRLVERGLLPRQQADFDDLCNLPELTEGNLLKNLKHRFLQQKIYTYAGSILVAINPFKFLPIYNPKYVKMYENQQLGKLEPHVFALADVAYYTMLRKRVNQCIVISGESGSGKTQSTNFLIHCLTALSQKGYASGVERTILGAGPVLEAFGNAKTAHNNNSSRFGKFIQVSYLESGIVRGAVVEKYLLEKSRLVSQEKDERNYHVFYYLLLGVSEEERQEFQLKQPEDYFYLNQHNLKIEDGEDLKHDFERLKQAMEMVGFLPATKKQIFAVLSAILYLGNVTYKKRATGREEGLEVGPPEVLDTLSQLLKVKREILVEVLTKRKTVTVNDKLILPYSLSEAITARDSMAKSLYSALFDWIVLRINHALLNKKDVEEAVSCLSIGVLDIFGFEDFERNSFEQFCINYANEQLQYYFNQHIFKLEQEEYQGEGITWHNIGYTDNVGCIHLISKKPTGLFYLLDEESNFPHATSQTLLAKFKQQHEDNKYFLGTPVMEPAFIIQHFAGKVKYQIKDFREKNMDYMRPDIVALLRGSDSSYVRELIGMDPVAVFRWAVLRAAIRAMAVLREAGRLRAERAEKAAGMSSPGAQSHPEELPRGASTPSEKLYRDLHNQMIKSIKGLPWQGEDPRSLLQSLSRLQKPRAFILKSKGIKQKQIIPKNLLDSKSLKLIISMTLHDRTTKSLLHLHKKKKPPSISAQFQTSLNKLLEALGKAEPFFIRCIRSNAEKKELCFDDELVLQQLRYTGMLETVRIRRSGYSAKYTFQDFTEQFQVLLPKDAQPCREVISTLLEKMKIDKRNYQIGKTKVFLKETERQALQETLHREVVRKILLLQSWFRMVLERRHFLQMKRAAVTIQACWRSYRVRRALERTQAAVYLQASWRGYWQRKLYRHQKQSIIRLQSLCRGHLQRKSFSQMISEKQKAEEKEREALEAARAGAEEGGQGQAAGGQQVAEQGPEPAEDGGHLASEPEVQPSDRSPLEHSSPEKEAPSPEKTLPPQKTVAAESHEKVPSSREKRESRRQRGLEHVKFQNKHIQSCKEESALREPSRRVTQEQGVSLLEDKKESREDETLLVVETEAENTSQKQPTEQPQAMAVGKVSEETEKTLPSGSPRPGQLERPTSLALDSRVSPPAPGSAPETPEDKSKPCGSPRVQEKPDSPGGSTQIQRYLDAERLASAVELWRGKKLVAAASPSAMLSQSLDLSDRHRATGAALTPTEERRTSFSTSDVSKLLPSLAKAQPAAETTDGERSAKKPAVQKKKPGDASSLPDAGLSPGSQVDSKSTFKRLFLHKTKDKKYSLEGAEELENAVSGHVVLEATTMKKGLEAPSGQQHRHAAGEKRTKEPGGKGKKNRNVKIGKITVSEKWRESVFRQITNANELKYLDEFLLNKINDLRSQKTPIESLFIEATEKFRSNIKTMYSVPNGKIHVGYKDLMENYQIVVSNLATERGQKDTNLVLNLFQSLLDEFTRGYTKNDFEPVKQSKAQKKKRKQERAVQEHNGHVFASYQVSIPQSCEQCLSYIWLMDKALLCSVCKMTCHKKCVHKIQSHCSYTYGRKGEPGVEPGHFGVCVDSLTSDKASVPIVLEKLLEHVEMHGLYTEGLYRKSGAANRTRELRQALQTDPAAVKLENFPIHAITGVLKQWLRELPEPLMTFAQYGDFLRAVELPEKQEQLAAIYAVLEHLPEANHNSLERLIFHLVKVALLEDVNRMSPGALAIIFAPCLLRCPDNSDPLTSMKDVLKITTCVEMLIKEQMRKYKVKMEEISQLEAAESIAFRRLSLLRQNAPWPLKLGFSSPYEGVLNKSPKTRDIQEEELEVLLEEEAAGGDEDREKEILIERIQSIKEEKEDITYRLPELDPRGSDEENLDSETSASTESLLEERAGRGASEGQY

SEQ ID NO: 47450 - DNA, 6069 bp, Artificial Sequence
  derived and/or modified sequence
atgtcagtcaaggaggctggctctagcgggagacgggaacaggctgcctatcacctccatatttatccacaactgtcaactactgagagccaggcgagttgcagggtcacagccaccaaagacagtactacatcggacgtgattaaggacgcgattgccagtttgcgcttagacgggacgaaatgttacgtcctggtggaagtaaaggagagcgggggcgaggaatgggtcctggatgcaaatgactcccccgttcacagggtcttactatggcccaggagagctcaagacgagcacccacaggaggatggctattacttcctcctccaggaacggaacgcagacggcacaattaagtacgtccacatgcagctagtagctcaggccacagccacccggaggctcgtggaacgagggcttctgcccaggcagcaagccgactttgacgatttgtgcaacctacctgaacttactgaaggaaacttgctgaaaaacctgaaacacagattcttacagcagaaaatctatacgtacgccggctcgatcttggtggccatcaatcctttcaaattcttgcctatatacaatccgaagtacgtgaagatgtacgaaaatcaacagctggggaaactggagccccatgtgtttgcgctcgccgatgtagcttactataccatgcttagaaaaagggtgaaccagtgtatcgtcattagcggcgaatccggttccggaaagacgcaatccaccaatttcttaatccattgtttgaccgcacttagtcaaaaaggatatgctagtggggtggaaaggactatccttggtgcaggcccggtattagaagcatttggaaacgccaaaacagctcataataataacagcagtcgttttggcaagtttatccaggtgtcttacctggagtctgggatcgttaggggcgctgtggtggaaaaatatttacttgagaagtcgaggttggtttctcaggagaaagacgaacggaactaccatgtcttttattacctgctgctcggggtttctgaagaggaacgacaagagtttcagcttaaacagccagaggactatttctatctcaaccagcataaccttaaaattgaagatggagaagacttgaaacacgattttgagaggttaaagcaggcaatggagatggtaggcttcctgcctgccaccaaaaaacagatctttgccgtactgtcagccattctgtacttaggaaatgttacctacaaaaagagagctactggaagggaggagggattagaggttggcccaccagaggtgctggacacattgagtcagcttctcaaggttaaacgcgaaatccttgtggaggtgctcaccaaacgaaagaccgtcactgtgaatgataagctcatccttccttacagcctgagtgaggcaatcaccgctagagactcgatggccaagagtctctatagtgctctgtttgattggattgtgctcagaataaaccacgctctgcttaacaaaaaggatgttgaggaagcggtgtcttgtcttagtatcggagttctggacatattcgggttcgaagactttgagcggaattcctttgagcagttttgcatcaactacgcaaatgagcagctccagtattacttcaaccaacatatctttaaactggagcaggaagagtaccagggagagggcatcacctggcacaacatcgggtatacggataacgtaggctgtattcatctgatatctaaaaaacctacaggcctgttctatttgcttgacgaagagagtaatttcccgcacgcgacgtcgcagactctcctggctaagttcaaacagcagcatgaagataataaatacttcctcggaactccagtaatggaacctgcattcatcatccagcacttcgctggaaaagtgaagtaccagattaaagactttcgagagaaaaacatggactacatgcgaccggacatcgtggcactattaaggggatcggactcttcctacgtgagggagctgatcggaatggatcctgtggccgtttttcgatgggctgttctgagggcagccatccgcgctatggccgtgctgagggaggcgggcaggctgcgggctgagagggcggagaaagccgccggcatgtctagtcccggagctcaatctcacccagaagaactcccccgcggagcctccacaccctctgaaaagctttaccgagatctgcacaatcagatgattaaaagcatcaaggggctgccctggcagggggaggacccccgatcccttctgcagtccctgtcaagattacagaagcctcgcgcctttattctcaaatcaaaaggcatcaagcagaaacagataatcccgaagaatcttcttgatagtaagagtctcaagttaattatctccatgactctgcatgatagaaccacaaagtctttactgcacctccacaaaaagaagaaacctcccagtatcagcgctcagttccagaccagccttaacaaactgttagaggccctcggtaaagctgagccatttttcattagatgtattcgcagcaatgccgaaaagaaagagctgtgtttcgatgacgaacttgttctccaacagttgcgctacaccgggatgttggagacagtcagaattaggcggtctggatacagtgcgaagtatacctttcaggactttacagagcaattccaggttttgctgccaaaagacgcccagccctgtagagaagtgattagtacactcctggaaaaaatgaagatagacaagaggaattaccagattggcaaaaccaaagtgttccttaaagagaccgagaggcaggcacttcaagagactttgcaccgggaagtcgtacggaaaattcttctgctgcagtcttggttccgaatggtcctggagcggaggcactttttacagatgaaaagggcggccgtgacaattcaggcgtgttggcggagctatagagtgcgacgtgcgctggagagaacccaagctgcggtatacctgcaggctagctggcgtggatattggcagaggaaactctacaggcaccaaaagcagagcatcattcggttgcaatccctttgcaggggacacttgcagaggaaatctttctcccagatgataagcgagaagcagaaggccgaagagaaggagagagaggcgctcgaagcagctcgtgctggtgcagaggaaggggggcagggtcaggccgctggaggtcaacaggttgccgaacaggggccagaacctgcagaggacggcgggcacttggcatccgaacccgaggtacagccgagcgacaggtctcccctcgagcatagctccccggagaaggaagctccaagccccgagaaaactctgccaccacagaagactgtagcagctgagagtcatgaaaaagttccatcaagtagggaaaagagggaatcccggagacaacgcgggctggagcatgtgaaattccagaacaaacacattcaatcctgtaaagaggaaagcgctctgagggaaccttcccgcagagtaacacaggagcagggagtgagtttactcgaagacaaaaaagagtccagggaggacgaaactctcctggtggtcgaaactgaggctgaaaatacttctcagaagcaacctaccgaacaaccccaggccatggcagtcggcaaagtgagtgaagaaaccgaaaagaccctcccaagcggctcccccaggcccggacagctcgagaggccaacctcattggccctggattcacgcgtcagcccacccgccccaggcagtgcacccgagactcctgaagataagtctaaaccttgtgggtcccccagagtgcaggaaaagccagactcgccagggggctccacccaaattcagaggtatctagacgcagaacggctggcctctgccgtggagctgtggaggggcaaaaaactggtggccgctgcgtctccgagcgctatgctgagtcagtccctggatttgtcagacagacaccgtgcaaccggcgctgccttgacccccacagaggagagacggaccagcttttcgacttcggatgtttccaaattgctgccgagcttggctaaagcccagcccgctgcggagaccactgacggagaacggtctgctaagaaacccgctgtgcagaaaaaaaagccaggcgatgccagctctctcccagacgctggattgtcacctgggagccaggttgatagtaaatcaactttcaagcgcctcttcctgcacaagacaaaagataagaagtactccctcgagggggcagaggaacttgaaaatgccgtgtccggccacgtcgtcctggaggccacaacaatgaaaaagggtctcgaagcccccagtggacagcagcatcgccacgccgccggagagaaaagaacaaaggagccgggggggaagggaaaaaagaatcggaatgtgaagatcggtaaaattacagtgtccgagaaatggcgggaatcagttttcaggcagataaccaatgcaaacgagctgaagtatttggacgagtttctcctaaataaaattaatgatctgagatctcagaagacacccattgaaagcttgttcatcgaggcgactgagaaatttaggagcaacatcaagacgatgtacagtgttcctaatgggaaaatccacgtcggatacaaagatctaatggagaactaccagattgtggttagcaatctggctactgagcgaggccaaaaagatactaaccttgtgctaaatctgtttcaatctctcctggatgaattcacgcggggatacacaaagaacgactttgagcctgtgaagcagagcaaagcacaaaaaaagaaaaggaaacaagaaagggcggtccaggaacacaatgggcatgtgtttgcctcataccaagtaagcataccacaatcttgcgaacagtgcctgagctatatctggctgatggacaaggctttgctctgcagcgtctgcaaaatgacgtgccacaaaaaatgcgtgcataagattcagtctcattgttcttatacttatgggcggaaaggtgagcctggggtggagcccgggcactttggggtctgcgtggacagcttgacttcagataaagccagtgtaccaattgtgctcgagaaactactagaacatgtggagatgcacggattatacaccgaaggtctgtataggaagagcggcgcagcaaaccgcactcgggaactcagacaggctttgcagaccgatccagccgcggtcaagctggaaaatttcccaatccacgcgattaccggagttttgaagcagtggttacgcgagctgcccgagccgttaatgactttcgctcagtacggtgatttcctgagggctgtggaactcccagaaaagcaagaacagctggcggctatttacgccgtgctggagcatctaccagaggccaatcacaactcgcttgagcggctcattttccacttggtaaaagtcgccctgttagaagacgttaacagaatgtctcctggcgctcttgccatcatcttcgcaccgtgtctcctgcgttgtccagataatagtgacccactgacttcgatgaaagatgtgctgaaaataaccacctgtgtggagatgcttataaaggaacaaatgcgaaagtacaaggtcaaaatggaagaaatcagccaactcgaagccgctgagagtatcgcgttccggcgactgtcgctattgcggcaaaacgcaccatggcccctgaagttgggattttccagcccatacgagggcgtgttaaacaagtccccaaagaccagggacatccaggaagaagagctggaagttctactggaagaggaggccgctggtggtgatgaagatcgcgaaaaagagatcctcatcgagcgcatccagtccatcaaagaagagaaagaggacatcacctacaggttgccagagcttgaccctagaggctcagatgaggagaacctggactccgagacctccgccagcacagaaagcctgttggaggaacgagcaggcagaggagcttcagaagggcagtactag

SEQ ID NO: 47451 - DNA, 6069 bp, Artificial Sequence
  derived and/or modified sequence
atgagcgtcaaggaggctggaagcagcggccggagagaacaggcagcttatcacctccatatatatcctcaactttccacaacagaaagtcaggcaagctgcagggtgaccgccactaaagattctacgacaagtgatgttataaaggacgctatcgcttctctgagactggatgggaccaaatgttatgtcttggtggaagtcaaagagtccgggggcgaagaatgggtcctggacgcaaacgattcacctgttcaccgggttctcctgtggccgaggcgtgctcaggacgaacatccacaagaggatggttactatttcctgctacaggaacgaaatgctgacggaactatcaagtatgtgcacatgcagctggtcgcccaagcaaccgccactcgtcgcctggttgaaaggggtctgctacccaggcaacaggctgatttcgacgacctgtgcaatctgcctgaactgaccgagggcaatctgctgaaaaatctgaagcaccggtttctgcagcagaagatctatacctatgcagggagcattctcgtcgccattaaccccttcaaattcctaccaatatacaaccctaagtatgttaaaatgtacgaaaatcagcagctgggtaagctggagccacacgtgtttgccttggcggatgtggcctattatactatgcttagaaagagggtcaatcaatgcatcgttatatccggggagtctggcagtgggaagacacagagtacaaactttctgatacattgtctgacagccctgtcgcagaaggggtatgcaagtggtgtagagcgaacaatcctgggggccggccccgtgctagaggccttcggaaacgcgaagaccgcacacaacaacaactcttctcgatttggcaagttcatccaggtgagttacctggagagcggcatagtgagaggcgcggtggttgagaagtatctgctggaaaaatccagattagtttctcaggagaaggatgaaaggaattaccacgtcttttattatctcctgctgggggtttccgaagaggagcgccaggaatttcagctcaaacagccagaagactatttctatctcaatcagcacaacttgaagattgaagacggcgaagaccttaaacacgactttgagcgattgaaacaggctatggaaatggtggggttcctgcctgccactaagaaacagatcttcgcggtgttgtccgcaattctctacctgggaaatgtaacgtacaagaaacgtgctacagggcgggaggaaggactggaggtcggacctcctgaagtgctggacaccctctcccagttgctcaaggtcaagagagaaatcttggtggaggtgttaacaaagagaaagaccgttacagtgaatgacaaactaatactgccgtacagcctttccgaagccataacggcccgagactccatggccaagagtctgtatagcgcactctttgactggatcgtgctgcggatcaaccacgctctactcaataaaaaggatgtggaagaggccgtaagctgcttaagtatcggggtgttggacatttttggattcgaggatttcgagagaaacagctttgaacagttctgcatcaactatgccaatgagcaactccagtattactttaaccagcatatctttaagctcgagcaggaggagtatcagggcgagggtattacatggcataacatcggctacacggataatgtgggatgtatccacttgatctctaagaagcccaccggactgttttacctcctggacgaagagtcaaacttcccccacgcaacctcccaaacccttcttgccaagttcaagcaacaacacgaggataacaagtacttcctggggacacccgtgatggaacctgcctttattatccagcacttcgccggtaaagtgaaatatcagatcaaggactttagagaaaagaatatggactacatgcgccccgacattgtggctctgcttcgcgggagtgactcctcctacgtaagggagcttataggtatggaccccgtcgcagtatttagatgggccgtgctcagagctgctattcgagccatggctgtgcttagagaggctggcagattaagggcagaacgagccgagaaagcagccggcatgtcctcacccggggcccaatctcacccagaagagctgccgagaggggcctcaacaccaagcgagaagttatacagagacttgcataaccaaatgataaagtccataaagggcttaccttggcaaggtgaggacccgcggtccctactacaatccctttcccggcttcagaagcctcgagcgtttattctcaaatccaaaggcattaaacagaagcagatcatccccaagaatcttttagattcgaagtcccttaagctgatcatctcaatgacacttcacgatcgtaccactaagtctctgctccatctgcacaaaaaaaagaagccaccgagtattagtgctcaattccagaccagcctgaataagcttctcgaagctcttggaaaggcagagccgttcttcatcagatgtattcgctccaacgccgagaaaaaagagctgtgcttcgacgatgagctggtgcttcagcaactgcgatacactggtatgttggagacagtgcgcattagacgcagcggctattcggcgaaatatactttccaagactttaccgaacagtttcaggtactgcttccgaaagatgcccagccttgccgggaggtcatttctactctgttggagaagatgaagatcgacaagcggaattaccagattgggaagactaaggtgttccttaaggagacggagaggcaagctctccaagaaaccctccatcgcgaggtcgttcgtaagatactgctgctgcagtcttggttccgtatggtcctcgagcgaagacacttcctgcaaatgaaaagagcagccgtgacaatccaggcgtgctggcggagctatcgggtcagacgagctctggagaggacccaggctgctgtgtaccttcaggcttcgtggagaggctactggcagaggaagctgtaccgccaccagaaacagtcaataattcgtctccagagtctttgccgggggcacctgcaacgcaagtcgttcagtcagatgatctctgagaagcagaaggctgaggagaaagaacgcgaagccctcgaggccgcccgcgccggggcggaagaggggggccagggccaggctgccggcggccagcaggtcgctgagcagggcccggaaccagcggaagatgggggacacctcgccagtgaaccggaggttcaaccctccgacaggagcccactcgaacattcctctcccgaaaaagaggcacctagcccggaaaagacacttccacctcagaaaacggtggccgctgaaagtcatgagaaggtgccctcctccagggaaaaaagggaatccaggcgccagcgggggctggaacacgtcaaatttcagaacaagcacattcagagctgtaaggaggagtccgctttgagagagccctcaaggcgagttacccaggagcagggcgtcagcctgctggaagataaaaaagagtcccgggaagatgagaccctgctggtggtcgaaaccgaggcagaaaacaccagtcagaagcagccaacagaacaaccccaggccatggctgtgggtaaggtgtcggaagagactgagaagacactgccatctggcagtccccgcccaggccaactggaacggccgacctcactcgccctcgacagccgagtgtcacctccagctccaggctcggctccagagacccccgaggacaaaagcaaaccctgcgggtcccctagggtccaggaaaagcccgacagtcccggcggctcaacccaaattcagagatacctggacgccgagcggctggcctccgctgttgaactttggagggggaagaaactggtagctgcagcaagcccgtcagcaatgctcagtcaaagcctggatctgtcagatagacatcgagccactggagctgccctgacacccacggaagaaaggcggacgagtttctccactagtgacgtttccaagctgctcccctccttagcaaaagcccagcccgcggccgagaccacagacggagagcggtcagccaagaaaccagccgttcagaagaaaaaaccgggtgatgccagctccctgccggatgccgggctgtcccctggatcacaggttgatagcaagagcaccttcaaaaggctcttcttacataaaaccaaggacaaaaagtactccctggaaggggcagaggaactggaaaacgctgtcagcggtcacgtggtcctggaggctactacgatgaagaaagggctggaggctccctccggccagcaacacaggcatgctgcaggcgaaaagcggacgaaagaacctggtggcaagggtaagaagaacagaaacgttaaaattggaaaaattaccgtgagcgagaaatggcgtgaatcagtctttcgacagattaccaacgcaaatgagctcaagtatttggacgagttcctgctcaataagattaatgatcttcgatcacagaagacgcccatcgagagtttattcatcgaggccacagagaaatttaggtccaatataaaaaccatgtattcggtgcccaatggcaagatccatgtcgggtacaaggatctgatggagaattaccagattgtggttagcaacctcgcaaccgagcggggccagaaggatacaaacctcgtgctaaatctttttcagtctctgctagatgagttcactcgggggtatactaagaatgattttgaaccggtgaagcaatctaaagcccaaaagaagaagcgtaagcaggaaagagcagtgcaggagcataatggacacgtgtttgctagctatcaggtgtctattccccagtcatgcgagcagtgtctcagctacatctggttaatggacaaagccctgttatgttccgtttgcaagatgacatgtcacaaaaagtgcgtccacaaaattcagtcccactgttcatatacttatggcagaaaaggggaaccaggcgtggaaccagggcacttcggtgtgtgtgtggattccctcacatcagataaggcctctgtacccatcgtgctggagaaactgctcgagcacgtagaaatgcatggtctgtacaccgaaggcctttaccgcaaatctggtgccgcaaatagaacaagagagctgaggcaggccctgcagaccgatccggcggccgtgaaactggagaactttcccattcacgccataacaggagttctgaaacagtggctcagagagctgcctgaaccccttatgacattcgcccagtatggggactttctgcgcgcggtcgagctgccggagaagcaggagcagctggcagccatctacgcagtcctggagcatttgcctgaggccaatcacaatagcctcgagagactcatctttcaccttgtgaaggtcgccctactggaggacgtcaataggatgtcacccggggctttggcgatcatttttgcgccatgcctgctacgatgcccagacaactcagatcctctgacctccatgaaggatgtcctgaagatcacaacctgtgtggagatgctcataaaagagcagatgcgtaaatacaaggttaaaatggaagagatcagccagctggaggccgcagagtcaattgcatttcgtcgcctgtccctgttaagacagaacgctccctggcctctcaagttaggcttctccagcccatacgagggcgtgcttaacaagagcccaaagactcgcgacatacaggaggaggagctggaggtattgcttgaggaggaagccgctggaggagacgaggaccgggagaaagagattttgatcgaacgaattcagagcatcaaggaggaaaaggaagacatcacctacagattgcctgagctggatccacgagggtctgacgaggaaaatctggatagtgaaactagcgcttctactgaatctcttcttgaagagcgagcaggacggggggccagcgaggggcaatattag

SEQ ID NO: 47452 - DNA, 6069 bp, Artificial Sequence
  derived and/or modified sequence
atgtctgtgaaggaggccggcagcagtggaagaagagagcaggccgcctaccacctgcacatctacccccagctgagcaccacagagagccaggccagctgccgggtgacagccaccaaggacagcaccaccagtgatgtgatcaaggatgccatcgccagcctgcggctggatggcaccaagtgctacgtgctggtggaggtgaaggagagcggcggggaggagtgggtgctggatgccaatgacagccctgtgcaccgggtgctgctgtggccccggcgggcccaggatgagcacccccaggaggatggctactacttcctgctgcaggagagaaatgctgatggcaccatcaagtatgtgcacatgcagctggtggcccaggccacagccacccggcggctggtggagcggggcctgctgccccggcagcaggccgactttgatgacctgtgcaacctgcctgagctgacagagggcaacctgctgaagaacctgaagcaccgcttcctgcagcagaagatctacacctacgccggcagcatcctggtggccatcaaccccttcaagttcctgcccatctacaaccccaagtatgtgaagatgtatgagaaccagcagctgggcaagctggagccccacgtgtttgccctggctgatgtggcctactacaccatgctgaggaagagggtgaaccagtgcatcgtcatcagcggggagagcggcagcggcaagacccagagcaccaacttcctgatccactgcctgacagccctgagccagaagggctacgccagcggcgtggagaggaccatcctgggcgccggccctgtgctggaggcctttggaaatgccaagacagcccacaacaacaacagcagcagatttgggaagttcatccaggtgtcctacctggagagcggcatcgtgagaggagctgtggtggagaagtacctgctggagaagagccggctggtgtcccaggagaaggatgaaagaaactaccacgtgttctactacctgctgctgggcgtgtctgaggaggagcggcaggagttccagctgaagcagcctgaggactacttctacctgaaccagcacaacctgaagattgaagatggagaggacctgaagcatgactttgagcggctgaagcaggccatggagatggtgggcttcctgcctgccaccaagaagcagatctttgctgtgctgagcgccatcctgtacctgggcaatgtgacctacaagaagagggccaccggccgggaggagggcctggaggtgggccccccagaggtgctggacaccctgagccagctgctgaaggtgaagcgggagatcctggtggaggtgctgaccaagaggaagacagtgacagtgaatgacaagctgatcctgccctacagcctgtctgaggccatcacagcccgggacagcatggccaagagcctgtacagcgccctgtttgactggatcgtgctgcgcatcaaccacgccctgctgaacaagaaggatgtggaggaggccgtgtcctgcctgagcattggagtgctggacatcttcggctttgaagattttgaaagaaattcctttgagcagttctgcatcaactatgccaatgagcagctgcagtactacttcaaccagcacatcttcaagctggagcaggaggagtaccagggcgagggcatcacctggcacaacatcggctacacagacaacgtgggctgcatccacctgatcagcaagaagcccaccggcctcttctacctgctggatgaggagagcaacttcccccacgccaccagccagaccctgctggccaagttcaagcagcagcacgaggacaacaagtacttcctgggcacccctgtgatggagcccgccttcatcatccagcactttgctgggaaggtgaagtaccagatcaaggacttccgggagaagaacatggactacatgaggccagacatcgtggccctgctgcggggcagtgacagcagctatgtgcgggagctgattggcatggaccctgtggccgtgttccgctgggccgtgctgcgggccgccatccgggccatggctgtgctgcgggaggccggccgcctgcgggcagagagagctgagaaggctgctggcatgagcagccctggggcccagagccaccctgaggagctgcccaggggggccagcaccccatctgagaagctgtacagagacctgcacaaccagatgatcaagagcatcaagggcctgccctggcagggcgaggaccccaggagcctgctgcagagcctgagccggctgcagaagccccgggccttcatcctgaagagcaagggcatcaagcagaagcagatcatccccaagaacctgctggacagcaagagcctgaagctgatcatctccatgaccctgcatgacaggaccaccaagagcctgctgcacctgcacaagaagaagaagccacccagcatcagcgcccagttccagaccagcctgaacaagctgctggaggccctgggcaaggccgagcccttcttcatccgctgcatccgcagcaatgctgagaagaaggagctgtgctttgatgatgagctggtgctgcagcagctgcgctacacaggcatgctggagaccgtgcgcatcagaagaagtggctacagcgccaagtacaccttccaggacttcacagagcagttccaggtgctgctgcccaaggatgcccagccctgccgggaggtgatcagcaccctgctggagaagatgaagattgacaagaggaactaccagatcggcaagaccaaggtgttcctgaaggagacagagcggcaggccctgcaggagaccctgcaccgggaggtggtgaggaagatcctgctgctgcagagctggttcaggatggtgctggagaggaggcacttcctgcagatgaagagagctgctgtgaccatccaggcctgctggaggagctacagagtgcggcgggccctggagaggacccaggccgctgtgtacctgcaggcctcctggaggggctactggcagaggaagctgtaccgccaccagaagcagagcatcatccggctgcagagcctgtgccggggccacctgcagaggaagagcttcagccagatgatcagcgagaagcagaaggccgaggagaaggagcgggaggccctggaggccgcccgggccggggctgaggagggcggccagggccaggccgccggcggccagcaggtggccgagcagggccctgagccagcagaagatggcggccacctggccagcgagcctgaggtgcagcccagcgacaggagccccctggagcacagcagccctgagaaggaggcccccagccctgagaagaccctgcccccccagaagacagtggccgctgagagccatgagaaggtgcccagcagccgggagaagcgggagagccggcggcagaggggcctggagcacgtgaagttccagaacaagcacatccagagctgcaaggaggagagcgccctgcgggagcccagccggcgggtgacccaggagcagggcgtgtccctgctggaggacaagaaggagagcagagaagatgagaccctgctggtggtggagacagaagctgagaacaccagccagaagcagcccacagagcagccccaggccatggctgtgggcaaggtgtctgaggagacagagaagaccctgcccagcggcagccccaggcctggccagctggagcggcccaccagcctggccctggacagccgggtgagccccccagcccctggcagcgcccctgagaccccagaggacaagagcaagccctgtggcagcccccgggtgcaggagaagccagacagccctgggggcagcacccagatccagcgctacctggatgctgagcggctggccagcgctgtggagctgtggaggggcaagaagctggtggccgccgccagccccagcgccatgctgagccagagcctggacctgagtgacagacaccgggccactggagctgccctgacccccacagaggagaggaggaccagcttcagcaccagtgatgtgtccaagctgctgcccagcctggccaaggcccagcctgctgctgagaccacagatggagagaggtctgccaagaagccagctgtgcagaagaagaagccaggagatgccagcagcctgcctgatgctggcctgagccctggcagccaggtggacagcaagagcaccttcaagaggctcttcctgcacaagaccaaggacaagaagtacagcctggagggcgctgaggagctggagaatgctgtgtctggccacgtggtgctggaggccaccaccatgaagaagggcctggaggcccccagcggccagcagcacagacatgctgctggggagaagaggaccaaggagcccggcggcaagggcaagaagaacagaaatgtgaagattggcaagatcaccgtgtctgagaagtggagggagagcgtcttccggcagatcaccaatgccaatgagctgaagtacctggatgagttcctgctgaacaagatcaatgacctgcggagccagaagacccccatcgagagcctcttcatcgaggccacagagaagttccgcagcaacatcaagaccatgtacagcgtgcccaacgggaagatccacgtgggctacaaggacctgatggagaactaccagatcgtggtgagcaacctggccacagagcggggccagaaggacaccaacctggtgctgaacctcttccagagcctgctggatgagttcacccggggctacaccaagaatgactttgagcctgtgaagcagagcaaggcccagaagaagaagaggaagcaggagagagctgtgcaggagcacaatggacatgtgtttgccagctaccaggtgtccatcccccagagctgtgagcagtgcctgagctacatctggctgatggacaaggccctgctgtgcagcgtgtgcaagatgacctgccacaagaagtgtgtgcacaagatccagagccactgcagctacacctacggcaggaagggggagcccggggtggagcccggccactttggagtgtgtgtggacagcctgaccagtgacaaggcctctgtgcccatcgtgctggagaagctgctggagcacgtggagatgcacggcctgtacacagagggcctgtacaggaagtctggagctgccaacagaacccgggagctgcggcaggccctgcagacagatcctgctgctgtgaagctggagaacttccccatccacgccatcaccggggtgctgaagcagtggctgcgggagctgcctgagcccctgatgacctttgcccagtacggggacttcctgcgggctgtggagctgcctgagaagcaggagcagctggccgccatctatgctgtgctggagcacctgcctgaggccaaccacaacagcctggagcggctcatcttccacctggtgaaggtggccctgctggaggatgtgaacaggatgagccctggggccctggccatcatctttgccccctgcctgctgcgctgcccagacaacagcgaccccctgacctccatgaaggatgtgctgaagatcaccacctgtgtggagatgctgatcaaggagcagatgaggaagtacaaggtgaagatggaggagatcagccagctggaggccgctgagagcatcgccttccggcggctgagcctgctgcggcagaatgccccctggcccctgaagctgggcttcagcagcccctatgagggcgtgctgaacaagagccccaagacccgggacatccaggaggaggagctggaggtgctgctggaggaggaggccgctggaggagatgaagatcgggagaaggagatcctgattgagcgcatccagagcatcaaggaggagaaggaggacatcacctaccgcctgcctgagctggacccccggggcagtgatgaggagaacctggacagcgagaccagcgccagcacagagagcctgctggaggagagagctggccgcggggccagcgagggccagtactag

SEQ ID NO: 47453 - DNA, 6069 bp, Artificial Sequence
  derived and/or modified sequence
atgagcgtgaaggaggccggcagcagcggccggcgggagcaggccgcttatcatctgcatatttacccgcagctgtccactactgaaagccaggcaagctgccgggttacggccacgaaggactccactacctccgatgttataaaagacgccatcgccagtctccgactggacgggactaagtgctacgtgttggttgaagtaaaggagtctggcggtgaagagtgggtgctggacgcaaacgattcccccgtgcacagggtgcttctttggccgcgaagagcacaagatgagcatcctcaggaagatggatattacttcctcctacaggagagaaacgccgacggaacgattaagtatgtgcatatgcaattggtcgcccaagctacagccacacgccgcctcgtcgagcgcggactgctcccgagacaacaggcagacttcgacgacctctgcaacctcccagagctgacggagggaaacctcttaaagaatttgaagcatagatttcttcagcagaaaatctacacatacgcaggcagtatcctggttgctataaatccctttaagtttctgccaatctataaccctaaatacgtaaaaatgtacgaaaatcagcagctggggaagctcgaaccccacgtctttgctcttgcagatgtcgcctattacacaatgctgaggaaacgtgtcaaccagtgtatcgtgatcagcggagaatctggatccgggaagacccagtcgactaactttcttattcactgcctcaccgcactctctcaaaaaggctacgcttccggtgtcgagcgaacgatcctcggggccggccctgtgctggaggcctttggaaacgcaaaaactgcacacaacaacaacagctctcgttttggcaagttcatccaggtgtcataccttgaaagtgggatcgtgaggggggccgtggtggaaaagtacctgttagaaaaaagtaggctggtgtctcaggaaaaggatgagcggaactatcacgttttctattacctgttgttgggggtgtcagaggaggagcgtcaggaattccagctgaaacagcccgaggactatttctatctaaaccagcataacctgaagattgaggatggggaagacctcaaacatgatttcgaacggctgaagcaagccatggaaatggttggtttccttcccgcaactaaaaagcagatctttgcagtcttgtctgccatattatatttgggcaacgtgacctataagaaaagggctacaggcagagaggagggactggaagtgggacctcccgaggtgctcgatactttgtctcagttactgaaagtaaagagagaaatcctggtcgaagtgctgacaaaacggaagactgtgaccgtgaacgacaagctgattctgccttactctctgtcagaagctattaccgctcgggacagtatggctaagtcactgtactccgcactgtttgactggatcgtactcagaattaatcacgctcttctcaacaagaaggatgtagaggaggctgtgagttgcctctccatcggcgtgctcgacatctttggttttgaagattttgagcgcaactcttttgaacaattttgcatcaattacgccaatgagcaactacagtattactttaatcaacacatctttaaactggagcaggaagagtatcagggagaggggatcacatggcacaatatcggctacacagacaatgttggctgcatccacctaatttccaagaaaccaaccggtcttttttacctcctggacgaagaatcaaacttcccacatgccacatcccagacactgctggcaaagttcaagcagcagcatgaggataataagtacttcctgggtacacctgttatggaaccagcttttataatccagcacttcgccggcaaggtcaagtaccagatcaaagacttccgtgagaaaaatatggactatatgcgtcctgacattgtggcccttctcagaggctcggactcgtcatatgtgcgggaattgatcggaatggacccggtggcggtatttcggtgggctgtcctgcgggctgctatacgcgccatggccgtcctcagggaggccggacggctgcgcgccgaacgtgccgaaaaggcggccgggatgtcctcccccggggcccaatcacaccccgaagagttgcctcgcggtgcatcaactccaagtgaaaaactgtacagagacctccataatcagatgataaagagcatcaaagggttgccatggcagggagaggacccccggtccctcctgcagtcactgagtcgactgcagaaaccacgggcgttcatattgaaaagtaaaggaattaaacagaaacagatcatccctaagaatctgttggactctaaatcactaaagctgatcatctctatgacactgcatgaccgaacaacaaagtcactgctgcacctgcataagaagaagaaaccccctagtatcagcgctcagttccagacaagcttgaataagctgctcgaagctctgggtaaggctgagcctttttttattcgctgcatccggagcaacgccgagaagaaggaactctgctttgatgacgaacttgtgctgcagcagctacggtatactgggatgcttgaaactgtgcgcattcggcgcagcggatactccgctaagtacaccttccaggacttcactgagcaattccaagtattgctgcccaaggatgctcagccttgcagggaggtgatttccactcttctggagaagatgaaaatcgacaaacgaaattaccagattggtaagactaaggtcttcctgaaggagactgagcggcaagccctgcaggagactcttcatagagaggtggtgcgcaagatcctcttgttacagtcttggttccggatggtgcttgagcgcaggcacttcctgcaaatgaaacgggccgccgtgacgattcaagcctgctggagatcttatagggtcaggagggctctcgaacggacccaagcggccgtatatctgcaggcatcctggaggggatactggcagcgcaagttgtaccggcatcagaagcagtccatcatccggcttcagagcctttgtcgcggccacctgcaacgtaagtccttctcccaaatgatctctgagaagcagaaggcagaggagaaagagagagaagccttagaggccgcacgagccggggccgaggaaggcggccaaggccaagctgccggggggcagcaggttgctgagcaggggcccgagccggcagaagatggtggacacctggccagtgagccagaagtgcagccaagtgacagaagcccactggagcattctagtcccgagaaggaagcgccttcccctgaaaagacgctgccacctcagaaaaccgtcgctgcagagtcccacgagaaggtcccttcttctagggaaaagagagagagtcgtaggcaacgcggactcgaacacgtgaaattccagaacaagcacatacagtcttgcaaggaggaaagtgcactacgcgagccctctcgccgggtgacacaggaacagggcgtttccctgttggaggacaagaaggagtcccgggaggacgagaccctgctagtggtggagactgaggccgagaacacaagtcagaagcagccaacggagcaacctcaggcgatggccgtgggcaaggtttcagaggagacagagaagactctgccttccgggagcccacgacccgggcagttggagcggccaacaagcctcgccctcgattccagggtctctcccccggccccaggatctgcccccgaaacaccggaggacaagtcaaaaccttgtggttctcccagggtccaagagaaacccgatagccccggcggaagcacacagatacaacgctatctggatgctgaaagactggccagtgcagtcgagctctggcgcggtaaaaaattagtggccgcagcatcaccttctgcaatgctctcgcagagcttggacctgagtgacagacaccgggccactggcgccgctctgactccaacagaggagagacgcacttctttctcgacttccgatgtgtccaaactcctgccttccctggctaaggctcagcctgctgcggaaaccaccgatggagagaggagtgcaaaaaaacctgctgttcaaaagaagaaaccaggtgacgcctcctctctccctgatgccggcttgagtccagggagccaagtggatagtaagagcaccttcaagagactctttctgcataagacaaaagataaaaagtacagtctcgagggggccgaagaactagaaaatgccgtctcagggcacgttgtgttggaagctaccaccatgaaaaagggtctggaggctccttcagggcagcagcatagacacgccgccggggagaagcggactaaagagccaggcggaaaaggtaaaaaaaaccggaacgtcaaaataggcaagataacagtgtcagaaaaatggcgtgaaagcgtgttccgacaaattactaacgccaacgaactcaagtacttggatgagttcctgctgaataagatcaacgacctgagatcacagaagacccccatcgagagtttgtttatcgaggccacagagaaattccgcagtaatattaagacaatgtacagcgtccccaacggcaaaattcacgtgggatacaaggaccttatggagaactaccagattgttgtgtccaacctggccaccgaacgggggcagaaggataccaacctggtgctgaatttgttccagtccctgctggacgagtttactcggggatacacaaagaacgattttgaaccagttaagcaaagtaaggcacagaagaaaaaacggaagcaggaaagagcagtccaggagcacaatgggcacgtttttgcctcttatcaggttagtatcccacaatcatgcgaacagtgtcttagctatatctggctcatggacaaggccctcctatgctcagtctgcaagatgacatgccataaaaagtgtgtgcacaagatccagtcccattgcagctacacatacggacgcaaaggtgaaccaggagtcgagcccgggcattttggggtctgtgtagacagtctcacaagcgacaaggcctctgtgcccattgttctcgagaagttacttgaacacgtcgaaatgcacggcctatacaccgaagggctgtatcgtaagtcaggcgcagcaaacaggaccagggaacttaggcaggccctgcagactgaccccgccgccgtaaaattggagaattttcctattcacgctatcaccggggtcctgaagcaatggctgcgcgaacttccagagccactcatgacgtttgctcagtatggggacttcctgcgggccgtggagctgcccgagaaacaagaacagttggcagccatctacgcggtgctggagcatttgcctgaggccaaccacaacagtctggagcggttgatcttccacctggtgaaggtagcccttctcgaggacgtgaacagaatgagccctggggccttggctatcatcttcgctccttgcctgttgcgctgtccagacaactctgacccactgacctccatgaaggatgtgctcaaaattacgacttgtgtcgagatgctcatcaaagagcaaatgaggaaatataaagttaaaatggaggaaatcagccagctggaggcggcggaatccatcgccttcagacggctttccctactgcggcagaacgcaccttggcccctaaagctcggcttctcttcaccctatgaaggagtacttaacaaaagccctaaaactcgcgacatccaggaggaggagcttgaagtgttgctcgaagaggaggcagccgggggggatgaggatagagagaaagagatccttatagagcggatccagtctataaaggaagagaaggaagatatcacctaccgactgcccgagctcgacccacggggctcggacgaggagaacctcgatagcgagacttccgctagcaccgagtccctgctggaggagcgcgccggccggggcgcgagtgagggccagtattag

SEQ ID NO: 47454 - DNA, 6069 bp, Artificial Sequence
  derived and/or modified sequence
atgagcgtgaaggaggccggcagcagcggccggcgggagcaggccgcgtaccacctccatatttaccctcagcttagcactacagagtcacaggctagctgccgagtgacagccaccaaggactccaccacttccgacgtaataaaagatgcaatagcaagtttacgacttgacggcaccaaatgctatgtgttagttgaggttaaagaatcaggcggcgaggagtgggtgctggatgcaaacgactcccccgtgcatcgggtgttactgtggcctcggcgggcacaagacgaacatcctcaggaggatggatattatttcctgctgcaggaacggaatgccgacgggactatcaaatacgtgcatatgcaactggtggcccaggccaccgccaccagacgcttagttgaaagaggtttactcccgagacagcaggctgatttcgacgatctatgcaatttgcccgagcttactgaagggaacctgctgaagaacctaaagcaccgattcctccaacagaagatatacacatacgccgggtctattctggtcgccatcaatccattcaagtttctgcccatttataatccaaaatatgttaagatgtatgaaaaccagcagctgggaaagctggagcctcacgtcttcgctctggcagatgtcgcttactatacaatgcttcgtaaaagagttaaccaatgcattgtcatctccggagagtccgggtccggaaagacccagtcaaccaacttcttaattcactgtttgacggcgctgtcgcaaaaaggctacgcatccggggtcgagaggactattcttggggccggtccagtgttagaggctttcgggaacgccaagactgcacacaacaacaattctagccgcttcggaaagtttattcaggtgagttatctggagtcgggaatagttcgtggcgcggtagttgaaaagtatctgcttgagaagagtaggcttgtgagtcaagagaaagatgaaaggaactatcacgtgttttactacttgctgttaggagttagcgaggaggagcgccaggagtttcaattaaaacagccggaagactatttttacctaaaccagcacaacttgaaaattgaggacggcgaagacttgaagcatgattttgaaaggctcaaacaggccatggagatggttgggtttctccccgccacaaaaaaacagatctttgccgtgctttctgcgatcctttacctggggaatgtgacttacaaaaaaagggcaacagggagagaagaagggttggaggtgggccccccggaggtcctagacaccttgagccagctcctcaaggtcaaaagagagatcctggtggaggttctgacaaagcgaaaaaccgtgaccgtaaatgacaaactaatcttgccctacagcttatccgaggcgatcacagccagagactctatggcgaaatctttgtactctgcactgttcgactggattgtactcagaataaaccacgcgctgctaaataaaaaggatgtggaagaggctgtgtcatgtctctccattggggtcttggatatttttggcttcgaggattttgagaggaatagttttgaacaattctgtatcaactacgccaatgagcaactccagtattacttcaatcaacatatttttaagctggaacaagaagagtatcagggggaaggtatcacatggcacaacatcggctacaccgacaacgtcgggtgtatccacctgatcagcaagaaaccaacagggttgttttatctgttggacgaggagtctaacttcccacatgctacttctcagaccctgttagccaaattcaaacaacaacacgaagataacaaatactttctgggtacccccgtgatggagccagcttttattattcaacacttcgccgggaaggtcaaatatcagattaaagacttcagagagaaaaatatggactatatgcgtcctgatatcgtagcgttactgcgcgggagcgacagcagctatgtgagagaactgatcggaatggatcctgtcgccgtcttcagatgggccgttctgcgagcagccatccgagcgatggctgttctgagagaggccggccgcctgagagctgaaagggccgagaaggccgctggtatgagttcccctggggcacaatcccacccggaggaacttccaagaggtgctagcacaccttcagagaagttatatagagacctgcacaatcaaatgatcaagagcatcaagggcttgccctggcaaggtgaagacccccgatctctcctccaatccctgagccgcctgcagaagcctagagccttcattctgaagtctaagggcatcaaacagaaacaaattatacccaaaaatctccttgatagcaagagccttaagttgatcatctctatgacacttcacgataggactactaagtccctgctgcacctgcataaaaagaagaagccacctagtatctctgctcagttccagactagcctgaataaactgctcgaagctctgggtaaggcggagccttttttcattagatgcattagatccaacgctgaaaaaaaggagctgtgctttgacgatgagcttgtgttacagcagttgaggtacaccgggatgctggagaccgtgagaatacggagatccggctattcggcaaaatacacattccaggacttcaccgagcagtttcaggtcctgctgcccaaggatgcccagccctgccgtgaggtgatatcaaccctgctcgaaaagatgaagatcgataagcgaaactaccagatcggaaagactaaagtgtttctgaaggagaccgagagacaggccctgcaggagaccctacacagggaagtggtgagaaagattctacttctccagagctggttccgcatggtgctcgaacggaggcatttcctgcagatgaagagggcggccgtgacaatccaggcgtgttggcgctcatatagagttaggagggctctggagaggacgcaggctgcagtgtaccttcaagcttcctggagagggtactggcagcgcaagctataccgtcaccagaaacagagtattattcggctgcagagcctctgcaggggccatttgcagaggaaaagttttagccaaatgattagcgagaagcaaaaagccgaggagaaagagcgggaagcgctggaagcagcccgcgccggggcagaggagggaggtcaaggacaggcagccgggggccagcaggtggcagagcagggtcccgaacccgccgaagacggcgggcatctagcatcagaacctgaggttcagccatcggacaggtctccactcgagcactcctcacctgaaaaggaagcaccctctccggaaaagacactgcccccccaaaagaccgtagcggcagaatcccacgaaaaagttccttcctctcgagagaaaagagaaagcagacgccagagaggtttggaacacgtaaaattccagaacaagcatattcagtcttgcaaagaggagtccgctctgagggagccatcccggcgggtgacacaggagcagggcgttagcctcttggaagacaaaaaagagtctcgggaagatgagactctgctggtcgtggagactgaggccgagaacactagccagaagcaacccacagagcagccccaagcgatggccgtggggaaagtctctgaagaaacggaaaagacactcccttcgggctctcccagacctggacagctggaacgtccgacctccctcgctctggacagccgggtttctccgcccgctcccggaagtgccccggagacacccgaggacaaaagcaagccatgcgggtcaccacgcgttcaggaaaagcccgatagccccggcggatcgacccagatccaacgttacctggacgcggaacggctggccagtgcagtggagctctggcgtgggaagaaactggtggccgcagctagcccgagcgcgatgctgagccaaagcttagatctgagcgaccggcaccgcgcaacaggcgcggcccttactcccaccgaagaacgtagaactagcttcagtacatctgacgtgagcaaactgctgccatcgctggccaaagcccagcccgcagctgagacaacagacggggagcggtcagccaagaagccagccgtgcagaagaagaagcccggcgatgctagcagtctgcctgacgctggcctctccccaggcagtcaggtggactccaagagcaccttcaaacggctctttctgcataaaacaaaggacaagaagtacagcctcgagggggcagaagagctagagaacgctgttagcgggcacgtcgtactggaagccaccaccatgaaaaagggcctcgaggccccaagcggccagcagcacaggcacgcagccggtgaaaagcgaactaaagaacccggcgggaagggtaagaagaatcgtaatgtgaaaattggcaaaatcacggtgtccgagaaatggagggagtctgtcttcagacagattactaacgcgaatgaactgaaatatctcgacgagttcttgttgaacaaaataaatgatctgcggagtcagaagactccaatcgagtctctgtttatcgaagctactgagaagtttaggagtaatatcaaaacaatgtatagcgtacccaatgggaaaatccacgttgggtacaaggacctcatggagaactatcagattgttgtaagcaatcttgctacagagcgcgggcagaaagacacgaatctcgtactgaaccttttccagtcactcctagacgaattcactagggggtacactaaaaatgacttcgaacccgttaaacagtcgaaagcgcaaaagaagaagagaaagcaagagcgggccgtacaggagcataatggccacgtcttcgcctcctatcaggttagcattccacaaagctgtgagcaatgcctgagttacatctggttaatggacaaagccctcctgtgttctgtttgcaagatgacgtgtcacaaaaaatgcgtccacaagatacagagccattgttcttatacctacggtcggaagggcgaacctggagtcgagccaggccactttggcgtctgcgttgatagcctgacgagcgacaaggcctccgtacccatcgtcctcgagaaactcctggaacatgtcgaaatgcatggtctgtatactgaaggcctgtatcggaaatccggcgctgctaatcgtactcgtgaacttcggcaagcactgcagactgatcccgcggctgttaaattggagaactttccgatccacgcaattacaggcgtgctgaaacaatggcttcgtgagttacctgaacctctgatgacatttgcccagtatggtgacttcctacgagcagtggagctccccgagaagcaggagcaactggctgccatctacgcagttcttgagcaccttcctgaggcaaatcataattctttggaaagactaattttccaccttgtcaaggtagcattactggaggatgttaacagaatgtccccaggcgctctcgcaattatttttgctccttgcctgctgaggtgccctgataatagcgaccctctcacctccatgaaagacgtcctgaaaatcacaacctgtgtggaaatgctgattaaagagcagatgcgaaaatacaaagtgaagatggaggagatatcacagttggaggccgctgaaagtatcgcgtttcggcgcttgagcctgctccgccagaacgcaccctggcctctgaagctgggattctcatccccctacgagggcgttctcaacaagtccccgaagactcgcgacatacaggaggaagagttggaggtgctcctagaagaggaggctgcaggtggtgacgaagaccgagagaaggaaattctgattgagcgcatacaatcaattaaagaagagaaagaagatatcacatatagactgccagaattagaccctcgtggctctgacgaggaaaacttagactcggagacatcagcaagcaccgaaagcctattggaagagcgggctggtaggggggcatcggaaggccagtactag

SEQ ID NO: 47455 - DNA, 6068 bp, Artificial Sequence
  derived and/or modified sequence
atgtctgtgaaggaggccggatcctctggccgtagagagcaggccgcttatcatctccatatttaccctcaactgagcaccacggagtctcaagcctcttgccgtgttaccgctaccaaggatagcacaacaagtgacgtcattaaggatgcaatagcctccttacgcctggatggaaccaagtgctatgtgctggtggaggtaaaggagagcggaggggaggagtgggtgctggatgccaatgatagccctgtgcaccgtgtgcttctgtggccgcgacgtgcacaagacgaacaccctcaggaagacggctactacttcctgctccaagagcgaaacgccgacgggacaattaaatatgtacatatgcagctcgtggctcaggctactgctacacgccgtctagtcgagcggggattattacctcgccagcaagccgactttgacgacctgtgtaatctaccagagctgacagaggggaatctgctgaagaacctaaagcatcgatttcttcagcagaagatttacacatacgcaggctccattctggtagccatcaatcctttcaagtttctccccatatacaatcctaagtacgtgaagatgtacgaaaatcagcaattaggcaagctcgaaccccatgtgttcgctctggccgacgtcgcctattatactatgctgaggaaacgcgtaaaccagtgtattgtaatctccggtgagagtggcagcggtaagactcagtctacaaatttcctgattcattgtttgacggcactatctcagaaaggctacgcatccggggtggagagaactatcctcggcgctgggccagtgcttgaagccttcggcaatgccaaaacagctcacaacaacaactcctcaaggttcgggaaatttattcaagtctcatatttagagtctgggatcgtgcgcggagcagtggtggagaagtacctcttggaaaaaagtcgtctggtaagtcaggaaaaggacgagcgaaattatcacgtcttttactatcttctccttggtgtcagtgaggaggagcgacaagagtttcagttgaagcagccagaggactatttctatttgaatcaacataaccttaaaattgaagatggggaggatttgaagcacgacttcgaaagactcaagcaggccatggagatggtaggttttctccccgcaacaaaaaagcagatcttcgcagttctttcggcaattctgtatcttggaaatgtgacatataaaaagcgggcaacaggacgcgaggagggcttagaggtgggccctcccgaagttctggataccctgagtcaacttctaaaggtgaagagggagattcttgtggaagtgttgacgaaaagaaaaactgtgacagtgaatgataagctgattcttccttatagtctctctgaggcgattactgctcgagactcaatggccaagtcactgtactccgcactgttcgactggatagtgttgcgcatcaatcatgctttgctgaacaaaaaagatgtcgaagaggccgtgagttgccttagcatcggggtgctggatatattcggtttcgaagattttgaaagaaacagttttgaacagttctgcataaattatgccaatgaacagctgcagtattatttcaatcaacacatctttaaactggagcaggaagaatatcagggcgagggaatcacctggcacaatatcggctatacggataacgtcggctgtatccatctgatctctaagaaaccaacgggactgttctatttactcgacgaggaaagtaacttccctcatgccacctcacagacattattagctaagttcaagcagcagcacgaagacaacaagtattttttgggcacgcccgtcatggaacctgcttttattattcaacattttgcagggaaggtgaagtatcagatcaaagactttcgcgaaaaaaatatggactatatgagacctgacatcgtagcgctccttagaggatcggacagctcctatgtacgtgagctcataggcatggatcccgtagccgtctttcgatgggcggtgcttcgggctgccattagagcgatggctgtcttgagggaggccggacgactgcgcgcagagcgtgcagagaaggctgcaggcatgtcgtcccctggtgcccagagccacccggaagaactcccccgtggtgccagcaccccaagcgaaaaactgtacagagacctgcataatcagatgattaaatctatcaaaggtcttccctggcaaggggaggatcccaggagtcttctccagtccttgagtagactgcagaagccaagagccttcattttgaaatcaaaaggaatcaaacaaaaacagatcattcccaagaatctgctggattcgaaatcactgaaacttataatctcgatgacgcttcatgataggactaccaagtctctgctgcatcttcacaagaaaaagaaacccccatcaatttctgcacagtttcagacaagtcttaacaagctgttggaagctttaggcaaggcagagcctttctttatcagatgcatcagatccaacgctgagaaaaaagaactttgttttgacgatgaattggttttacagcagttgcgttacaccgggatgcttgaaactgttagaatcagacgctcggggtattccgcaaaatataccttccaagatttcactgagcagttccaggtcctcctccctaaggatgctcagccctgccgagaggtgataagcaccctgctggaaaagatgaagattgacaaaagaaactatcaaatcggcaaaaccaaggtgttcttgaaggaaacggaacgacaggctctccaggaaacgttgcacagagaggtggtacgaaaaatactgctcctacagtcttggtttaggatggtgcttgagcggaggcactttctgcagatgaaacgggctgcagtaaccatccaggcctgttggcgctcctaccgggtgagacgagccctggaacggacacaagccgcagtctatctccaggcctcttggcgcggatattggcaacgaaaactgtataggcatcaaaagcaatctataatccggctacaaagcctctgccgcggtcatcttcagagaaaaagcttcagtcagatgatatccgagaagcagaaggccgaagaaaaagagcgggaggctctggaggcggcacgcgctggcgctgaagaggggggacagggccaggctgccggaggtcagcaggtggctgaacagggccctgagccagccgaggacggcggacacctggcctctgaaccagaggtgcagccctctgaccggagtcctcttgaacactcctctccagagaaagaggctcccagtcccgagaagaccttgcctccacagaagacagtggccgcagagtcccatgagaaagttccctcttctcgcgagaagcgtgaatctaggcggcagaggggccttgaacacgtgaagtttcagaataagcatatccaatcgtgcaaggaggagagcgctcttagagaaccaagcagacgcgtgacacaggagcagggggtgagcttacttgaggataagaaagagagccgcgaggacgaaaccttactggtagtggagacagaggcagagaatacatctcaaaaacagcctactgaacagcctcaagcaatggctgtgggaaaggtgagtgaggagacagaaaagacgctcccgagcggcagcccacgcccagggcagcttgaacggccaacatctctggccctcgatagccgagtcagccctcctgcgccagggtcggctccagagacacccgaggacaagagcaagccatgtgggtctccacgggtacaagagaagccagactcccccggaggatccacacagattcagagatatcttgatgctgagcgcttggccagcgccgtcgaactctggcgtggaaaaaagctggtggctgcagcttctccttctgctatgctgagccaatccctggatttgagtgacagacatcgggcaacaggcgctgcacttacgcctacagaggagcggcgtacatcctttagcacttctgatgtgtccaaactgctgcccagcctcgctaaagcccagcctgccgctgagaccaccgatggggaacgcagtgctaagaagccggctgtgcagaagaaaaaaccaggagatgcctcatctttgcccgacgccggtctctctcctgggtcgcaggtcgactctaagtccaccttcaagcgcttattcctgcacaaaaccaaagataagaagtacagcctcgaaggcgcagaagagttggagaacgctgtctcgggtcacgttgtgctggaggctactaccatgaagaagggtctggaggctcccagcggacagcagcaccgacacgccgctggtgaaaaacgcacaaaagagccgggtggaaagggcaagaagaacagaaacgttaaaatagggaaaatcacggtgtccgagaaatggcgcgaaagtgtgtttagacagattaccaacgctaatgagttgaaataccttgatgaatttcttctcaacaaaattaacgatcttagaagtcagaagactcccatcgagtcgctgtttatcgaggccactgagaagtttaggagcaatatcaagactatgtattccgtgccaaatggcaagatccacgtcgggtacaaagacttaatggaaaattaccagatcgtagtcagtaatctggccactgaacggggacagaaagacactaacctagtgctcaatttgttccaaagtctactggatgagtttacaaggggttacactaagaatgattttgagccagtgaagcaatccaaagcccaaaaaaaaaagcggaagcaggaaagagctgtccaagaacacaatggacacgtttttgcctcttaccaagtgagcatcccccagagttgcgagcaatgcctgtcatatatctggttgatggacaaagcccttttgtgtagcgtctgtaaaatgacttgccacaagaagtgtgtacataaaatacagtcccactgtagttatacttacggccgaaagggcgaacctggggtcgaacccggtcactttggggtgtgcgttgactccttgacctcagataaggccagcgttccaatcgtgctcgagaagctgctcgagcacgtggaaatgcacggcctgtacacagaaggattataccggaagtcaggagccgcaaacagaactcgggagttgagacaggccctgcaaaccgacccagccgcagtgaaactagagaattttcctattcacgctattaccggcgtactcaagcagtggctgcgggaactccccgagccccttatgactttcgcccagtacggcgacttcctgagagccgtggagttaccggagaagcaggaacagctcgccgcaatctacgccgtgctggagcatcttccagaagcaaatcataatagtctagagcgtctaatcttccacctggtgaaagtggcactccttgaggatgtaaatcgaatgagtccaggagccctagccattatctttgctccctgcctgcttagatgtcctgacaattctgaccctttgacttcaatgaaagatgtcctgaaaatcaccacatgcgttgagatgctcatcaaggagcagatgcggaagtataaggttaagatggaggaaatctcgcagttggaggcggctgagagtatcgccttcagaaggctttctctgctccgccaaaacgctccctggcctctcaagctcggtttctccagcccatatgagggcgtacttaacaaatctcctaagacccgggatatccaggaagaggagttagaggtgctactcgaggaagaggccgcagggggtgacgaggatagagagaaggaaattctgattgagcgtatacaatccataaaggaagagaaggaggacataacttatcggctgccagagctggacccccgagggtccgacgaggagaacttggattccgaaacttctgctagtacggagtctctcctggaagaaagggctggaagaggcgcttccgaagggcaatatta

SEQ ID NO: 47456 - DNA, 6068 bp, Artificial Sequence
  derived and/or modified sequence
atgagtgtcaaggaagcgggatccagtggtaggagagaacaggcagcgtaccacctccatatctatcctcagctgagtactacagaaagccaagcatcctgtcgcgtgaccgccacaaaggatagtacaacatctgacgttattaaggatgccatcgccagtctgagattagacggaactaagtgctatgtcctggtcgaagttaaggagtccgggggagaagagtgggttctggatgccaacgacagtcccgtgcatcgggtcctgctctggcccagacgggctcaggatgagcatcctcaggaggatggctattatttcctgttgcaggagagaaacgccgacggaaccatcaaatatgtgcatatgcagctagtggcgcaagctacggcaaccaggagactcgtcgagcgaggcttgctgccaagacaacaggccgattttgacgacttgtgcaatttaccagagctaacagagggaaatctcctgaagaatcttaaacacaggttcttgcagcaaaagatctacacatatgcagggagcatcctcgtggctattaaccctttcaaatttctgcccatctacaatccaaaatacgtgaaaatgtacgaaaatcagcagctgggaaaacttgaaccccacgtgtttgcattggctgatgtagcttactatacaatgctgcgaaagcgcgtgaatcagtgcattgtcatctcaggcgagtccggcagcggaaaaactcagagcacaaattttctcatccattgtcttacggctctgtctcagaagggatatgcatcaggggttgagaggaccatcttgggcgctgggcctgtcctggaggcattcggtaacgcgaagactgctcacaacaacaattcttcgaggtttggaaagttcatccaggtttcctatcttgagagcggaatagtcagaggcgctgtggttgagaaatacttgttggagaagtctagactcgtgagccaggaaaaggacgagcgcaactaccacgtcttctactatcttttattaggcgtgtcggaagaggaaaggcaggagttccaactgaagcagcccgaagactatttttacttgaatcagcataatctcaaaatcgaagatggtgaagacctgaagcatgattttgaacgtctgaaacaggccatggaaatggtcggatttctccccgcaaccaagaagcagattttcgccgtccttagtgccatcctttatcttgggaacgtgacctacaaaaaacgagctaccgggagagaagagggtttggaggtgggcccacctgaagtattggacactctctctcagctgctgaaagtcaagagagaaatccttgtggaagtcttaacgaagcgcaaaaccgtgaccgttaacgacaagctgattcttccctactccttgtccgaggcaataactgctcgagacagcatggccaagtctctctatagtgctctcttcgattggatcgttctcagaatcaaccatgcactgctgaacaaaaaggatgtggaagaagctgtgagctgtctgagtatcggggtgctagacattttcggtttcgaggatttcgagaggaatagcttcgagcagttctgcatcaactacgccaatgaacagctccagtactatttcaaccagcacatcttcaaacttgaacaggaagagtaccagggcgagggtattacatggcacaatatcgggtatactgataacgtcgggtgcatccacctcattagtaaaaaacccacaggtcttttctatctcctcgatgaggagtccaatttccctcacgccacctcccaaacgctgctggctaagttcaaacaacaacacgaagacaataaatattttctgggcactccagtgatggagccagcctttattatccagcactttgcagggaaggtaaaatatcagattaaggattttagagaaaagaatatggactacatgaggcctgatattgttgctctgctgcggggttctgacagtagctacgtgcgggaacttatcggaatggatcctgtggctgttttccgttgggcagtgctgcgggctgcaatcagggccatggcggtgctgagggaagctgggcgtcttcgcgctgagagagcggaaaaggcagcagggatgagtagcccaggggctcagagccatcccgaagagctgcctcgcggagcatctaccccttctgagaaattatatcgcgatctgcataaccagatgataaagtcaattaaaggcctgccctggcagggcgaagaccctcggtctctgcttcagtcgttgtcccgcttacagaagcctcgcgcttttatcctgaagtcaaaggggatcaagcaaaaacaaatcattccgaaaaacctcttggacagcaaaagtcttaagcttattatctctatgactctgcatgataggaccaccaaatctctcctccatctacacaagaagaaaaagcctccaagcatctccgcccaattccagacgtccctcaacaagctattggaagccctgggtaaagccgagccgtttttcattcgctgtataagatcaaacgcggaaaagaaagagctatgttttgatgacgaactggtgttgcagcagctgcgctacaccggcatgctagaaaccgtaagaatacggcgaagtgggtacagcgcaaagtatacgtttcaagatttcactgagcagtttcaggtactcctgccaaaagacgcccagccatgcagggaggtcatatctactcttctggaaaaaatgaaaatcgataaaagaaactaccagatagggaagactaaagtcttcctgaaggaaaccgaaagacaggcactgcaagaaacattacatcgtgaagtagtcagaaagatcctgctgctccagagttggttcaggatggtcttggaacgacggcacttcctgcagatgaagcgcgctgccgtgactatccaggcctgttggaggtcgtaccgcgtgagacgcgcactggagagaacgcaggccgctgtttacctccaagcctcctggcggggatactggcaaagaaagctttaccggcaccagaagcagagcataattaggcttcagtctctgtgccgaggacatctacagcgcaagtccttctcccaaatgatctccgagaagcagaaggcagaggaaaaagagcgggaggccctggaagctgccagggccggagccgaggaggggggtcagggtcaagctgccggaggacaacaggtagcggagcagggaccagaacccgcagaggacggcggacacttagcgagcgagcctgaggtgcagccatcagatagaagtccgttggaacattcgtctccagagaaagaggccccatccccagaaaaaacgttgcctccacagaaaacagtggccgcagaaagtcacgaaaaggtaccctcttctcgtgagaagagggaatcccgccgacaaagaggtcttgaacatgtgaaatttcagaataaacacattcagtcttgcaaagaggagagcgcattgcgagagccctcgagacgggtgacacaggaacagggcgtgtctctgctggaggacaagaaagaatctagggaggacgagactctgttggtagtggagacagaagccgaaaatacctcccagaagcagcctacggagcaaccacaggctatggcagtaggcaaggtgagtgaggagaccgagaagaccctcccttctggttcccctaggccaggccagctggaacgacctacttctctggccctcgattcccgagtcagcccacctgcccctggcagcgctccagaaacgccagaggataagtcaaaaccctgtggtagtccccgagtgcaggagaaaccagactcacctggcggaagcacccaaattcagcggtacttagacgccgaacggctggctagcgcggtggaactctggaggggtaagaaactggtggctgccgcttctccctccgccatgttaagccaatccctggacttgagtgatcggcacagagcaaccggagctgcgcttaccccaaccgaggagcgcagaacatctttctctacaagtgacgtgtctaagctccttcccagcctggccaaagcgcaacccgctgctgaaactacagatggcgagaggtccgccaagaagccagctgtgcaaaaaaagaagcccggagacgcatcaagcctccctgatgccggattaagtcccggatcccaagtggactccaagtctacctttaaaagactatttcttcataaaaccaaggacaaaaaatactccctggagggcgcagaagagctggagaacgccgttagtgggcacgtagttttagaggcaactacaatgaagaagggactggaagctccatcaggccaacagcacagacatgccgctggcgaaaaaagaactaaggaacctggcggtaagggcaaaaagaatcgcaatgtcaagattggcaaaatcactgtcagcgagaagtggcgcgagtccgttttcaggcagatcacaaatgcaaacgagttaaagtatctcgacgagtttctgttaaacaagataaatgacctccgttctcaaaaaacccctatcgaaagtttgttcattgaagcgaccgagaagtttcggtcaaacataaagactatgtattccgtgccaaatggcaaaatccatgtgggctacaaagacttaatggagaactatcaaatcgtagtaagcaacttggcaaccgaaagagggcagaaggatactaatctagtcctgaacttgtttcagtccctcctggacgaatttacccggggatacacgaagaacgattttgagcctgtcaagcaaagcaaggctcagaagaaaaagaggaaacaagaaagggcggtgcaggaacacaatggccacgtgtttgccagctaccaagtttccatcccacagagttgtgagcaatgtctctcatatatctggctaatggacaaagctctcctttgttctgtctgtaagatgacatgtcacaagaagtgcgtgcataagatccaatcccactgctcttatacatatgggagaaagggcgaacctggggtcgagccgggtcacttcggcgtgtgcgtggatagcttgacatctgataaggctagcgtgcccattgtcctggagaaactgttggagcacgtcgaaatgcatggactgtacacggagggcctttatcgcaaatccggcgctgctaacagaacccgtgagctcaggcaagccctacagactgacccggcagcggtcaaactcgaaaacttcccaatacacgctattactggcgtgctgaaacaatggctgcgcgaactgccggaacctctcatgacctttgcccagtacggcgatttcctgcgcgctgtagaactaccagagaaacaagaacaactcgccgcaatctacgctgtgcttgagcacctcccagaagctaaccacaactctctcgagaggctgatattccacctcgttaaggtcgctctccttgaagacgttaacagaatgtctcccggagccctggccataatatttgcgccttgcttgttacgctgtcccgacaattctgatccactcacctcaatgaaagatgttctgaagataaccacatgcgtcgagatgctgataaaggagcaaatgagaaaatataaagtgaagatggaggagatcagccagctggaagctgcagaaagcattgcgttccgtcgtctaagtctactcagacaaaatgcaccctggcctctgaagttaggtttttctagcccgtacgaaggcgtcctcaataaaagccctaagacacgggacattcaggaggaggaactcgaggtgctcctcgaagaggaggccgctggcggtgacgaggaccgggaaaaggagatactgatcgaacggatccaatccatcaaggaggaaaaagaggacatcacttaccgtctgcccgagcttgatcccaggggctcagacgaagagaacctggactccgagacttcggcctcgacggagtcactgctagaagaacgggctggcagaggagcctccgagggccagtatta

SEQ ID NO: 47457 - DNA, 6069 bp, Artificial Sequence
  derived and/or modified sequence
atgagcgtgaaggaggccggcagcagcggcagaagagagcaggccgcctaccacctgcacatctacccccagctgagcaccaccgagagccaggccagctgcagagtgaccgccaccaaggacagcaccaccagcgacgtgatcaaggacgccatcgccagcctgagactggacggcaccaagtgctacgtgctggtggaggtgaaggagagcggcggcgaggagtgggtgctggacgccaacgacagccccgtgcacagagtgctgctgtggcccagaagagcccaggacgagcacccccaggaggacggctactacttcctgctgcaggagagaaacgccgacggcaccatcaagtacgtgcacatgcagctggtggcccaggccaccgccaccagaagactggtggagagaggcctgctgcccagacagcaggccgacttcgacgacctgtgcaacctgcccgagctgaccgagggcaacctgctgaagaacctgaagcacagattcctgcagcagaagatctacacctacgccggcagcatcctggtggccatcaaccccttcaagttcctgcccatctacaaccccaagtacgtgaagatgtacgagaaccagcagctgggcaagctggagccccacgtgttcgccctggccgacgtggcctactacaccatgctgagaaagagagtgaaccagtgcatcgtgatcagcggcgagagcggcagcggcaagacccagagcaccaacttcctgatccactgcctgaccgccctgagccagaagggctacgccagcggcgtggagagaaccatcctgggcgccggccccgtgctggaggccttcggcaacgccaagaccgcccacaacaacaacagcagcagattcggcaagttcatccaggtgagctacctggagagcggcatcgtgagaggcgccgtggtggagaagtacctgctggagaagagcagactggtgagccaggagaaggacgagagaaactaccacgtgttctactacctgctgctgggcgtgagcgaggaggagagacaggagttccagctgaagcagcccgaggactacttctacctgaaccagcacaacctgaagatcgaggacggcgaggacctgaagcacgacttcgagagactgaagcaggccatggagatggtgggcttcctgcccgccaccaagaagcagatcttcgccgtgctgagcgccatcctgtacctgggcaacgtgacctacaagaagagagccaccggcagagaggagggcctggaggtgggcccccccgaggtgctggacaccctgagccagctgctgaaggtgaagagagagatcctggtggaggtgctgaccaagagaaagaccgtgaccgtgaacgacaagctgatcctgccctacagcctgagcgaggccatcaccgccagagacagcatggccaagagcctgtacagcgccctgttcgactggatcgtgctgagaatcaaccacgccctgctgaacaagaaggacgtggaggaggccgtgagctgcctgagcatcggcgtgctggacatcttcggcttcgaggacttcgagagaaacagcttcgagcagttctgcatcaactacgccaacgagcagctgcagtactacttcaaccagcacatcttcaagctggagcaggaggagtaccagggcgagggcatcacctggcacaacatcggctacaccgacaacgtgggctgcatccacctgatcagcaagaagcccaccggcctgttctacctgctggacgaggagagcaacttcccccacgccaccagccagaccctgctggccaagttcaagcagcagcacgaggacaacaagtacttcctgggcacccccgtgatggagcccgccttcatcatccagcacttcgccggcaaggtgaagtaccagatcaaggacttcagagagaagaacatggactacatgagacccgacatcgtggccctgctgagaggcagcgacagcagctacgtgagagagctgatcggcatggaccccgtggccgtgttcagatgggccgtgctgagagccgccatcagagccatggccgtgctgagagaggccggcagactgagagccgagagagccgagaaggccgccggcatgagcagccccggcgcccagagccaccccgaggagctgcccagaggcgccagcacccccagcgagaagctgtacagagacctgcacaaccagatgatcaagagcatcaagggcctgccctggcagggcgaggaccccagaagcctgctgcagagcctgagcagactgcagaagcccagagccttcatcctgaagagcaagggcatcaagcagaagcagatcatccccaagaacctgctggacagcaagagcctgaagctgatcatcagcatgaccctgcacgacagaaccaccaagagcctgctgcacctgcacaagaagaagaagccccccagcatcagcgcccagttccagaccagcctgaacaagctgctggaggccctgggcaaggccgagcccttcttcatcagatgcatcagaagcaacgccgagaagaaggagctgtgcttcgacgacgagctggtgctgcagcagctgagatacaccggcatgctggagaccgtgagaatcagaagaagcggctacagcgccaagtacaccttccaggacttcaccgagcagttccaggtgctgctgcccaaggacgcccagccctgcagagaggtgatcagcaccctgctggagaagatgaagatcgacaagagaaactaccagatcggcaagaccaaggtgttcctgaaggagaccgagagacaggccctgcaggagaccctgcacagagaggtggtgagaaagatcctgctgctgcagagctggttcagaatggtgctggagagaagacacttcctgcagatgaagagagccgccgtgaccatccaggcctgctggagaagctacagagtgagaagagccctggagagaacccaggccgccgtgtacctgcaggccagctggagaggctactggcagagaaagctgtacagacaccagaagcagagcatcatcagactgcagagcctgtgcagaggccacctgcagagaaagagcttcagccagatgatcagcgagaagcagaaggccgaggagaaggagagagaggccctggaggccgccagagccggcgccgaggagggcggccagggccaggccgccggcggccagcaggtggccgagcagggccccgagcccgccgaggacggcggccacctggccagcgagcccgaggtgcagcccagcgacagaagccccctggagcacagcagccccgagaaggaggcccccagccccgagaagaccctgcccccccagaagaccgtggccgccgagagccacgagaaggtgcccagcagcagagagaagagagagagcagaagacagagaggcctggagcacgtgaagttccagaacaagcacatccagagctgcaaggaggagagcgccctgagagagcccagcagaagagtgacccaggagcagggcgtgagcctgctggaggacaagaaggagagcagagaggacgagaccctgctggtggtggagaccgaggccgagaacaccagccagaagcagcccaccgagcagccccaggccatggccgtgggcaaggtgagcgaggagaccgagaagaccctgcccagcggcagccccagacccggccagctggagagacccaccagcctggccctggacagcagagtgagcccccccgcccccggcagcgcccccgagacccccgaggacaagagcaagccctgcggcagccccagagtgcaggagaagcccgacagccccggcggcagcacccagatccagagatacctggacgccgagagactggccagcgccgtggagctgtggagaggcaagaagctggtggccgccgccagccccagcgccatgctgagccagagcctggacctgagcgacagacacagagccaccggcgccgccctgacccccaccgaggagagaagaaccagcttcagcaccagcgacgtgagcaagctgctgcccagcctggccaaggcccagcccgccgccgagaccaccgacggcgagagaagcgccaagaagcccgccgtgcagaagaagaagcccggcgacgccagcagcctgcccgacgccggcctgagccccggcagccaggtggacagcaagagcaccttcaagagactgttcctgcacaagaccaaggacaagaagtacagcctggagggcgccgaggagctggagaacgccgtgagcggccacgtggtgctggaggccaccaccatgaagaagggcctggaggcccccagcggccagcagcacagacacgccgccggcgagaagagaaccaaggagcccggcggcaagggcaagaagaacagaaacgtgaagatcggcaagatcaccgtgagcgagaagtggagagagagcgtgttcagacagatcaccaacgccaacgagctgaagtacctggacgagttcctgctgaacaagatcaacgacctgagaagccagaagacccccatcgagagcctgttcatcgaggccaccgagaagttcagaagcaacatcaagaccatgtacagcgtgcccaacggcaagatccacgtgggctacaaggacctgatggagaactaccagatcgtggtgagcaacctggccaccgagagaggccagaaggacaccaacctggtgctgaacctgttccagagcctgctggacgagttcaccagaggctacaccaagaacgacttcgagcccgtgaagcagagcaaggcccagaagaagaagagaaagcaggagagagccgtgcaggagcacaacggccacgtgttcgccagctaccaggtgagcatcccccagagctgcgagcagtgcctgagctacatctggctgatggacaaggccctgctgtgcagcgtgtgcaagatgacctgccacaagaagtgcgtgcacaagatccagagccactgcagctacacctacggcagaaagggcgagcccggcgtggagcccggccacttcggcgtgtgcgtggacagcctgaccagcgacaaggccagcgtgcccatcgtgctggagaagctgctggagcacgtggagatgcacggcctgtacaccgagggcctgtacagaaagagcggcgccgccaacagaaccagagagctgagacaggccctgcagaccgaccccgccgccgtgaagctggagaacttccccatccacgccatcaccggcgtgctgaagcagtggctgagagagctgcccgagcccctgatgaccttcgcccagtacggcgacttcctgagagccgtggagctgcccgagaagcaggagcagctggccgccatctacgccgtgctggagcacctgcccgaggccaaccacaacagcctggagagactgatcttccacctggtgaaggtggccctgctggaggacgtgaacagaatgagccccggcgccctggccatcatcttcgccccctgcctgctgagatgccccgacaacagcgaccccctgaccagcatgaaggacgtgctgaagatcaccacctgcgtggagatgctgatcaaggagcagatgagaaagtacaaggtgaagatggaggagatcagccagctggaggccgccgagagcatcgccttcagaagactgagcctgctgagacagaacgccccctggcccctgaagctgggcttcagcagcccctacgagggcgtgctgaacaagagccccaagaccagagacatccaggaggaggagctggaggtgctgctggaggaggaggccgccggcggcgacgaggacagagagaaggagatcctgatcgagagaatccagagcatcaaggaggagaaggaggacatcacctacagactgcccgagctggaccccagaggcagcgacgaggagaacctggacagcgagaccagcgccagcaccgagagcctgctggaggagagagccggcagaggcgccagcgagggccagtactag

SEQ ID NO: 47458 - protein, 744 aa, Artificial Sequence
  derived and/or modified sequence
MASEGTNIPSPVVRQIDKQFLICSICLERYKNPKVLPCLHTFCERCLQNYIPAHSLTLSCPVCRQTSILPEKGVAALQNNFFITNLMDVLQRTPGSNAEESSILETVTAVAAGKPLSCPNHDGNVMEFYCQSCETAMCRECTEGEHAEHPTVPLKDVVEQHKASLQVQLDAVNKRLPEIDSALQFISEIIHQLTNQKASIVDDIHSTFDELQKTLNVRKSVLLMELEVNYGLKHKVLQSQLDTLLQGQESIKSCSNFTAQALNHGTETEVLLVKKQMSEKLNELADQDFPLHPRENDQLDFIVETEGLKKSIHNLGTILTTNAVASETVATGEGLRQTIIGQPMSVTITTKDKDGELCKTGNAYLTAELSTPDGSVADGEILDNKNGTYEFLYTVQKEGDFTLSLRLYDQHIRGSPFKLKVIRSADVSPTTEGVKRRVKSPGSGHVKQKAVKRPASMYSTGKRKENPIEDDLIFRVGTKGRNKGEFTNLQGVAASTNGKILIADSNNQCVQIFSNDGQFKSRFGIRGRSPGQLQRPTGVAVHPSGDIIIADYDNKWVSIFSSDGKFKTKIGSGKLMGPKGVSVDRNGHIIVVDNKACCVFIFQPNGKIVTRFGSRGNGDRQFAGPHFAAVNSNNEIIITDFHNHSVKVFNQEGEFMLKFGSNGEGNGQFNAPTGVAVDSNGNIIVADWGNSRIQVFDGSGSFLSYINTSADPLYGPQGLALTSDGHVVVADSGNHCFKVYRYLQ

SEQ ID NO: 47459 - DNA, 207 bp, Artificial Sequence
  derived and/or modified sequence
tgactgtgcatgggcatcatcctgatcctgagcgcccggagcacccaggagattgagatcaactacacccgcatctgtgccaactgtgccaagctgcgggagaatgccagcaactttgacaaggagtgcacctgcagcatccccttctacctgagcggcaagatgatggtgggggagatccaggagacccggctgaccctgcactag

SEQ ID NO: 47460 - protein, 358 aa, Artificial Sequence
  derived and/or modified sequence
MRAHAQRGRGCTRRSAAVLMARHGLPLLPLLSLLVGAWLKLGNGQATSMVQLQGGRFLMGTNSPDSRDGDGPVREATVKPFAIDIFPVTNKDFRDFVREKKYRTEAEMFGWSFVFEDFVSDELRNKATQPMKSVLWWLPVEKAFWRQPAGPGSGIRERLEHPVLHVSWNDARAYCAWRGKRLPTEEEWEFAARGGLKGQVYPWGNWFQPNRTNLWQGKFPKGDKAEDGFHGVSPVNAFPAQNNYGWATLQIQPQTTSVSAVLQTQAGRQGSCKQPGGDKEKSLLGSLSFPGHVANSAIPSSRASASGKNFPFPVSHPSVAGASHQGRRGLSLLCFGEGAQCVLTMAGGQVFLLEAKYY

SEQ ID NO: 47461 - DNA, 1077 bp, Artificial Sequence
  derived and/or modified sequence
atgagagcccacgcccagagaggcagaggctgcaccagaagaagcgccgccgtgctgatggccagacacggcctgcccctgctgcccctgctgagcctgctggtgggcgcctggctgaagctgggcaacggccaggccaccagcatggtgcagctgcagggcggcagattcctgatgggcaccaacagccccgacagcagagacggcgacggccccgtgagagaggccaccgtgaagcccttcgccatcgacatcttccccgtgaccaacaaggacttcagagacttcgtgagagagaagaagtacagaaccgaggccgagatgttcggctggagcttcgtgttcgaggacttcgtgagcgacgagctgagaaacaaggccacccagcccatgaagagcgtgctgtggtggctgcccgtggagaaggccttctggagacagcccgccggccccggcagcggcatcagagagagactggagcaccccgtgctgcacgtgagctggaacgacgccagagcctactgcgcctggagaggcaagagactgcccaccgaggaggagtgggagttcgccgccagaggcggcctgaagggccaggtgtacccctggggcaactggttccagcccaacagaaccaacctgtggcagggcaagttccccaagggcgacaaggccgaggacggcttccacggcgtgagccccgtgaacgccttccccgcccagaacaactacggctgggccaccctgcagatccagccccagaccaccagcgtgagcgccgtgctgcagacccaggccggcagacagggcagctgcaagcagcccggcggcgacaaggagaagagcctgctgggcagcctgagcttccccggccacgtggccaacagcgccatccccagcagcagagccagcgccagcggcaagaacttccccttccccgtgagccaccccagcgtggccggcgccagccaccagggcagaagaggcctgagcctgctgtgcttcggcgagggcgcccagtgcgtgctgaccatggccggcggccaggtgttcctgctggaggccaagtactactag

SEQ ID NO: 47462 - DNA, 1077 bp, Artificial Sequence
  derived and/or modified sequence
atgcgggcacacgcacaacgtggtcgagggtgcacaaggagatccgccgctgtgctgatggccaggcatggtctgccacttcttcccctgcttagcctcctggtcggagcttggttaaaactgggaaacggtcaagccacgagcatggtgcagctccagggcggccggttcctgatgggtacaaacagtccagactctagagatggagatggtcccgtacgggaagcgaccgtgaagccattcgccattgacatctttccagttacaaacaaggatttcagggatttcgtaagagaaaagaaataccgtaccgaagctgaaatgttcggctggtcttttgtgttcgaggactttgtcagtgatgaactgcggaacaaggccactcagcccatgaagtccgtgctgtggtggcttcccgtggagaaagctttctggcggcaaccggccgggcccgggagcggcattagagagcggctggaacatcccgtcctgcacgtcagctggaatgacgcgagggcctattgcgcctggcgcggcaagcgtctgccgaccgaggaagagtgggagttcgcagcccgagggggactcaaggggcaggtctacccttggggtaactggtttcagcctaaccggactaacctgtggcagggtaaattcccaaagggggataaggcggaggatggcttccatggcgtgagccccgtgaatgctttcccggcacagaataactatggctgggccactctacagattcagccacagacgacatcagtctccgccgtcctgcagactcaggcaggacggcagggaagctgcaagcagcccgggggggacaaggaaaagtctctgctgggctctctaagtttcccagggcacgtggccaacagcgcgatcccatctagcagagcctctgcttctggcaaaaacttcccttttcccgtctcccatccaagcgtcgccggcgcatcccaccagggacgaagaggtctgagtcttctctgctttggggagggcgcgcaatgtgttctgaccatggccggcggtcaagtgttcttgctcgaggctaaatactactag

SEQ ID NO: 47463 - DNA, 1077 bp, Artificial Sequence
  derived and/or modified sequence
atgagggcccacgcccagaggggccggggctgcaccaggagatctgctgctgtgctgatggcccggcacggcctgcccctgctgcccctgctgagcctgctggtgggcgcctggctgaagctgggcaatggccaggccacctccatggtgcagctgcagggcggccgcttcctgatgggcaccaacagcccagacagcagagatggagatggccctgtgcgggaggccaccgtgaagccctttgccatcgacatcttccctgtgaccaacaaggacttccgggactttgtgcgggagaagaagtacagaacagaggccgagatgtttggctggagctttgtgtttgaggactttgtgtctgatgagctgaggaacaaggccacccagcccatgaagtctgtgctgtggtggctgcctgtggagaaggccttctggaggcagcctgctggccctggcagcggcatccgggagcggctggagcaccctgtgctgcacgtgtcctggaatgatgcccgggcctactgtgcctggaggggcaagaggctgcccacagaggaggagtgggagtttgctgcccggggcggcctgaagggccaggtgtacccctggggcaactggttccagcccaacagaaccaacctgtggcagggcaagttccccaagggggacaaggccgaggatggcttccacggcgtgtcccctgtgaatgccttccctgcccagaacaactacggctgggccaccctgcagatccagccccagaccacctctgtgtctgctgtgctgcagacccaggccggccggcagggcagctgcaagcagcctggaggagacaaggagaagagcctgctgggcagcctgtccttccctggccacgtggccaacagcgccatccccagcagccgggccagcgccagcggcaagaacttccccttccctgtgagccaccccagcgtggccggggccagccaccagggcagaagaggcctgagcctgctgtgctttggagagggcgcccagtgtgtgctgaccatggccggcggccaggtgttcctgctggaggccaagtactactag

SEQ ID NO: 47464 - DNA, 1077 bp, Artificial Sequence
  derived and/or modified sequence
atgcgggcccacgcccagcggggccggggctgcacccggcggagcgcagccgtgctgatggccaggcacgggctgcctctgctaccgcttcttagcctccttgtgggggcctggttgaagctgggcaatggccaggccacctccatggtgcagctgcaggggggccgcttcctgatgggtactaattcaccggactcacgagatggcgacggccccgtgcgagaagccacagtcaagcccttcgcaattgacatttttcccgtgactaataaagactttagggattttgtgcgggagaagaagtaccggacagaggcggagatgtttgggtggagtttcgtgtttgaggacttcgtatccgatgaactccgaaacaaagctacacagccaatgaaatccgtcttgtggtggctacctgtcgagaaagctttttggcgtcagcccgcgggaccaggctctggcatccgcgagcggctggagcatcccgtgctgcacgtctcttggaacgatgcccgggcatactgcgcttggaggggtaagaggcttcctaccgaggaggagtgggagttcgcagccaggggcggcctgaaaggacaagtttacccttggggcaactggttccagcctaacagaacaaacctgtggcaggggaagttccccaagggggataaagcagaggacggcttccacggcgtgagcccagtgaatgcattcccagctcagaacaattacgggtgggccactttacaaatccagcctcagacaaccagcgtgagtgcagtactgcaaacacaagccggtcggcaagggagctgtaagcaacccggaggcgataaagagaagtctctgctaggcagcttgtctttccctggccacgtcgctaattccgctataccctctagcagggctagtgcctctggcaagaacttcccttttccggtgtcccaccccagtgtagccggggcctcccaccagggtagacgtggattaagcttgctctgtttcggcgagggtgcccagtgcgtgctcactatggctggcgggcaagtgtttctgctggaggccaagtattactag

SEQ ID NO: 47465 - DNA, 1077 bp, Artificial Sequence
  derived and/or modified sequence
atgcgtgctcacgcacagcggggtaggggttgtacgcgtcgcagtgcggctgtgttgatggccaggcatggcctgccactgctgccattgctgtcgctgctcgtgggtgcatggcttaaattaggtaatggccaggccacaagtatggtgcaattacagggaggcagatttcttatgggcactaattcgcccgacagtcgtgacggggatggacctgtcagagaggcaactgtgaagccttttgctattgacatttttcctgtaaccaacaaggactttagggacttcgtccgagaaaagaagtatcgtacagaagctgagatgttcgggtggagtttcgtgtttgaggacttcgtctctgacgagttgagaaacaaagcgactcagcctatgaaaagcgtgctgtggtggcttccagtggagaaagccttctggcgccagcctgccggtcctgggtccgggatccgggagagactggaacatcctgtcctgcatgtctcttggaacgacgccagggcctattgcgcttggcgtggcaagaggctgccaaccgaagaagaatgggagttcgccgctaggggcggtctgaagggacaggtgtatccctggggtaattggtttcagccgaatcgtaccaatttgtggcagggcaagttccccaaaggcgataaggctgaggatgggtttcacggggtgtcccccgttaatgcattccctgcccagaataactacggatgggccacactgcagatacaaccacagacaacctctgtcagcgccgttctgcagactcaggccggacggcaggggtcatgtaaacagccgggtggcgacaaggagaagagcctcctcggctctttgtcattccccggacatgtggctaattcggcaatcccaagctcccgggcttccgcctctggaaagaacttcccatttccggtctcccaccccagcgtagccggagccagccatcagggcagacgcggactgagcttgctgtgttttggggaaggcgcacagtgcgtgttgactatggctggcggacaggtctttctgctagaggccaaatactactag

SEQ ID NO: 47466 - DNA, 1876 bp, Artificial Sequence
  derived and/or modified sequence
atgagggcgcatgcgcagcggggccgtgggtgtacgcggcgcagcgcggcagtcctgatggcccggcatgggttaccgctgctgcccctgctgtcgctcctggtcggcgcgtggctcaagctaggaaatggacaggctactagcatggtccaactgcagggtgggagattcctgatgggaacaaattctccagacagcagagatggtgacgggcctgtgcgggaggcgacagtgaaaccctttgccatcgacatatttcctgtcaccaacaaagatttcagggattttgtcagggagaaaaagtatcggacagaagctgagatgtttggatggagctttgtctttgaggactttgtctctgatgagctgagaaacaaagccacccagccaatgaagtctgtactctggtggcttccagtggaaaaggcattttggaggcagcctgcaggtcctggctctggcatccgagagagactggagcacccagtgttacacgtgagctggaatgacgcccgtgcctactgtgcttggcggggaaaacgactgcccacggaggaagagtgggagtttgccgcccgagggggcttgaagggtcaagtttacccatgggggaactggttccagccaaaccgcaccaacctgtggcagggaaagttccccaagggagacaaagctgaggatggcttccatggagtctccccagtgaatgctttccccgcccagaacaactacggatgggcaacactccagattcagcctcagacaacctcggtttccgctgtgctgcagacgcaggccggccgccaggggagctgtaagcagccgggtggtgacaaggagaaaagccttctagggtcactgtcattccctggccatgttgcaaacagcgcaattccaagctcgagagcttcagcctcaggaaagaacttccccttccctgtctcccatccctctgtggcaggcgcctctcaccagggcaggagaggactcagcctcctgtgttttggagaaggggcccaatgtgtgttgacgatggctgggggccaggtgtttctgttagaggccaagtattattgacacaggattgcaaacacacaaacaattggaacagagcactctgaaaggccattttttaagcattttaaaatctattctctccccctttctccctggatgattcaggaagctgacattgtttcctcaaggcagaattttcctggttctgttttctcagccagttgctgtggaaggagaatgctttctttgtggcctcatctgtggtttcgtgtccctctgaaggaaactagtttccactgtgtaacaggcagacatgtaactatttaaagcacagttcagtcctaaaagggtctgggagaaccagatgatgtactaggtgaagcattgcattgtgggaatcacaaagcaaatagtactccagaaagacaaatatcagaagcttcctattctttttttttttttttttttttttgagacagggtctttctctgttgcccaggctagagtgcactggtgatcacggctcactctagccttgaattcctgggcccaagcaattctcccacctcagcctcctgagtagctgggactacaagtgtgcaccaccatgcctggctaattttttgaatttttgtagtgatgggatctcgctctgttgcccagggtggtctcgaactcctggcctcaagcgatcctcccacctcgacctcccaaagtgctgggattacaggtgtgagccacctcgcctgggcccccttctccatatgcctccaaaaacatgtccctggagagtagcctgctcccacactgtcactggatgtcatggggccaataaaatctcctgcaattgtgtatctca

SEQ ID NO: 47467 - protein, 662 aa, Artificial Sequence
  derived and/or modified sequence
MGDQSWLWNQAAPGVRSPVFACSVEKGNVPLVLSEHLAHSRDPGSGAVRFLISPEPWASAILGTSGLLASPVLPAALDAVTCQHLPQPSSGSRPISPRIGALCPLLLQPGTMSTSSLRRQMKNIVHNYSEAEIKVREATSNDPWGPSSSLMSEIADLTYNVVAFSEIMSMIWKRLNDHGKNWRHVYKAMTLMEYLIKTGSERVSQQCKENMYAVQTLKDFQYVDRDGKDQGVNVREKAKQLVALLRDEDRLREERAHALKTKEKLAQTATASSAAVGSGPPPEAEQAWPQSSGEEELQLQLALAMSKEEADQEERIRRGDDLRLQMAIEESKRETGGKEESSLMDLADVFTAPAPAPTTDPWGGPAPMAAAVPTAAPTSDPWGGPPVPPAADPWGGPAPTPASGDPWRPAAPAGPSVDPWGGTPAPAAGEGPTPDPWGSSDGGVPVSGPSASDPWTPAPAFSDPWGGSPAKPSTNGTTAAGGFDTEPDEFSDFDRLRTALPTSGSSAGELELLAGEVPARSPGAFDMSGVRGSLAEAVGSPPPAATPTPTPPTRKTPESFLGPNAALVDLDSLVSRPGPTPPGAKASNPFLPGGGPATGPSVTNPFQPAPPATLTLNQLRLSPVPPVPGAPPTYISPLGGGPGLPPMMPPGPPAPNTNPFLL

SEQ ID NO: 47468 - DNA, 1989 bp, Artificial Sequence
  derived and/or modified sequence
atgggggatcagagctggttgtggaaccaagccgcacctggggttcgtagtccggtgttcgcctgttcggtggagaaagggaacgtgccgttggtgctgagcgagcaccttgctcattccagggatcccgggtccggcgctgtgagatttctcatttcacccgagccatgggcaagtgcaatcctggggacctccggattactggccagccctgtgttaccagcagccctggatgcagttacgtgccagcaccttccacaacctagttctgggtcgcgccctataagccctaggatcggggcactatgtccccttctcctgcagcccggcaccatgagcacatcctcactaaggcgccaaatgaagaatatagtgcataactacagcgaggccgagatcaaggtgcgggaggcaaccagtaatgacccatggggaccctcaagcagtctgatgtccgaaatcgctgaccttacgtataacgtggtggctttctctgaaatcatgagcatgatatggaagcgactgaacgatcacggcaaaaattggcggcacgtgtacaaggctatgacactgatggaatacctgattaaaactgggtctgaaagagtttcccagcagtgtaaagaaaatatgtacgctgtccagaccctgaaggactttcagtacgtggaccgggatgggaaagaccaaggggttaatgtacgggagaaggctaaacagttggtggccctgctccgcgatgaggacaggctgcgagaagagcgggcgcatgccctcaagactaaagagaagctcgcacagacagcgactgccagctccgcagcagtaggctcaggcccacctcctgaggctgagcaggcatggccacagtcctctggcgaggaggagttacaactccagctggctcttgccatgagcaaggaggaggctgaccaagaagaacgtattcgcagaggtgatgatctgaggcttcaaatggccattgaagaaagcaagcgtgaaaccggagggaaagaggagagctccctcatggacttggcggacgtgttcacggctccagccccagcccccaccacagacccatggggtgggccggcgcctatggccgctgccgtgcccacagccgccccaacctctgatccatgggggggcccacccgtccccccagctgccgacccctgggggggacctgcccccacacctgccagtggcgacccatggcggcctgccgcacctgcgggaccatccgtggacccttgggggggaacgcctgcgccagcagctggagaaggaccaacgccagacccctggggcagttctgatggcggcgtccctgtaagcgggcctagcgcctctgatccttggactcctgcccccgcgttcagcgacccctggggcggatctccggccaaaccaagcacaaacggcacaactgctgctggtggctttgatactgaacccgacgaatttagtgactttgataggcttaggacagccctaccaacttccgggtccagcgcgggcgagctggaactccttgccggggaggtcccagcacgatcaccgggagcattcgacatgtccggggtcagagggtctctggccgaggcggtaggatcccctccaccagccgcaactccaacacccacccctcctacccgaaagacgcctgagtcttttctaggtccgaatgccgctctggtggatctggatagcttagtgtccagacctggccctactccacccggtgctaaggcatcaaatccatttttgccaggaggggggcctgcaaccggccccagtgtgaccaatcccttccagcccgccccacctgccaccctcactctcaatcagttgcgcttgtccccggtacctcctgtccccggagcaccccctacatatatctctccactaggaggaggcccaggactgcctcctatgatgccgccaggaccacctgcccctaacaccaacccttttctgttgtag

SEQ ID NO: 47469 - DNA, 1989 bp, Artificial Sequence
  derived and/or modified sequence
atgggagaccagagctggctgtggaaccaggccgcccctggggtgcgcagccctgtgtttgcctgcagcgtggagaagggaaatgtgcccctggtgctgtctgagcacctggcccacagccgggaccccggcagcggggctgtgcgcttcctgatcagccctgagccctgggccagcgccatcctgggcaccagcggcctgctggccagccctgtgctgcctgctgccctggatgctgtgacctgccagcacctgccccagcccagcagcggcagccggcccatcagccccagaattggagccctgtgccccctgctgctgcagcccggcaccatgagcaccagcagcctgcggcggcagatgaagaacatcgtgcacaactacagcgaggccgagatcaaggtgcgggaggccaccagcaatgacccctggggccccagcagcagcctgatgtctgaaattgctgacctgacctacaacgtggtggccttcagcgagatcatgtccatgatctggaagaggctgaatgaccacggcaagaactggaggcatgtgtacaaggccatgaccctgatggagtacctgatcaagacaggcagcgagcgggtgtcccagcagtgcaaggagaacatgtatgctgtgcagaccctgaaggacttccagtatgtggacagagatggcaaggaccagggcgtgaatgtgcgggagaaggccaagcagctggtggccctgctgagagatgaggaccggctgcgggaggagcgggcccacgccctgaagaccaaggagaagctggcccagacagccacagccagcagcgctgctgtgggcagcggccccccacctgaggccgagcaggcctggccccagagcagcggggaggaggagctgcagctgcagctggccctggccatgagcaaggaggaggccgaccaggaggagcgcatcagaagaggagatgacctgcggctgcagatggccatcgaggagagcaagcgggagactggaggcaaggaggagagcagcctgatggacctggctgatgtgttcaccgccccagccccagcccccaccacagacccctggggcggccctgcccccatggctgctgctgtgcccacagctgcccccaccagtgacccctggggcggcccccctgtgcccccagctgctgacccctggggcggccctgcccccaccccagccagcggggacccctggaggcctgctgccccagctggccccagcgtggacccctggggcggcaccccagccccagctgctggggagggccccaccccagacccctggggcagcagtgatggaggagtgcctgtgtctggccccagcgccagtgacccctggaccccagccccagccttcagtgacccctggggcggcagccctgccaagcccagcaccaacggcaccacagctgctgggggctttgacacagagccagatgagttcagtgactttgaccggctgaggacagccctgcccaccagcggcagcagcgctggggagctggagctgctggccggggaggtgcctgcccggagccctggggcctttgacatgtctggagtgcggggcagcctggccgaggccgtgggcagccccccacctgctgccacccccacccccaccccacccaccaggaagaccccagagagcttcctgggccccaatgctgccctggtggacctggacagcctggtgtccaggcctggccccaccccacctggggccaaggccagcaaccccttcctgcccggcggcggccctgccaccggccccagcgtgaccaaccccttccagcctgcccccccagccaccctgaccctgaaccagctgcggctgagccctgtgccccctgtgcctggggccccacccacctacatcagccccctgggcggcggccctggcctgccccccatgatgcctcctggccccccagcccccaacaccaaccccttcctgctgtag

SEQ ID NO: 47470 - DNA, 1989 bp, Artificial Sequence
  derived and/or modified sequence
atgggcgaccagagctggctgtggaaccaggccgcccccggcgtgagaagcccggtttttgcatgctcagtggagaagggtaacgtcccgctcgtcctcagcgagcacctggcccatagcagagatccggggagcggcgcagtccgctttctgatcagtccagaaccatgggcctctgccatactgggtacctcgggactgctcgcttcccccgtgctgccagccgcattggatgccgtcacttgccagcacctaccccagccctccagtggctctagaccgatttcgcccaggattggggctctgtgccctctcctgctgcagcctggaacaatgtctacatcttctttgcgccgccagatgaaaaacatcgtccataactacagtgaggccgagataaaggtcagagaggctaccagcaacgatccttggggcccatcaagttctttgatgtcagagatagcggacttgacctataatgtggtagcctttagcgaaattatgagtatgatctggaaaaggctcaacgatcacggcaagaactggcggcacgtgtacaaagcaatgacactgatggaatacttgatcaaaactggctccgaacgggtgtcacagcagtgtaaggaaaatatgtacgcagtccagactctgaaagacttccagtacgtggatcgtgacggtaaagaccagggggtaaacgtcagagagaaggctaaacagctcgtggcccttttgcgagacgaggaccgattacgggaagagcgcgctcacgccttgaaaactaaggagaagctggcccaaactgcgaccgcgtcttcagctgccgtcggaagcggccccccccctgaggctgagcaggcatggccccaaagctctggtgaagaggagctccagttacagcttgctctcgccatgagcaaggaagaggcagatcaggaagagaggattagacgcggtgatgacctgagactccagatggccattgaagagagcaaacgcgaaaccggagggaaagaggaatcatctctgatggatctggctgatgtctttaccgctcctgccccagctcccacgacggatccttggggtggccccgctcctatggcagctgcagtgccgaccgccgcccccacatccgacccctggggtggccctcctgttcccccagccgccgacccatggggcggaccagctccaacacctgcgtcaggggatccctggaggccagcggctcccgccggcccctccgtggatccctggggtgggaccccagcccccgccgcgggtgaggggccgactcccgatccatgggggtctagtgacggtggggtgcctgtgagtggcccctctgcctccgacccttggaccccagctcccgcattcagcgacccatggggcgggtcccctgctaagccctctacaaatgggacaaccgcagccggcggatttgacactgaaccagacgaattttccgactttgatcgactgcgtacagcccttcccaccagcggatctagcgccggcgagttagagctactcgccggggaggtaccagcaagatctcccggcgcctttgacatgtccggagtgaggggttccctcgctgaggctgtaggctctccaccgcccgccgccactcccacgcctactccccccactcggaagacacctgaatctttcctggggcctaacgcagcgcttgtggatctggactcactggtgagtcgcccaggtcccactccccctggcgccaaagcaagcaacccatttctacccgggggaggccctgcaaccgggccctccgtcaccaaccccttccagcctgcgcctccagccaccctgaccctgaatcagctacgtttatcaccggtgccccccgtcccaggcgccccccccacttatattagcccactgggaggcgggcctggcctcccccccatgatgccccctgggcctcccgccccgaataccaacccattccttctatag

SEQ ID NO: 47471 - DNA, 1989 bp, Artificial Sequence
  derived and/or modified sequence
atgggtgatcaaagctggctctggaatcaggccgctcctggtgtgcggagtcctgtgtttgcctgcagcgtagaaaagggcaatgtgcctcttgtgttaagcgagcacctggcccacagtcgagacccaggatccggtgctgtgagattccttatcagcccagaaccttgggctagtgctattctaggtaccagtggactgctagcaagtccagtccttcctgcagctctggatgctgtcacgtgtcagcaccttccccaaccctcgagtggcagcagaccaatatcccctcggattggagcactctgtcctctcctgctgcagccaggcaccatgagcacctccagcctgcggcgacagatgaagaatattgtgcacaattatagtgaggcagaaataaaagtgcgagaagccacgagcaatgacccctggggaccatcctcaagtctgatgtctgagatcgctgacctgacatataacgttgtggcttttagcgagatcatgtctatgatctggaaacgcctgaatgatcatggcaaaaactggcgtcatgtgtacaaagcaatgaccctcatggagtacctgatcaaaacggggagcgagagagtgagtcagcagtgcaaagaaaacatgtatgctgtgcaaacactcaaggactttcaatacgtggatcgcgatggaaaagaccagggagttaacgtcagggagaaagctaaacagcttgtggctcttcttagggacgaagatagactgagggaggaacgggctcacgctctcaaaaccaaggaaaagcttgcccagacagccaccgctagttctgcagccgtgggcagcggtcctcctccagaggctgaacaggcctggccccaatccagtggagaggaagaattgcagctgcagctcgccctcgccatgagtaaggaggaggcggaccaggaggagcgaatccgacggggagatgacctacgactacagatggccatcgaagagtccaaaagggaaactggaggtaaagaagagagttccctcatggacctggccgacgtgttcacagctcccgcacccgctcctaccacagatccatggggcggtcccgctcccatggctgccgcagtgccaaccgcagcccctactagcgacccatggggaggaccccctgtgcctccagctgccgacccttggggcggtcctgccccaacaccggctagcggtgatccttggagacctgcagcccctgcaggcccaagcgtagatccgtggggcggaacgcccgctccggctgctggggaaggtccaactccggacccatgggggtcatctgatggaggggtaccagttagtggtcccagcgcaagtgacccctggactcccgcaccagccttctcagatccctgggggggatccccagccaaaccttcaaccaatggaactactgccgctgggggattcgatacagaacctgacgagttcagcgacttcgacagactgcggacagcccttcccacttcaggaagctccgccggagagctcgaactgctggctggcgaggttcctgccagatctcccggagcattcgacatgtcgggtgtgcgcggttcgctggcagaggcggtcggttccccaccgcctgctgctactccaactccaaccccgcctactagaaagacaccagagtcctttctgggccctaatgcagccctggtggacctggactccctggtgagtcggccaggtccgaccccaccaggtgccaaagctagtaatcctttccttccaggcggtggccctgctacagggcctagtgtgaccaacccattccaacccgcaccccctgccaccctgacactcaaccaactgcgcctttctcctgtacctcccgtgcctggagcaccgccaacttacatcagcccactgggcggaggtcccggactgcctcctatgatgccgcctggacctcccgcacccaataccaacccttttctgctgtag

SEQ ID NO: 47472 - DNA, 1989 bp, Artificial Sequence
  derived and/or modified sequence
atgggcgaccagagctggctgtggaaccaggccgcccccggcgtgagaagccccgtgttcgcctgcagcgtggagaagggcaacgtgcccctggtgctgagcgagcacctggcccacagcagagaccccggcagcggcgccgtgagattcctgatcagccccgagccctgggccagcgccatcctgggcaccagcggcctgctggccagccccgtgctgcccgccgccctggacgccgtgacctgccagcacctgccccagcccagcagcggcagcagacccatcagccccagaatcggcgccctgtgccccctgctgctgcagcccggcaccatgagcaccagcagcctgagaagacagatgaagaacatcgtgcacaactacagcgaggccgagatcaaggtgagagaggccaccagcaacgacccctggggccccagcagcagcctgatgagcgagatcgccgacctgacctacaacgtggtggccttcagcgagatcatgagcatgatctggaagagactgaacgaccacggcaagaactggagacacgtgtacaaggccatgaccctgatggagtacctgatcaagaccggcagcgagagagtgagccagcagtgcaaggagaacatgtacgccgtgcagaccctgaaggacttccagtacgtggacagagacggcaaggaccagggcgtgaacgtgagagagaaggccaagcagctggtggccctgctgagagacgaggacagactgagagaggagagagcccacgccctgaagaccaaggagaagctggcccagaccgccaccgccagcagcgccgccgtgggcagcggccccccccccgaggccgagcaggcctggccccagagcagcggcgaggaggagctgcagctgcagctggccctggccatgagcaaggaggaggccgaccaggaggagagaatcagaagaggcgacgacctgagactgcagatggccatcgaggagagcaagagagagaccggcggcaaggaggagagcagcctgatggacctggccgacgtgttcaccgcccccgcccccgcccccaccaccgacccctggggcggccccgcccccatggccgccgccgtgcccaccgccgcccccaccagcgacccctggggcggcccccccgtgccccccgccgccgacccctggggcggccccgcccccacccccgccagcggcgacccctggagacccgccgcccccgccggccccagcgtggacccctggggcggcacccccgcccccgccgccggcgagggccccacccccgacccctggggcagcagcgacggcggcgtgcccgtgagcggccccagcgccagcgacccctggacccccgcccccgccttcagcgacccctggggcggcagccccgccaagcccagcaccaacggcaccaccgccgccggcggcttcgacaccgagcccgacgagttcagcgacttcgacagactgagaaccgccctgcccaccagcggcagcagcgccggcgagctggagctgctggccggcgaggtgcccgccagaagccccggcgccttcgacatgagcggcgtgagaggcagcctggccgaggccgtgggcagccccccccccgccgccacccccacccccaccccccccaccagaaagacccccgagagcttcctgggccccaacgccgccctggtggacctggacagcctggtgagcagacccggccccaccccccccggcgccaaggccagcaaccccttcctgcccggcggcggccccgccaccggccccagcgtgaccaaccccttccagcccgccccccccgccaccctgaccctgaaccagctgagactgagccccgtgccccccgtgcccggcgccccccccacctacatcagccccctgggcggcggccccggcctgccccccatgatgccccccggcccccccgcccccaacaccaaccccttcctgctgtag

SEQ ID NO: 47473 - DNA, 2405 bp, Artificial Sequence
  derived and/or modified sequence
gcaatttccgcttccggtccgtcgcctccttctgttgcttcccgtctcctcggcggctcccctcccccgcccggctctccgcgccccttctgggcggcggggcggcggagccgtcggcgtgcggccctccttgcgttcgtgcgtgcgcccgtggcccggcgcacgtcccgcgacaccgaggccgagcggggcagggggctgaccgccatgaccccccagagcccggcgtgagggggccgagatgcggtgacctgccagcacctgccgcagccttcgtccgggagtcgccccatctctccacgcatcggggccctgtgccccttgctgctgcagccgggcaccatgtcgacctcgtccttgaggcgccagatgaagaacatcgtccacaactactcagaggcggagatcaaggttcgagaggccacgagcaatgacccctggggcccatccagctccctcatgtcagagattgccgacctcacctacaacgttgtcgccttctcggagatcatgagcatgatctggaagcggctcaatgaccatggcaagaactggcgtcacgtttacaaggccatgacgctgatggagtacctcatcaagaccggctcggagcgcgtgtcgcagcagtgcaaggagaacatgtacgccgtgcagacgctgaaggacttccagtacgtggaccgcgacggcaaggaccagggcgtgaacgtgcgtgagaaagctaagcagctggtggccctgctgcgcgacgaggaccggctgcgggaagagcgggcgcacgcgctcaagaccaaggaaaagctggcacagaccgccacggcctcatcagcagctgtgggctcaggcccccctcccgaggcggagcaggcgtggccgcagagcagcggggaggaggagctgcagctccagctggccctggccatgagcaaggaggaggccgaccaggaggagcggatccgtcgcggggatgacctgcggctgcagatggcaatcgaggagagcaagagggagactgggggcaaggaggagtcgtccctcatggaccttgctgacgtcttcacggccccagctcctgccccgaccacagacccctgggggggcccagcacccatggctgctgccgtccccacggctgcccccacctcggacccctggggcggcccccctgtccctccagctgctgatccctggggaggtccagcccccacgccggcctctggggacccctggaggcctgctgcccctgcaggaccctcagttgacccttggggtgggaccccagcccctgcagctggggaggggcccacgcctgatccatggggaagttccgatggtggggtcccggtcagtgggccctcagcctccgatccctggacaccggccccggccttctcagatccctggggagggtcacctgccaagcccagcaccaatggcacaacagccgggggattcgacacggagcccgacgagttctctgactttgaccgactccgcacggcactgccgacctccgggagcagcgcaggagagctggagctgctggcaggagaggtgccggcccgaagccctggggcgtttgacatgagtggggtcaggggatctctggctgaggctgtgggcagccccccacctgcagccacaccaactcccacgccccccacccggaagacgccggagtcattcctggggcccaatgcagccctcgtcgacctggactcgctggtgagccggccgggccccacgccgcctggagccaaggcctccaaccccttcctgccaggcggaggcccagccactggcccttccgtcaccaaccccttccagcccgcgcctcccgcgacgctcaccctgaaccagctccgtctcagtcctgtgcctcccgtccctggagcgccacccacgtacatctctccccttggcgggggccctggcctgccccccatgatgcccccgggccccccggcccccaacactaatcccttcctcctataatccagggcggaagggggcctggctccatccggctgccccattccggctccctgggagatcagtgttgtgagtgcatgtgaaatgggggatccccacccccagtgcccttccccttcctggggcccactcacactacaccctcttcctttcccaccccacctccccggagagaaactggacatggggcctggggaggggagctggccagaggaggacccctttcccgtggcattagaagggggaggggtggctggggcccccacccattccccctccctccaaactcccaacccccagtcagtgtttgagcctcctcgttcccctcacgcacccgctcacgcaccctcggtgaatccttggtgatgattttggcaactttgggaataaatggcaattcccacgggcttggc

SEQ ID NO: 47474 - DNA, 2946 bp, Artificial Sequence
  derived and/or modified sequence
aattctttcatttcagagttgagcaaactgtgtctcaaggaggtgtgcgctgcaggtagctgatgtggccaggatttgaacccacattttatattctttgccattagattccatttttcttatctcttatttctcagcgccaggtctctttttgtttctgggcctctttcttccttggcctcctgcctccctgtcttcccatgttcttgtatctgctgctgcctgtgtttttctcattgtgtctctgcctagctccctctgcccaggtttctatgtgtctctttctgtcagaactgtcttctatttcttctcagtccccttctctgcatttgttacatcatctcttcatcttaatgtattaggctggggctgttttgggactccagagagttactttttaactagctacatctgtcttcaggtgcctggctttctggcctgaggtggaagcagaggccagcctctctccgtcatccctatctcccctgggcttacatcatggcggggctttgaaaatctccctctgtggcttcttggagccgcatagatgggtgatcagagctggctctggaaccaggctgctccaggagtaaggagcccagtctttgcatgcagtgttgaaaaaggtaatgtccctcttgtgctgagcgagcacctggcacacagcagggacccaggcagtggggctgttaggttccttatctctcctgagccttgggcttccgctatccttgggacgtctggtcttctggcttccccggttcttcctgccgccctggatgcggtgacctgccagcacctgccgcagccttcgtccgggagtcgccccatctctccacgcatcggggccctgtgccccttgctgctgcagccgggcaccatgtcgacctcgtccttgaggcgccagatgaagaacatcgtccacaactactcagaggcggagatcaaggttcgagaggccacgagcaatgacccctggggcccatccagctccctcatgtcagagattgccgacctcacctacaacgttgtcgccttctcggagatcatgagcatgatctggaagcggctcaatgaccatggcaagaactggcgtcacgtttacaaggccatgacgctgatggagtacctcatcaagaccggctcggagcgcgtgtcgcagcagtgcaaggagaacatgtacgccgtgcagacgctgaaggacttccagtacgtggaccgcgacggcaaggaccagggcgtgaacgtgcgtgagaaagctaagcagctggtggccctgctgcgcgacgaggaccggctgcgggaagagcgggcgcacgcgctcaagaccaaggaaaagctggcacagaccgccacggcctcatcagcagctgtgggctcaggcccccctcccgaggcggagcaggcgtggccgcagagcagcggggaggaggagctgcagctccagctggccctggccatgagcaaggaggaggccgaccaggaggagcggatccgtcgcggggatgacctgcggctgcagatggcaatcgaggagagcaagagggagactgggggcaaggaggagtcgtccctcatggaccttgctgacgtcttcacggccccagctcctgccccgaccacagacccctgggggggcccagcacccatggctgctgccgtccccacggctgcccccacctcggacccctggggcggcccccctgtccctccagctgctgatccctggggaggtccagcccccacgccggcctctggggacccctggaggcctgctgcccctgcaggaccctcagttgacccttggggtgggaccccagcccctgcagctggggaggggcccacgcctgatccatggggaagttccgatggtggggtcccggtcagtgggccctcagcctccgatccctggacaccggccccggccttctcagatccctggggagggtcacctgccaagcccagcaccaatggcacaacagcagccgggggattcgacacggagcccgacgagttctctgactttgaccgactccgcacggcactgccgacctccgggagcagcgcaggagagctggagctgctggcaggagaggtgccggcccgaagccctggggcgtttgacatgagtggggtcaggggatctctggctgaggctgtgggcagccccccacctgcagccacaccaactcccacgccccccacccggaagacgccggagtcattcctggggcccaatgcagccctcgtcgacctggactcgctggtgagccggccgggccccacgccgcctggagccaaggcctccaaccccttcctgccaggcggaggcccagccactggcccttccgtcaccaaccccttccagcccgcgcctcccgcgacgctcaccctgaaccagctccgtctcagtcctgtgcctcccgtccctggagcgccacccacgtacatctctccccttggcgggggccctggcctgccccccatgatgcccccgggccccccggcccccaacactaatcccttcctcctataatccagggcggaagggggcctggctccatccggctgccccattccggctccctgggagatcagtgttgtgagtgcatgtgaaatgggggatccccacccccagtgcccttccccttcctggggcccactcacactacaccctcttcctttcccaccccacctccccggagagaaactggacatggggcctggggaggggagctggccagaggaggacccctttcccgtggcattagaagggggaggggtggctggggcccccacccattccccctccctccaaactcccaacccccagtcagtgtttgagcctcctcgttcccctcacgcacccgctcacgcaccctcggtgaatccttggtgatgattttggcaactttgggaataaatggcaattcccacgggcttggc

SEQ ID NO: 47475 - protein, 1036 aa, Artificial Sequence
  derived and/or modified sequence
MSLKNEPRVNTSALQKIAADMSNIIENLDTRELHFEGEEVDYDVSPSDPKIQEVYIPFSAIYNTQGFKEPNIQTYLSGCPIKAQVLEVERFTSTTRVPSINLYTIELTHGEFKWQVKRKFKHFQEFHRELLKYKAFIRIPIPTRRHTFRRQNVREEPREMPSLPRSSENMIREEQFLGRRKQLEDYLTKILKMPMYRNYHATTEFLDISQLSFIHDLGPKGIEGMIMKRSGGHRIPGLNCCGQGRACYRWSKRWLIVKDSFLLYMKPDSGAIAFVLLVDKEFKIKVGKKETETKYGIRIDNLSRTLILKCNSYRHARWWGGAIEEFIQKHGTNFLKDHRFGSYAAIQENALAKWYVNAKGYFEDVANAMEEANEEIFITDWWLSPEIFLKRPVVEGNRWRLDCILKRKAQQGVRIFIMLYKEVELALGINSEYTKRTLMRLHPNIKVMRHPDHVSSTVYLWAHHEKLVIIDQSVAFVGGIDLAYGRWDDNEHRLTDVGSVKRVTSGPSLGSLPPAAMESMESLRLKDKNEPVQNLPIQKSIDDVDSKLKGIGKPRKFSKFSLYKQLHRHHLHDADSISSIDSTSNTGSIRSLQTGVGELHGETRFWHGKDYCNFVFKDWVQLDKPFADFIDRYSTPRMPWHDIASAVHGKAARDVARHFIQRWNFTKIMKSKYRSLSYPFLLPKSQTTAHELRYQVPGSVHANVQLLRSAADWSAGIKYHEESIHAAYVHVIENSRHYIYIENQFFISCADDKVVFNKIGDAIAQRILKAHRENQKYRVYVVIPLLPGFEGDISTGGGNALQAIMHFNYRTMCRGENSILGQLKAELGNQWINYISFCGLRTHAELEGNLVTELIYVHSKLLIADDNTVIIGSANINDRSMLGKRDSEMAVIVQDTETVPSVMDGKEYQAGRFARGLRLQCFRVVLGYLDDPSEDIQDPVSDKFFKEVWVSTAARNATIYDKVFRCLPNDEVHNLIQLRDFINKPVLAKEDPIRAEEELKKIRGFLVQFPFYFLSEESLLPSVGTKEAIVPMEVWT

SEQ ID NO: 47476 - DNA, 1794 bp, Artificial Sequence
  derived and/or modified sequence
atgagcctgaagaacgagcccagagtgaacaccagcgccctgcagaagatcgccgccgacatgagcaacatcatcgagaacctggacaccagagagctgcacttcgagggcgaggaggtggactacgacgtgagccccagcgaccccaagatccaggaggtgtacatccccttcagcgccatctacaacacccagggcttcaaggagcccaacatccagacctacctgagcggctgccccatcaaggcccaggtgctggaggtggagagattcaccagcaccaccagagtgcccagcatcaacctgtacaccatcgagctgacccacggcgagttcaagtggcaggtgaagagaaagttcaagcacttccaggagttccacagagagctgctgaagtacaaggccttcatcagaatccccatccccaccagaagacacaccttcagaagacagaacgtgagagaggagcccagagagatgcccagcctgcccagaagcagcgagaacatgatcagagaggagcagttcctgggcagaagaaagcagctggaggactacctgaccaagatcctgaagatgcccatgtacagaaactaccacgccaccaccgagttcctggacatcagccagctgagcttcatccacgacctgggccccaagggcatcgagggcatgatcatgaagagaagcggcggccacagaatccccggcctgaactgctgcggccagggcagagcctgctacagatggagcaagagatggctgatcgtgaaggacagcttcctgctgtacatgaagcccgacagcggcgccatcgccttcgtgctgctggtggacaaggagttcaagatcaaggtgggcaagaaggagaccgagaccaagtacggcatcagaatcgacaacctgagcagaaccctgatcctgaagtgcaacagctacagacacgccagatggtggggcggcgccatcgaggagttcatccagaagcacggcaccaacttcctgaaggaccacagattcggcagctacgccgccatccaggagaacgccctggccaagtggtacgtgaacgccaagggctacttcgaggacgtggccaacgccatggaggaggccaacgaggagatcttcatcaccgactggtggctgagccccgagatcttcctgaagagacccgtggtggagggcaacagatggagactggactgcatcctgaagagaaaggcccagcagggcgtgagaatcttcatcatgctgtacaaggaggtggagctggccctgggcatcaacagcgagtacaccaagagaaccctgatgagactgcaccccaacatcaaggtgatgagacaccccgaccacgtgagcagcaccgtgtacctgtgggcccaccacgagaagctggtgatcatcgaccagagcgtggccttcgtgggcggcatcgacctggcctacggcagatgggacgacaacgagcacagactgaccgacgtgggcagcgtgaagagagtgaccagcggccccagcctgggcagcctgcccatccccggccccagcgtggtgtacagacaggtgtgggagagctgcatgggcaagcccgacagcggcatggagagaaccaccgccatcagcagcagcaagaccggcttcaacctgatcaacctgctgctgatcagcctgaccggcacccccagacccggctgccccggcatgaccctgcccctgcagagcaccggcagaagactggtgatgtggcacgtgaccagcagcagcgccggcaccagccagaagctgtag

SEQ ID NO: 47477 - DNA, 3111 bp, Artificial Sequence
  derived and/or modified sequence
atgagcctgaagaacgagcccagagtgaacaccagcgccctgcagaagatcgccgccgacatgagcaacatcatcgagaacctggacaccagagagctgcacttcgagggcgaggaggtggactacgacgtgagccccagcgaccccaagatccaggaggtgtacatccccttcagcgccatctacaacacccagggcttcaaggagcccaacatccagacctacctgagcggctgccccatcaaggcccaggtgctggaggtggagagattcaccagcaccaccagagtgcccagcatcaacctgtacaccatcgagctgacccacggcgagttcaagtggcaggtgaagagaaagttcaagcacttccaggagttccacagagagctgctgaagtacaaggccttcatcagaatccccatccccaccagaagacacaccttcagaagacagaacgtgagagaggagcccagagagatgcccagcctgcccagaagcagcgagaacatgatcagagaggagcagttcctgggcagaagaaagcagctggaggactacctgaccaagatcctgaagatgcccatgtacagaaactaccacgccaccaccgagttcctggacatcagccagctgagcttcatccacgacctgggccccaagggcatcgagggcatgatcatgaagagaagcggcggccacagaatccccggcctgaactgctgcggccagggcagagcctgctacagatggagcaagagatggctgatcgtgaaggacagcttcctgctgtacatgaagcccgacagcggcgccatcgccttcgtgctgctggtggacaaggagttcaagatcaaggtgggcaagaaggagaccgagaccaagtacggcatcagaatcgacaacctgagcagaaccctgatcctgaagtgcaacagctacagacacgccagatggtggggcggcgccatcgaggagttcatccagaagcacggcaccaacttcctgaaggaccacagattcggcagctacgccgccatccaggagaacgccctggccaagtggtacgtgaacgccaagggctacttcgaggacgtggccaacgccatggaggaggccaacgaggagatcttcatcaccgactggtggctgagccccgagatcttcctgaagagacccgtggtggagggcaacagatggagactggactgcatcctgaagagaaaggcccagcagggcgtgagaatcttcatcatgctgtacaaggaggtggagctggccctgggcatcaacagcgagtacaccaagagaaccctgatgagactgcaccccaacatcaaggtgatgagacaccccgaccacgtgagcagcaccgtgtacctgtgggcccaccacgagaagctggtgatcatcgaccagagcgtggccttcgtgggcggcatcgacctggcctacggcagatgggacgacaacgagcacagactgaccgacgtgggcagcgtgaagagagtgaccagcggccccagcctgggcagcctgccccccgccgccatggagagcatggagagcctgagactgaaggacaagaacgagcccgtgcagaacctgcccatccagaagagcatcgacgacgtggacagcaagctgaagggcatcggcaagcccagaaagttcagcaagttcagcctgtacaagcagctgcacagacaccacctgcacgacgccgacagcatcagcagcatcgacagcaccagcaacaccggcagcatcagaagcctgcagaccggcgtgggcgagctgcacggcgagaccagattctggcacggcaaggactactgcaacttcgtgttcaaggactgggtgcagctggacaagcccttcgccgacttcatcgacagatacagcacccccagaatgccctggcacgacatcgccagcgccgtgcacggcaaggccgccagagacgtggccagacacttcatccagagatggaacttcaccaagatcatgaagagcaagtacagaagcctgagctaccccttcctgctgcccaagagccagaccaccgcccacgagctgagataccaggtgcccggcagcgtgcacgccaacgtgcagctgctgagaagcgccgccgactggagcgccggcatcaagtaccacgaggagagcatccacgccgcctacgtgcacgtgatcgagaacagcagacactacatctacatcgagaaccagttcttcatcagctgcgccgacgacaaggtggtgttcaacaagatcggcgacgccatcgcccagagaatcctgaaggcccacagagagaaccagaagtacagagtgtacgtggtgatccccctgctgcccggcttcgagggcgacatcagcaccggcggcggcaacgccctgcaggccatcatgcacttcaactacagaaccatgtgcagaggcgagaacagcatcctgggccagctgaaggccgagctgggcaaccagtggatcaactacatcagcttctgcggcctgagaacccacgccgagctggagggcaacctggtgaccgagctgatctacgtgcacagcaagctgctgatcgccgacgacaacaccgtgatcatcggcagcgccaacatcaacgacagaagcatgctgggcaagagagacagcgagatggccgtgatcgtgcaggacaccgagaccgtgcccagcgtgatggacggcaaggagtaccaggccggcagattcgccagaggcctgagactgcagtgcttcagagtggtgctgggctacctggacgaccccagcgaggacatccaggaccccgtgagcgacaagttcttcaaggaggtgtgggtgagcaccgccgccagaaacgccaccatctacgacaaggtgttcagatgcctgcccaacgacgaggtgcacaacctgatccagctgagagacttcatcaacaagcccgtgctggccaaggaggaccccatcagagccgaggaggagctgaagaagatcagaggcttcctggtgcagttccccttctacttcctgagcgaggagagcctgctgcccagcgtgggcaccaaggaggccatcgtgcccatggaggtgtggacctag

SEQ ID NO: 47478 - DNA, 1794 bp, Artificial Sequence
  derived and/or modified sequence
atgtctttaaagaatgagcctagggtgaacacatctgctctgcagaaaatcgccgcggatatgagtaatatcattgaaaatttggacactcgcgagttacatttcgagggggaagaggttgattacgatgtgagcccctcagatcccaagatccaggaagtctacattcctttcagtgctatctataacacccaggggttcaaagaaccaaatattcaaacttatttatccggctgtcctattaaggcccaggtcctggaagtggagaggttcaccagcactactcgtgtgccatccataaatttatacacgattgaactcactcacggtgagtttaagtggcaggtgaagaggaagttcaagcattttcaggaatttcacagggaattactcaagtacaaagcgttcatcaggatacctatccctacacggcgtcacacattccggcggcagaatgtgcgcgaagagccacgcgagatgcctagccttccacggtcatctgaaaacatgatccgggaagaacaatttttgggcaggaggaaacaactggaagactatctcactaaaattctgaaaatgccaatgtatcgcaattaccacgccaccaccgagtttcttgacatatcccagctgtctttcattcacgacctgggcccaaagggaattgaaggaatgatcatgaagcggagcgggggccaccggatccccggacttaattgttgcggacaggggcgtgcatgttacaggtggtctaaaagatggttgatcgtgaaggactcattcctcctgtatatgaagcctgactccggcgcgatagcgtttgttctgctggtggacaaagagttcaagataaaagtaggaaagaaagagactgagacaaaatatgggatacggatcgacaatctgtccaggacactgattctgaagtgcaattcataccggcatgccagatggtggggcggagccattgaagagttcatacaaaagcacggtacgaactttcttaaagaccaccgatttggatcttacgctgcaatacaagagaacgcacttgctaagtggtacgtcaatgccaagggatattttgaagacgtggcaaatgcaatggaggaagccaatgaagaaatctttataaccgattggtggttgtccccggagatttttctcaagcgaccggtggtggagggtaacaggtggcggctcgattgcattttaaagagaaaagctcagcagggcgtccgcattttcattatgttgtacaaagaggttgagttagctctgggcatcaattcagagtatactaaacgtaccttaatgcgtctgcatcctaacattaaggtcatgagacatccagaccacgtttcctccacagtgtatctttgggcccaccacgagaaactagtgataatcgatcagtctgtcgccttcgtgggagggatagatcttgcatatggtcggtgggatgacaacgaacatagactgacagacgtcggctctgtaaagcgcgtgacctcaggtcccagcctgggctccctgccgatacccggacccagtgttgtgtataggcaggtttgggagagctgtatggggaagcctgatagtggaatggaacggacaacagccattagtagtagtaagacaggttttaaccttatcaatctgttgctcatcagcctcactggaacccccagacctggctgccctgggatgaccctgcctctccagtccactggaaggcgcctggtaatgtggcacgtcactagctcttccgccgggacctcccagaaattgtag

SEQ ID NO: 47479 - DNA, 3111 bp, Artificial Sequence
  derived and/or modified sequence
atgtcactcaagaacgagcccagggtgaatacctcagctctgcaaaaaatcgctgcagatatgagcaatattattgagaatctagacacccgagaactgcatttcgagggtgaggaggtggactacgacgtgtctcctagcgacccaaaaattcaggaggtctatatcccattctccgccatttataatacacaggggttcaaggagccgaacattcaaacctacctttctggctgcccaatcaaggctcaagttcttgaagtggagaggttcacaagcactacacgcgtccccagtattaatctatacacaatcgagctcactcatggagagttcaagtggcaagtgaagagaaagtttaaacattttcaggagtttcaccgcgaattgctgaagtataaggcgttcatcaggattccgatcccaacccgaagacacaccttccggcggcagaacgttcgtgaggagcctcgggagatgccttctctccctcgcagctccgagaatatgatcagagaggaacagtttctcggtcgcaggaagcagttggaagactaccttaccaagattctcaagatgcctatgtaccggaactaccatgcgactacagagtttttggacatcagccagctgagctttatccatgatcttggccctaagggaatcgaagggatgatcatgaagcgctccggggggcacaggatacccgggcttaactgttgcggtcaagggcgggcctgctaccgttggagtaaaaggtggttgatagtaaaggactccttcttactttacatgaagcctgatagcggcgcgatagcgtttgtattgcttgtggataaggagtttaagataaaagtgggaaagaaggaaacagagacaaaatacggtattaggatcgataacctgtccaggactctgattctgaaatgtaactcctaccgacacgcccgctggtgggggggggccatcgaagagttcatccaaaaacatgggacgaactttctcaaggaccatcggttcgggagctacgccgcgatccaagaaaatgccctggcgaagtggtacgtcaacgccaagggctatttcgaagatgtagcaaacgctatggaggaggctaacgaagaaatctttattactgattggtggttgagccccgaaatctttttaaaacgccctgtcgtagaggggaacaggtggaggctggattgcatactgaagcgaaaagcacagcagggagtccgcattttcatcatgctttacaaggaggttgaacttgccctcggcatcaattcggaatacacgaaacggactctgatgcgcctccacccaaacatcaaagtaatgcggcaccccgaccacgtgagtagtactgtctacttgtgggcccaccacgaaaagctcgtcatcatcgatcagtctgtcgccttcgtgggcggcatagatctagcctatgggaggtgggatgacaacgagcatcgcctgactgatgttggcagcgtcaagagagtcacgtccgggccttctttgggatccctgccgcctgcagccatggaatccatggagtcactccgcctcaaagacaagaatgagcccgtgcaaaatttgcccatccaaaaatcaattgacgatgtcgactctaagcttaaaggaattggtaagcccagaaaattttcaaaattttccctgtacaagcaactgcaccgccaccatctacatgatgccgatagtatttcatccatcgatagtacctccaatacgggctcgattcgtagccttcagacaggggtgggcgagctgcacggggaaacccgattctggcacggcaaggactattgtaactttgttttcaaagattgggtgcaactagacaagccgttcgccgatttcattgacaggtattctaccccacggatgccctggcacgacattgcttctgccgtgcacggaaaggctgcacgcgatgtggctagacattttatccagagatggaacttcacaaagattatgaagtccaaatacaggtctttgtcttacccttttttgcttcccaagagccagactacagcccacgagctacgataccaggtaccaggatcggtgcatgccaatgtgcagctgctcagatcagcggcggactggtcagctgggattaaataccatgaagaaagtatccacgcagcctacgttcacgtcatagaaaattctcgccactatatttatattgagaatcaattttttatatcgtgtgctgatgacaaggtcgtctttaataagatcggagatgctatcgctcagagaatactcaaggcccacagggaaaaccagaagtatcgggtgtacgtggtgatacccctgcttcctggattcgagggcgatatctctacaggcggcggtaacgcccttcaggctatcatgcatttcaactatagaacaatgtgccgaggggaaaactccatcctggggcaactgaaggccgagctgggaaaccagtggatcaattacatctctttctgtggcctgcgcacccatgctgaattggagggaaatctcgtgactgagctgatttacgtccatagcaaactcctgatcgccgacgataacacagtgattatcgggtccgccaacatcaatgatcgctctatgctcggaaagcgggactccgaaatggccgtgattgtgcaggatacagagaccgtgccatcggtgatggatggcaaagagtaccaggcgggccggtttgcccgcggtctgaggttgcaatgtttccgggttgtgctgggatacctcgatgatccttccgaggacatccaagatccagtcagtgacaagttttttaaggaggtgtgggtatcaaccgctgcacgcaatgcaactatatacgacaaggtattccggtgcctgcccaatgatgaggtgcacaatctgatccagctgcgcgactttatcaataaaccagtcttggcgaaggaggatcccatcagggccgaggaggaactgaagaaaatcagggggtttctcgtccagttcccattttatttcttatcagaggaatccctcttaccatccgtcgggaccaaagaggctatcgtgcccatggaggtgtggacatag

SEQ ID NO: 47480 - DNA, 1794 bp, Artificial Sequence
  derived and/or modified sequence
atgagcctgaagaatgagccccgggtgaacaccagcgccctgcagaagattgctgctgacatgagcaacatcatcgagaacctggacacccgggagctgcactttgaaggagaggaggtggactatgatgtgagccccagcgaccccaagatccaggaggtgtacatccccttcagcgccatctacaacacccagggcttcaaggagcccaacatccagacctacctgagcggctgccccatcaaggcccaggtgctggaggtggagcgcttcaccagcaccaccagggtgcccagcatcaacctgtacaccatcgagctgacccatggagagttcaagtggcaggtgaagaggaagttcaagcacttccaggagttccaccgggagctgctgaagtacaaggccttcatccgcatccccatccccacccggcggcacaccttccggcggcagaatgtgcgggaggagccccgggagatgcccagcctgcccaggagcagcgagaacatgatccgggaggagcagttcctgggccgcaggaagcagctggaggactacctgaccaagatcctgaagatgcccatgtacagaaactaccacgccaccacagagttcctggacatcagccagctgtccttcatccatgacctgggccccaagggcatcgagggcatgatcatgaagaggtctgggggccaccgcatccctggcctgaactgctgcggccagggccgggcctgctaccgctggagcaagcgctggctgattgtgaaggacagcttcctgctgtacatgaagccagattctggggccatcgcctttgtgctgctggtggacaaggagttcaagatcaaggtgggcaagaaggagacagagaccaagtatggcatcagaattgacaacctgagcaggaccctcatcctgaagtgcaacagctacagacatgcccgctggtggggcggggccatcgaggagttcatccagaagcacggcaccaacttcctgaaggaccaccgcttcggcagctatgctgccatccaggagaatgccctggccaagtggtacgtgaatgccaagggctactttgaagatgtggccaatgccatggaggaggccaatgaggagatcttcatcacagactggtggctgagccctgagatcttcctgaagaggcctgtggtggagggcaaccgctggaggctggactgcatcctgaagaggaaggcccagcagggcgtgcgcatcttcatcatgctgtacaaggaggtggagctggccctgggcatcaacagcgagtacaccaagaggaccctgatgaggctgcaccccaacatcaaggtgatgaggcacccagaccacgtgagcagcacagtgtacctgtgggcccaccacgagaagctggtgatcatcgaccagagcgtggcctttgtgggcggcatcgacctggcctacggccgctgggatgacaatgagcaccggctgacagatgtgggctctgtgaagagggtgaccagcggccccagcctgggcagcctgcccatccctggccccagcgtggtgtaccggcaggtgtgggagagctgcatgggcaagccagacagcggcatggagaggaccacagccatcagcagcagcaagacaggcttcaacctgatcaacctgctgctgatcagcctgaccggcacccccaggcctggctgccccggcatgaccctgcccctgcagagcactggaagaaggctggtgatgtggcacgtgaccagcagcagcgctggcaccagccagaagctgtag

SEQ ID NO: 47481 - DNA, 3111 bp, Artificial Sequence
  derived and/or modified sequence
atgagcctgaagaatgagccccgggtgaacaccagcgccctgcagaagattgctgctgacatgagcaacatcatcgagaacctggacacccgggagctgcactttgaaggagaggaggtggactatgatgtgagccccagcgaccccaagatccaggaggtgtacatccccttcagcgccatctacaacacccagggcttcaaggagcccaacatccagacctacctgagcggctgccccatcaaggcccaggtgctggaggtggagcgcttcaccagcaccaccagggtgcccagcatcaacctgtacaccatcgagctgacccatggagagttcaagtggcaggtgaagaggaagttcaagcacttccaggagttccaccgggagctgctgaagtacaaggccttcatccgcatccccatccccacccggcggcacaccttccggcggcagaatgtgcgggaggagccccgggagatgcccagcctgcccaggagcagcgagaacatgatccgggaggagcagttcctgggccgcaggaagcagctggaggactacctgaccaagatcctgaagatgcccatgtacagaaactaccacgccaccacagagttcctggacatcagccagctgtccttcatccatgacctgggccccaagggcatcgagggcatgatcatgaagaggtctgggggccaccgcatccctggcctgaactgctgcggccagggccgggcctgctaccgctggagcaagcgctggctgattgtgaaggacagcttcctgctgtacatgaagccagattctggggccatcgcctttgtgctgctggtggacaaggagttcaagatcaaggtgggcaagaaggagacagagaccaagtatggcatcagaattgacaacctgagcaggaccctcatcctgaagtgcaacagctacagacatgcccgctggtggggcggggccatcgaggagttcatccagaagcacggcaccaacttcctgaaggaccaccgcttcggcagctatgctgccatccaggagaatgccctggccaagtggtacgtgaatgccaagggctactttgaagatgtggccaatgccatggaggaggccaatgaggagatcttcatcacagactggtggctgagccctgagatcttcctgaagaggcctgtggtggagggcaaccgctggaggctggactgcatcctgaagaggaaggcccagcagggcgtgcgcatcttcatcatgctgtacaaggaggtggagctggccctgggcatcaacagcgagtacaccaagaggaccctgatgaggctgcaccccaacatcaaggtgatgaggcacccagaccacgtgagcagcacagtgtacctgtgggcccaccacgagaagctggtgatcatcgaccagagcgtggcctttgtgggcggcatcgacctggcctacggccgctgggatgacaatgagcaccggctgacagatgtgggctctgtgaagagggtgaccagcggccccagcctgggcagcctgcccccagctgccatggagagcatggagagcctgcggctgaaggacaagaatgaacctgtgcagaacctgcccatccagaagagcattgatgatgtggacagcaagctgaagggcatcggcaagcccaggaagttcagcaagttcagcctgtacaagcagctgcaccgccaccacctgcatgatgctgacagcatcagcagcattgacagcaccagcaacacaggcagcatccgcagcctgcagacaggagtgggggagctgcacggggagacccgcttctggcacggcaaggactactgcaactttgtgttcaaggactgggtgcagctggacaagccctttgctgacttcatcgaccgctacagcacccccaggatgccctggcatgacatcgccagcgctgtgcacggcaaggccgccagagatgtggcccggcacttcatccagcgctggaacttcaccaagatcatgaagagcaagtaccgcagcctgagctaccccttcctgctgcccaagagccagaccacagcccacgagctgcgctaccaggtgcccggctctgtgcacgccaacgtgcagctgctgcggtctgctgctgactggagcgctggcatcaagtaccacgaggagagcatccacgccgcctacgtgcacgtgattgagaacagccgccactacatctacatcgagaaccagttcttcatcagctgtgctgatgacaaggtggtgttcaacaagattggagatgccatcgcccagaggatcctgaaggcccaccgggagaaccagaagtacagagtgtatgtggtgatccccctgctgcccggctttgaaggagacatcagcactggaggcggcaatgccctgcaggccatcatgcacttcaactaccgcaccatgtgccgcggggagaacagcatcctgggccagctgaaggccgagctgggcaaccagtggatcaactacatctccttctgtggcctgcggacccacgccgagctggagggcaacctggtgacagagctgatctacgtgcacagcaagctgctgattgctgatgacaacacagtcatcatcggcagcgccaacatcaatgaccgctccatgctgggcaagagggacagcgagatggccgtcatcgtgcaggacacagagaccgtgcccagcgtgatggatggcaaggagtaccaggccggccgctttgcccggggcctgcggctgcagtgcttccgggtggtgctgggctacctggatgaccccagcgaggacatccaggaccctgtgtctgacaagttcttcaaggaggtgtgggtgtccacagctgccagaaatgccaccatctatgacaaggtgttccgctgcctgcccaatgatgaggtgcacaacctgatccagctgcgggacttcatcaacaagcctgtgctggccaaggaggaccccatccgggcagaggaggagctgaagaagatccggggcttcctggtgcagttccccttctacttcctgtctgaggagagcctgctgcccagcgtgggcaccaaggaggccatcgtgcccatggaggtgtggacctag

SEQ ID NO: 47482 - DNA, 1794 bp, Artificial Sequence
  derived and/or modified sequence
atgagcctgaagaacgagccccgggtgaacaccagcgccctgcagaagattgctgctgacatgagtaatatcatcgaaaacctcgataccagagagctgcactttgagggcgaagaagtcgactatgacgtgtcaccgtccgacccaaagatccaggaggtctacattccattcagcgcgatctataacacccaaggattcaaggaacctaatatacagacatacctcagcggttgccccataaaggcgcaggtgctcgaagttgaacggttcacatcgacgaccagggtgcccagcataaatctgtacaccattgagttgactcatggggaattcaaatggcaggtcaagaggaaattcaaacattttcaagaatttcaccgtgagctgttgaagtataaggctttcattagaattcctataccaacacgaaggcacaccttcaggagacaaaatgtgagggaagaaccacgtgaaatgccaagcttaccgcggagctctgaaaatatgattcgcgaggaacagttcctaggaaggcggaagcaactggaagactacctgacgaagattctgaagatgccaatgtataggaactaccatgctactaccgaatttctggatatcagccagctttccttcattcatgacctcgggccgaaggggatcgaagggatgatcatgaagagaagtgggggccataggattccaggtctgaactgctgtggtcaagggagggcctgctaccgatggagcaaacgatggctcatcgtgaaggacagctttctcctgtatatgaagcctgactctggtgcaatcgcttttgtgttacttgttgacaaggaattcaaaatcaaagtggggaagaaggagacagaaaccaaatacggcattagaatcgataacctctctaggacattaatcctgaaatgcaactcatatagacatgccagatggtggggcggggccatcgaggaatttattcaaaaacatggcactaatttcttgaaggaccaccggtttgggtcgtatgccgcaatccaggagaatgccctggccaaatggtatgtgaacgcaaagggatattttgaggacgtggccaacgccatggaggaggctaatgaggagatctttattactgattggtggttgtcccccgagattttcctaaagcgtcctgtagtcgaaggaaatcgatggaggcttgactgcatcctcaaacggaaggcccagcaaggtgtgcggatcttcatcatgctctataaagaggtagaactcgcccttggcattaattcagagtacactaagagaacactcatgcgtctgcaccctaacatcaaggttatgcggcaccctgaccacgtgagctcaacggtctacttgtgggctcaccacgaaaaactggtgatcatagaccaaagcgtcgcattcgtcggtgggatcgacctggcttacggacggtgggacgataacgagcaccgcttgacggatgttggttcagtgaagagagtgacttctggtccgtcactgggctctctccccattcctgggccttcagtggtctaccgccaggtttgggagtcctgcatgggaaaacctgatagtggcatggaacgcacaacggctatcagttcgtccaaaaccgggttcaacctcatcaacctgttgctaatctccctgacaggaacgcccaggcccggatgccctggaatgacactgccccttcagagcaccggaagacgccttgtgatgtggcacgttacttcttcctcagctggaacttcccagaaactgtag

SEQ ID NO: 47483 - DNA, 3111 bp, Artificial Sequence
  derived and/or modified sequence
atgagcctgaagaacgagccccgggtgaacaccagcgccctgcagaagatcgccgccgacatgtccaatatcatagaaaacctggacacaagggagctgcactttgaaggcgaggaggtggactacgacgtgagcccctctgaccctaaaattcaggaagtctacatccccttctctgccatttataacacacaggggtttaaagaaccgaacattcagacctacctatcaggttgtccaatcaaggctcaggtcttagaggtggagagattcacttcgactactagagtgccttcaatcaatctctatacaatcgagttaacacacggtgagtttaagtggcaagtgaagagaaagtttaagcactttcaggaatttcatcgagaactcctcaaatacaaagctttcattaggatacccattccgacgcggaggcataccttccggcgtcagaatgtccgggaagaaccacgggaaatgccttcattaccccgctcttctgagaacatgatcagggaagagcagttcctcgggcggaggaaacagttggaggactacctgacgaagatcctgaagatgcccatgtatcgtaactatcacgccactacggaattcctggacatctcccagctgagtttcatccatgacctcgggccgaagggaattgagggtatgattatgaaacgcagcggaggccacagaatccctgggctgaattgttgcggacagggtcgggcctgttatcggtggtctaaaagatggctgattgtgaaagatagctttctgctgtacatgaagcctgactctggcgccattgcattcgttctgctcgtcgacaaggaatttaagataaaggtcggcaagaaagaaacagagacaaaatacggcatcaggattgacaacctcagtcgcactttgattctgaagtgcaacagctatcgacacgcaaggtggtggggcggcgcaatagaagaatttatccagaaacacggtacaaattttttaaaggatcatcggttcgggagctatgccgcaattcaggagaatgccctggcgaagtggtatgttaacgctaaaggttactttgaggatgtggccaatgccatggaagaagcgaatgaagaaatcttcattaccgactggtggctgtcccctgaaatcttcctgaagagacccgtcgttgaagggaatcggtggaggcttgattgcatactcaagcggaaggcccaacaaggggtaaggatctttatcatgctctacaaagaggtggaacttgcccttgggatcaacagtgaatacactaagcggaccctgatgcgccttcatccaaatatcaaagtgatgaggcatccagatcatgtctcatcaacagtttatctgtgggcccaccatgaaaaattagtcatcattgaccagagcgtggctttcgtcggcggaatagatttggcatatggtcgatgggacgacaacgagcaccggttaacagatgtaggctcagtgaagcgcgtaaccagcggccccagcctggggtcgctgcctcccgcagccatggagagcatggagtctctgagactaaaggacaaaaacgagccagtccaaaatctgcccattcaaaagagtatcgacgacgtggacagcaaactgaagggcatcggcaagccccgtaagttttctaagttttccctctacaagcaactgcatcgtcatcacctgcacgacgccgatagcatttcctcaattgactcaacttctaatacgggctcgattcggtcactgcagacaggagtgggggaacttcacggcgaaacacgcttctggcacggcaaggactactgcaacttcgtgttcaaggattgggttcagttggacaaacctttcgccgactttatcgatagatattcaaccccgagaatgccttggcacgatatcgccagtgccgtacacggaaaggccgcgagagacgtagctcgccacttcattcagcgctggaatttcaccaagatcatgaaatcaaagtatcgaagcctgtcttatccttttcttctcccaaagtcccagacaaccgctcacgagctccgttatcaggttcctggaagcgtccatgccaatgtccagctgttacggtccgctgctgactggtcagctggtattaaataccacgaggagagcatccacgcagcctatgtgcacgttatagagaacagccggcactatatttatatcgaaaaccagttcttcatttcatgcgccgacgacaaggttgtgttcaataaaataggcgacgccatcgcccagagaattctaaaagcccacagggagaaccagaaataccgtgtgtacgtcgtgattcctctgctgcccggcttcgaaggagacatctcaactggcggcgggaacgcactgcaggctattatgcactttaactaccgcaccatgtgtagaggagaaaactctatcctggggcaactgaaagccgaattaggcaaccagtggataaattatatctctttttgtggcttaaggacccacgcagagctcgagggaaaccttgtaaccgaattaatctatgtgcactcaaagctgttaatcgcagacgacaataccgtgatcatcgggagcgctaatattaatgataggagcatgctgggcaaacgggattctgagatggctgtaatagttcaggacaccgagacggtccctagcgtaatggacggcaaggagtaccaggcgggccgttttgcacgcggcctgcgactgcagtgtttccgcgttgtgctggggtacttggatgatccttccgaggatatacaggaccccgtaagtgacaagttctttaaggaggtatgggtgtccactgcggccaggaatgccacaatttacgataaggtgtttagatgtctgcccaatgatgaagtacacaacctgattcagctcagggattttatcaacaaaccggttctggcgaaagaagacccaatcagggctgaggaagaattaaaaaaaatcaggggattccttgtccagttcccattctactttctttcagaggagtcccttttaccctccgtcggaaccaaggaagctatcgtgccaatggaggtctggacatag

SEQ ID NO: 47484 - DNA, 1794 bp, Artificial Sequence
  derived and/or modified sequence
atgagcttaaagaatgagccccgtgtgaatactagcgcgctgcagaagattgcggctgatatgtccaacatcatcgagaatctcgacactagagagcttcattttgagggcgaagaagtagattacgacgtgtccccaagtgaccctaagattcaggaggtgtacatcccttttagcgcaatttataacacccaaggcttcaaggaacccaacatccagacttacctaagtggctgtccaattaaggcccaggtcctggaagtggaacgcttcaccagcactacacgtgtcccctcaattaatctgtacacaatcgagctgacccacggggagttcaaatggcaagtaaagcggaagtttaaacatttccaagaattccaccgtgagttgttgaaatacaaagccttcattcggattcccatccccacgcgacggcatacctttcggagacaaaacgtcagagaggagcctagggagatgccatccttaccacgtagctccgaaaacatgatacgcgaggaacaattcctcggccgtcggaagcaactagaggattacctgactaagattcttaagatgcctatgtatcgcaattatcatgcaacaactgaattccttgatatcagccaactgagttttatccacgatttgggccctaaaggaatcgaggggatgatcatgaaacgcagtggcggtcatcggattcccggtctgaactgctgcggccaggggagggcttgctataggtggagtaagcggtggctgattgtcaaagatagctttctgttgtacatgaaacccgatagtggggctatagcctttgttctcctcgtggacaaggaattcaagatcaaggtaggaaagaaagaaactgaaactaaatacggcatccgcattgacaatctgtctagaactctcatccttaagtgcaacagctaccgccatgccaggtggtggggtggggcaatcgaagaattcattcaaaaacacggcaccaatttcctcaaggaccacaggttcggatcttacgccgcaattcaggaaaatgcgctggccaagtggtacgtgaacgccaagggttacttcgaggatgtcgccaatgcaatggaggaggcaaatgaagagatcttcatcaccgactggtggctgtctcccgaaatttttctcaagcgcccagtcgtggagggcaatcggtggagattggactgtattctcaaacggaaggcgcagcagggtgttaggatcttcattatgttatataaggaggtagagctggcccttggaatcaattccgaatacacaaagagaaccctgatgcgcctgcaccccaatataaaagtgatgcgccatcctgaccacgtgtctagcacagtgtacctgtgggcccaccatgagaagctcgtgatcatcgaccagtcggttgcatttgttggtggtatcgacctagcctatggcaggtgggatgacaacgagcaccggctcactgacgtggggtcggtgaagagagtgacaagtgggcctagcctgggaagccttccaatacctggcccttcggtggtgtatcgccaggtctgggagtcctgcatgggtaaacctgactctggcatggagcggacgactgctatttccagtagcaaaactggatttaacttaattaatcttctcctgatttctttgaccggcaccccaagacctgggtgccccggaatgacgctgccgctccaatctacagggaggcgattggttatgtggcacgtcacttcgtccagcgccggaacgagccagaagctgtag

SEQ ID NO: 47485 - DNA, 3111 bp, Artificial Sequence
  derived and/or modified sequence
atgagcttgaaaaatgaacctcgagtcaatacatccgctcttcagaaaatcgccgctgacatgtccaacatcatcgaaaacctggatactcgggagctacattttgagggagaagaggttgactatgacgttagcccaagtgatccaaagatccaagaagtgtatatccctttctcggctatttacaatacgcagggcttcaaggagcccaacatacaaacctatctgtccgggtgtcctattaaggctcaggtgttagaagtggaacggtttactagcaccaccagggtaccaagcatcaatctgtacaccatagagctgacgcacggcgagttcaaatggcaggtgaagaggaaatttaagcattttcaggaatttcatcgcgaactcctcaagtataaagcctttatcagaatacctattcccacccgacggcacacattcaggcggcaaaacgtgcgggaagagcctagagagatgccctccttaccacgttcttccgagaatatgatccgagaggagcagtttctggggcgtaggaaacaacttgaggattatctcacaaagatcctgaagatgcctatgtaccgcaactaccacgctaccacagagtttcttgatattagccaattatcattcattcacgatctaggccctaaggggatcgaagggatgatcatgaagcgaagcgggggacacagaatcccaggcttgaattgctgcgggcaagggagagcctgctatcgttggagcaaacggtggctgatcgtgaaagacagctttctgttgtacatgaagcctgactcaggtgctatcgcgtttgtgctccttgtcgacaaagaatttaagattaaggtgggaaaaaaagagacggagaccaaatacggcattcgcattgataacctgagccgaactttgattctgaagtgcaatagttacaggcatgcgagatggtggggtggtgccatcgaggagtttattcagaagcacgggacaaattttcttaaagatcatcgctttggaagttacgctgctatacaggagaacgccctggccaaatggtatgtgaacgcgaagggttacttcgaagacgtggccaacgctatggaagaggctaatgaagaaatattcatcaccgattggtggctatctcccgagatctttcttaagcggcctgtcgttgaaggcaatagatggagactggactgtattctcaagaggaaggcacagcagggcgttagaatcttcattatgctctataaagaagttgagttggctctgggcatcaattccgaatacacgaaacggacccttatgcgtctccacccgaatatcaaagtcatgaggcaccctgaccatgtgtctagcaccgtatatctgtgggcccaccacgaaaagctggtaattatagatcagagtgtggcctttgtcggcggaatcgacctcgcctacggcaggtgggacgacaacgagcatcgtttgacagacgttggatcagtaaagcgtgtcacaagcggaccatcactgggcagtctccctcctgccgcaatggaatccatggaaagtctgagactgaaggacaagaacgagcctgtgcaaaatttgcctatacagaagtcaattgacgacgtcgattcaaagctgaaaggcatcgggaaacctcggaagttctccaagttttccctctacaaacaacttcaccgtcaccatctgcacgacgcggactctatctcctctatagattccactagcaacacgggcagcattcggagtctgcagaccggagtgggcgagctccacggagagaccagattctggcatgggaaggactactgtaacttcgtgttcaaggactgggtccagctggacaagccttttgccgattttatcgaccgctattcaacccctaggatgccatggcacgacatcgcaagtgcggtgcacgggaaagccgcacgagatgttgctagacatttcatacagcggtggaacttcactaaaattatgaagagcaaataccggtccctgtcatatccatttttactgcctaagtctcagaccacagcacacgagttgcgttaccaggttcccggatcggttcacgcaaacgtgcagttgctgcgatccgccgcagactggtcagcgggtattaagtaccacgaagaaagcattcatgccgcttacgtgcatgtgatcgagaattcgcgccactacatctatatcgaaaaccagttcttcatatcatgcgcagatgataaagtggtttttaataagatcggggatgccattgcgcagagaattttgaaggcccacagagagaatcagaagtatcgcgtctacgtggtgattcctctgctcccagggtttgagggtgacatatctaccggaggcggtaatgcacttcaggctatcatgcatttcaactaccgcaccatgtgtaggggggagaatagtatactagggcagcttaaggccgaactgggaaatcaatggattaactacatttctttttgtggtctcagaactcacgcagagttggaaggaaacctcgtgacagaattgatctacgtgcactccaaacttttgatcgcagacgataatactgtaataatcggatccgccaatatcaacgacaggagcatgctggggaaacgcgactctgagatggcagtgatcgtgcaggacaccgaaactgtcccctcagtgatggacgggaaagagtatcaggccggtagattcgcccgaggcctgcggcttcaatgcttcagagtggtcctggggtatttggacgatccatcagaggacattcaagacccagtgagcgataagtttttcaaggaggtctgggtgtccacggccgctcggaacgccaccatctacgacaaagtcttccggtgcctccccaacgatgaagtgcataatttaatccaattgcgcgacttcattaataaacccgttctggctaaagaagaccctatccgtgccgaggaggaattgaaaaagatccgtggttttcttgttcagttccctttctactttctgagcgaggagtccttactacccagcgtgggcaccaaggaagctattgtgccgatggaggtgtggacatag

SEQ ID NO: 47486 - DNA, 5261 bp, Artificial Sequence
  derived and/or modified sequence
gctgagctccagctgtgccagaggcacccgagccctgagagtccgccgccaacgcgcaggtgctagcggccccttcgccctgcagcccctttgcttttactctgtccaaagttaacatgtcactgaaaaacgagccacgggtaaatacctctgcactgcagaaaattgctgctgacatgagtaatatcatagaaaatctggacacgcgggaactccactttgagggagaggaggtagactacgacgtgtctcccagcgatcccaagatacaagaagtgtatatccctttctctgctatttataacactcaaggatttaaggagcctaatatacagacgtatctctccggctgtccaataaaagcacaagttctggaagtggaacgcttcacatctacaacaagggtaccaagtattaatctttacactattgaattaacacatggggaatttaaatggcaagttaagaggaaattcaagcattttcaagaatttcacagagagctgctcaagtacaaagcctttatccgcatccccattcccactagaagacacacgtttaggaggcaaaacgtcagagaggagcctcgagagatgcccagtttgccccgttcatctgaaaacatgataagagaagaacaattccttggtagaagaaaacaactggaagattacttgacaaagatactaaaaatgcccatgtatagaaactatcatgccacaacagagtttcttgatataagccagctgtctttcatccatgatttgggaccaaagggcatagaaggtatgataatgaaaagatctggaggacacagaataccaggcttgaattgctgtggtcagggaagagcctgctacagatggtcaaaaagatggttaatagtgaaagattcctttttattgtatatgaaaccagacagcggtgccattgccttcgtcctgctggtagacaaagaattcaaaattaaggtggggaagaaggagacagaaacgaaatatggaatccgaattgataatctttcaaggacacttattttaaaatgcaacagctatagacatgctcggtggtggggaggggctatagaagaattcatccagaaacatggcaccaactttctcaaagatcatcgatttgggtcatatgctgctatccaagagaatgctttagctaaatggtatgttaatgccaaaggatattttgaagatgtggcaaatgcaatggaagaggcaaatgaagagatttttatcacagactggtggctgagtccagaaatcttcctgaaacgcccagtggttgagggaaatcgttggaggttggactgcattcttaaacgaaaagcacaacaaggagtgaggatcttcataatgctctacaaagaggtggaactcgctcttggcatcaatagtgaatacaccaagaggactttgatgcgtctacatcccaacataaaggtgatgagacacccggatcatgtgtcatccaccgtctatttgtgggctcaccatgagaagcttgtcatcattgaccaatcggtggcctttgtgggagggattgacctggcctatggaaggtgggacgacaatgagcacagactcacagacgtgggcagtgtgaagcgggtcacttcaggaccgtctctgggttccctcccaataccgggtccatccgtagtttacagacaggtgtgggagagctgcatggggaaaccagattctggcatggaaaggactactgcaatttcgtcttcaaagactgggttcaacttgataaaccttttgctgatttcattgacaggtactccacgccccggatgccctggcatgacattgcctctgcagtccacgggaaggcggctcgtgatgtggcacgtcacttcatccagcgctggaacttcacaaaaattatgaaatcaaaatatcggtccctttcttatccttttctgcttccaaagtctcaaacaacagcccatgagttgagatatcaagtgcctgggtctgtccatgctaacgtacagttgctccgctctgctgctgattggtctgctggtataaagtaccatgaagagtccatccacgccgcttacgtccatgtgatagagaacagcaggcactatatctatatcgaaaaccagtttttcataagctgtgctgatgacaaagttgtgttcaacaagataggcgatgccattgcccagaggatcctgaaagctcacagggaaaaccagaaataccgggtatatgtcgtgataccacttctgccagggttcgaaggagacatttcaaccggcggaggaaatgctctacaggcaatcatgcacttcaactacagaaccatgtgcagaggagaaaattccatccttggacagttaaaagcagagcttggtaatcagtggataaattacatatcattctgtggtcttagaacacatgcagagctcgaaggaaacctagtaactgagcttatctatgtccacagcaagttgttaattgctgatgataacactgttattattggctctgccaacataaatgaccgcagcatgctgggaaagcgtgacagtgaaatggctgtcattgtgcaagatacagagactgttccttcagtaatggatggaaaagagtaccaagctggccggtttgcccgaggacttcggctacagtgctttagggttgtccttggctatcttgatgacccaagtgaggacattcaggatccagtgagtgacaaattcttcaaggaggtgtgggtttcaacagcagctcgaaatgctacaatttatgacaaggttttccggtgccttcccaatgatgaagtacacaatttaattcagctgagagactttataaacaagcccgtattagctaaggaagatcccattcgagctgaggaggaactgaagaagatccgtggatttttggtgcaattccccttttatttcttgtctgaagaaagcctactgccttctgttgggaccaaagaggccatagtgcccatggaggtttggacttaagagatattcattggcagctcaaagacttccaccctggagaccacactgcacacagtgacttcctggggatgtcatagccaaagccaggcctgacgcattctcgtatccaacccaaggaccttttggaatgactggggagggctgcagtcacattgatgtaaggactgtaaacatcagcaagactttataattccttctgcctaacttgtaaaaagggggctgcattcttgttggtagcatgtactctgttgagtaaaacacatattcaaattccgtataccaaaatccatttcctttgtaacaagaatttaccagtaactgtgatctaggttgccaaaagttgtctgaatctccttattcttctctgatcttcatttatgcagccaatgtctagctggacctgccctcatcttgcagttcatacaggcactgtttgagagattgtttattattagatgttgtaatgctgcttcaagattcttcatggttacatgggatgcccctgctcatctggtcctgaagtagtaacattcacccaaatgaggatatagtcattattccttttcagtcactgtacgaacacggcagactttagcctacacagtagactgtgttaggcacttctggtaacattgacactgtatcttgacaccactaagcaacaggaaggaataaattccaatattgagacagagatttatttcattttgctcccaaaggcactgacaacatgagtccttgtgattaggcccacctgatcaaatgtaaaaacatgcatgggatatttgattacgtaacaaccagctaaaactgagagcacacagccttcggaaacccccaaggtgtcgaggaggatcagatccagataagagaagatgattccttctagtcctgtaaaatttcctgtcatccttagctgctgggttgattgaaatttgatctctacatttcaaaatcaaactagtgaatacagtttgtctttcaagagaatcagaggcatcgtaactcctaccaagttagtaagtatgagtctaaccttgtttgacattcaggtcttctgctacattatcttctttgagaaaaattaattgattataaaatatgtgctacttcacttacattattaaatatgtattaacgcctctcaccagggcttccagtgaagttacaatgccctagtctgtgaattagtctggaaacgtgtttttccttttcggatgttagagtaccctttgataaactaaattttactaagctgaacaactctgacagtctaaagagctaatgtgggttaccaaaaggcctgtacctgtaaaacaaaatgcaggtgtaatgattatacatgtctatggattacctggacatactctcatttgggttgttcttcaaagaagcaagcagccgatccctgttttcataaagctaatacttcagttggaaaaattaaacaggagcacaaagtcagggataggggttagcagaagagagaaatagtgtcacatcaagggcaggatctcatagctagggaacatttcacaaataaggtgagattttgtaaccaataataaaaatgaatgtttttataagtaaataacttatttttcatatggctaaagatggtaaaatgacttcattctatagccattgtaaataagaatttgctattgatgaaagaagttcagattggcatttgaagtattgagtgtatgggatctctaaggatttcttagattttatatttaaatattttttaaaccttagaggagtcaacaaactggctcttgattttcagcaccctactctcatgaaaaaagcctgaaaggaccctttcccttataagtaatttaatccaatttctccccattttatagatgaggaaactgaggctcagatcagatgagaactcacttaaatccactcaatgtgtagatggtagagctgggactagcaacattgctgcagcccattgttggcctctctcttcactttatcattgcccaagaatgaggatatgcagtaaacagaattcaggcaagatacctctaagctgttttgaaccctctgatattttgtatttatgtgtttgtctgtctccccctactagaatgtaagctccatggggcagggacttcactgtattttgttcatagtgtatccccagagcctggaccagtgcttggcacataggagatggcaataaatgcttgtagaattaataaacaaggtgaaggagagagctaatgaaatg

SEQ ID NO: 47487 - DNA, 5855 bp, Artificial Sequence
  derived and/or modified sequence
ccgccaacgcgcaggtgctagcggccccttcgccctgcagcccctttgcttttactctgtccaaagttaacatgtcactgaaaaacgagccacgggtaaatacctctgcactgcagaaaattgctgctgacatgagtaatatcatagaaaatctggacacgcgggaactccactttgagggagaggaggtagactacgacgtgtctcccagcgatcccaagatacaagaagtgtatatccctttctctgctatttataacactcaaggatttaaggagcctaatatacagacgtatctctccggctgtccaataaaagcacaagttctggaagtggaacgcttcacatctacaacaagggtaccaagtattaatctttacactattgaattaacacatggggaatttaaatggcaagttaagaggaaattcaagcattttcaagaatttcacagagagctgctcaagtacaaagcctttatccgcatccccattcccactagaagacacacgtttaggaggcaaaacgtcagagaggagcctcgagagatgcccagtttgccccgttcatctgaaaacatgataagagaagaacaattccttggtagaagaaaacaactggaagattacttgacaaagatactaaaaatgcccatgtatagaaactatcatgccacaacagagtttcttgatataagccagctgtctttcatccatgatttgggaccaaagggcatagaaggtatgataatgaaaagatctggaggacacagaataccaggcttgaattgctgtggtcagggaagagcctgctacagatggtcaaaaagatggttaatagtgaaagattcctttttattgtatatgaaaccagacagcggtgccattgccttcgtcctgctggtagacaaagaattcaaaattaaggtggggaagaaggagacagaaacgaaatatggaatccgaattgataatctttcaaggacacttattttaaaatgcaacagctatagacatgctcggtggtggggaggggctatagaagaattcatccagaaacatggcaccaactttctcaaagatcatcgatttgggtcatatgctgctatccaagagaatgctttagctaaatggtatgttaatgccaaaggatattttgaagatgtggcaaatgcaatggaagaggcaaatgaagagatttttatcacagactggtggctgagtccagaaatcttcctgaaacgcccagtggttgagggaaatcgttggaggttggactgcattcttaaacgaaaagcacaacaaggagtgaggatcttcataatgctctacaaagaggtggaactcgctcttggcatcaatagtgaatacaccaagaggactttgatgcgtctacatcccaacataaaggtgatgagacacccggatcatgtgtcatccaccgtctatttgtgggctcaccatgagaagcttgtcatcattgaccaatcggtggcctttgtgggagggattgacctggcctatggaaggtgggacgacaatgagcacagactcacagacgtgggcagtgtgaagcgggtcacttcaggaccgtctctgggttccctcccacctgccgcaatggagtctatggaatccttaagactcaaagataaaaatgagcctgttcaaaacctacccatccagaagagtattgatgatgtggattcaaaactgaaaggaataggaaagccaagaaagttctccaaatttagtctctacaagcagctccacaggcaccacctgcacgacgcagatagcatcagcagcattgacagcacctccaataccgggtccatccgtagtttacagacaggtgtgggagagctgcatggggaaaccagattctggcatggaaaggactactgcaatttcgtcttcaaagactgggttcaacttgataaaccttttgctgatttcattgacaggtactccacgccccggatgccctggcatgacattgcctctgcagtccacgggaaggcggctcgtgatgtggcacgtcacttcatccagcgctggaacttcacaaaaattatgaaatcaaaatatcggtccctttcttatccttttctgcttccaaagtctcaaacaacagcccatgagttgagatatcaagtgcctgggtctgtccatgctaacgtacagttgctccgctctgctgctgattggtctgctggtataaagtaccatgaagagtccatccacgccgcttacgtccatgtgatagagaacagcaggcactatatctatatcgaaaaccagtttttcataagctgtgctgatgacaaagttgtgttcaacaagataggcgatgccattgcccagaggatcctgaaagctcacagggaaaaccagaaataccgggtatatgtcgtgataccacttctgccagggttcgaaggagacatttcaaccggcggaggaaatgctctacaggcaatcatgcacttcaactacagaaccatgtgcagaggagaaaattccatccttggacagttaaaagcagagcttggtaatcagtggataaattacatatcattctgtggtcttagaacacatgcagagctcgaaggaaacctagtaactgagcttatctatgtccacagcaagttgttaattgctgatgataacactgttattattggctctgccaacataaatgaccgcagcatgctgggaaagcgtgacagtgaaatggctgtcattgtgcaagatacagagactgttccttcagtaatggatggaaaagagtaccaagctggccggtttgcccgaggacttcggctacagtgctttagggttgtccttggctatcttgatgacccaagtgaggacattcaggatccagtgagtgacaaattcttcaaggaggtgtgggtttcaacagcagctcgaaatgctacaatttatgacaaggttttccggtgccttcccaatgatgaagtacacaatttaattcagctgagagactttataaacaagcccgtattagctaaggaagatcccattcgagctgaggaggaactgaagaagatccgtggatttttggtgcaattccccttttatttcttgtctgaagaaagcctactgccttctgttgggaccaaagaggccatagtgcccatggaggtttggacttaagagatattcattggcagctcaaagacttccaccctggagaccacactgcacacagtgacttcctggggatgtcatagccaaagccaggcctgacgcattctcgtatccaacccaaggaccttttggaatgactggggagggctgcagtcacattgatgtaaggactgtaaacatcagcaagactttataattccttctgcctaacttgtaaaaagggggctgcattcttgttggtagcatgtactctgttgagtaaaacacatattcaaattccgtataccaaaatccatttcctttgtaacaagaatttaccagtaactgtgatctaggttgccaaaagttgtctgaatctccttattcttctctgatcttcatttatgcagccaatgtctagctggacctgccctcatcttgcagttcatacaggcactgtttgagagattgtttattattagatgttgtaatgctgcttcaagattcttcatggttacatgggatgcccctgctcatctggtcctgaagtagtaacattcacccaaatgaggatatagtcattattccttttcagtcactgtacgaacacggcagactttagcctacacagtagactgtgttaggcacttctggtaacattgacactgtatcttgacaccactaagcaacaggaaggaataaattccaatattgagacagagatttatttcattttgctcccaaaggcactgacaacatgagtccttgtgattaggcccacctgatcaaatgtaaaaacatgcatgggatatttgattacgtaacaaccagctaaaactgagagcacacagccttcggaaacccccaaggtgtcgaggaggatcagatccagataagagaagatgattccttctagtcctgtaaaatttcctgtcatccttagctgctgggttgattgaaatttgatctctacatttcaaaatcaaactagtgaatacagtttgtctttcaagagaatcagaggcatcgtaactcctaccaagttagtaagtatgagtctaaccttgtttgacattcaggtcttctgctacattatcttctttgagaaaaattaattgattataaaatatgtgctacttcacttacattattaaatatgtattaacgcctctcaccagggcttccagtgaagttacaatgccctagtctgtgaattagtctggaaacgtgtttttccttttcggatgttagagtaccctttgataaactaaattttactaagctgaacaactctgacagtctaaagagctaatgtgggttaccaaaaggcctgtacctgtaaaacaaaatgcaggtgtaatgattatacatgtctatggattacctggacatactctcatttgggttgttcttcaaagaagcaagcagccgatccctgttttcataaagctaatacttcagttggaaaaattaaacaggagcacaaagtcagggataggggttagcagaagagagaaatagtgtcacatcaagggcaggatctcatagctagggaacatttcacaaataaggtgagattttgtaaccaataataaaaatgaatgtttttataagtaaataacttatttttcatatggctaaagatggtaaaatgacttcattctatagccattgtaaataagaatttgctattgatgaaagaagttcagattggcatttgaagtattgagtgtatgggatctctaaggatttcttagattttatatttaaatattttttaaaccttagaggagtcaacaaactggctcttgattttcagcaccctactctcatgaaaaaagcctgaaaggaccctttcccttataagtaatttaatccaatttctccccattttatagatgaggaaactgaggctcagatcagatgagaactcacttaaatccactcaatgtgtagatggtagagctgggactagcaacattgctgcagcccattgttggcctctctcttcactttatcattgcccaagaatgaggatatgcagtaaacagaattcaggcaagatacctctaagctgttttgaaccctctgatattttgtatttatgtgtttgtctgtctccccctactagaatgtaagctccatggggcagggacttcactgtattttgttcatagtgtatccccagagcctggaccagtgcttggcacataggagatggcaataaatgcttgtagaattaataaacaaggtgaaggagagagctaatgaaatgaaaatcttagtctcatataagaagtcttactactgctttctatggcaagttccttttctattgcatcttcccaaagacaagatgctcatctgcaaaggggtgataagatttacttggagggattttatggaaaattcagtgcaataattgcttttttttttttttttgcagtagcagtttacatagtacagcattctgcaaaaattgcatgaaatgtggacacaagatgtactgtatgacttaattacctgtcattctctgacaccattactacctactagaagttcaaataatttatctttaacattgcaatatctgataaactttttaaaatgtaaataattcaaagccttgaaaatctatcatgaatctgctcaacatttcaaagtgactattttgaaatgcctataaatgctatatacctg

SEQ ID NO: 47488 - protein, 2135 aa, Artificial Sequence
  derived and/or modified sequence
MPALGPALLQALWAGWVLTLQPLPPTAFTPNGTYLQHLARDPTSGTLYLGATNFLFQLSPGLQLEATVSTGPVLDSRDCLPPVMPDECPQAQPTNNPNQLLLVSPGALVVCGSVHQGVCEQRRLGQLEQLLLRPERPGDTQYVAANDPAVSTVGLVAQGLAGEPLLFVGRGYTSRGVGGGIPPITTRALWPPDPQAAFSYEETAKLAVGRLSEYSHHFVSAFARGASAYFLFLRRDLQAQSRAFRAYVSRVCLRDQHYYSYVELPLACEGGRYGLIQAAAVATSREVAHGEVLFAAFSSAAPPTVGRPPSAAAGASGASALCAFPLDEVDRLANRTRDACYTREGRAEDGTEVAYIEYDVNSDCAQLPVDTLDAYPCGSDHTPSPMASRVPLEATPILEWPGIQLTAVAVTMEDGHTIAFLGDSQGQLHRVYLGPGSDGHPYSTQSIQQGSAVSRDLTFDGTFEHLYVMTQSTLLKVPVASCAQHLDCASCLAHRDPYCGWCVLLGRCSRRSECSRGQGPEQWLWSFQPELGCLQVAAMSPANISREETREVFLSVPDLPPLWPGESYSCHFGEHQSPALLTGSGVMCPSPDPSEAPVLPRGADYVSVSVELRFGAVVIAKTSLSFYDCVAVTELRPSAQCQACVSSRWGCNWCVWQHLCTHKASCDAGPMVASHQSPLVSPDPPARGGPSPSPPTAPKALATPAPDTLPVEPGAPSTATASDISPGASPSLLSPWGPWAGSGSISSPGSTGSPLHEEPSPPSPQNGPGTAVPAPTDFRPSATPEDLLASPLSPSEVAAVPPADPGPEALHPTVPLDLPPATVPATTFPGAMGSVKPALDWLTREGGELPEADEWTGGDAPAFSTSTLLSGDGDSAELEGPPAPLILPSSLDYQYDTPGLWELEEATLGASSCPCVESVQGSTLMPVHVEREIRLLGRNLHLFQDGPGDNECVMELEGLEVVVEARVECEPPPDTQCHVTCQQHQLSYEALQPELRVGLFLRRAGRLRVDSAEGLHVVLYDCSVGHGDCSRCQTAMPQYGCVWCEGERPRCVTREACGEAEAVATQCPAPLIHSVEPLTGPVDGGTRVTIRGSNLGQHVQDVLGMVTVAGVPCAVDAQEYEVSSSLVCITGASGEEVAGATAVEVPGRGRGVSEHDFAYQDPKVHSIFPARGPRAGGTRLTLNGSKLLTGRLEDIRVVVGDQPCHLLPEQQSEQLRCETSPRPTPATLPVAVWFGATERRLQRGQFKYTLDPNITSAGPTKSFLSGGREICVRGQNLDVVQTPRIRVTVVSRMLQPSQGLGRRRRVVPETACSLGPSCSSQQFEEPCHVNSSQLITCRTPALPGLPEDPWVRVEFILDNLVFDFATLNPTPFSYEADPTLQPLNPEDPTMPFRHKPGSVFSVEGENLDLAMSKEEVVAMIGDGPCVVKTLTRHHLYCEPPVEQPLPRHHALREAPDSLPEFTVQMGNLRFSLGHVQYDGESPGAFPVAAQVGLGVGTSLLALGVIIIVLMYRRKSKQALRDYKKVQIQLENLESSVRDRCKKEFTDLMTEMTDLTSDLLGSGIPFLDYKVYAERIFFPGHRESPLHRDLGVPESRRPTVEQGLGQLSNLLNSKLFLTKFIHTLESQRTFSARDRAYVASLLTVALHGKLEYFTDILRTLLSDLVAQYVAKNPKLMLRRTETVVEKLLTNWMSICLYTFVRDSVGEPLYMLFRGIKHQVDKGPVDSVTGKAKYTLNDNRLLREDVEYRPLTLNALLAVGPGAGEAQGVPVKVLDCDTISQAKEKMLDQLYKGVPLTQRPDPRTLDVEWRSGVAGHLILSDEDVTSEVQGLWRRLNTLQHYKVPDGATVALVPCLTKHVLRENQDYVPGERTPMLEDVDEGGIRPWHLVKPSDEPEPPRPRRGSLRGGERERAKAIPEIYLTRLLSMKGTLQKFVDDLFQVILSTSRPVPLAVKYFFDLLDEQAQQHGISDQDTIHIWKTNSLPLRFWINIIKNPQFVFDVQTSDNMDAVLLVIAQTFMDACTLADHKLGRDSPINKLLYARDIPRYKRMVERYYADIRQTVPASDQEMNSVLAELSWNYSGDLGARVALHELYKYINKYYDQIITALEEDGTAQKMQLGYRLQQIAAAVENKVTDL

SEQ ID NO: 47489 - protein, 1952 aa, Artificial Sequence
  derived and/or modified sequence
MPALGPALLQALWAGWVLTLQPLPPTAFTPNGTYLQHLARDPTSGTLYLGATNFLFQLSPGLQLEATVSTGPVLDSRDCLPPVMPDECPQAQPTNNPNQLLLVSPGALVVCGSVHQGVCEQRRLGQLEQLLLRPERPGDTQYVAANDPAVSTVGLVAQGLAGEPLLFVGRGYTSRGVGGGIPPITTRALWPPDPQAAFSYEETAKLAVGRLSEYSHHFVSAFARGASAYFLFLRRDLQAQSRAFRAYVSRVCLRDQHYYSYVELPLACEGGRYGLIQAAAVATSREVAHGEVLFAAFSSAAPPTVGRPPSAAAGASGASALCAFPLDEVDRLANRTRDACYTREGRAEDGTEVAYIEYDVNSDCAQLPVDTLDAYPCGSDHTPSPMASRVPLEATPILEWPGIQLTAVAVTMEDGHTIAFLGDSQGQLHRVYLGPGSDGHPYSTQSIQQGSAVSRDLTFDGTFEHLYVMTQSTLLKVPVASCAQHLDCASCLAHRDPYCGWCVLLGRCSRRSECSRGQGPEQWLWSFQPELGCLQVAAMSPANISREETREVFLSVPDLPPLWPGESYSCHFGEHQSPALLTGSGVMCPSPDPSEAPVLPRGADYVSVSVELRFGAVVIAKTSLSFYDCVAVTELRPSAQCQACVSSRWGCNWCVWQHLCTHKASCDAGPMVASHQSPLVSPDPPARGDGDSAELEGPPAPLILPSSLDYQYDTPGLWELEEATLGASSCPCVESVQGSTLMPVHVEREIRLLGRNLHLFQDGPGDNECVMELEGLEVVVEARVECEPPPDTQCHVTCQQHQLSYEALQPELRVGLFLRRAGRLRVDSAEGLHVVLYDCSVGHGDCSRCQTAMPQYGCVWCEGERPRCVTREACGEAEAVATQCPAPLIHSVEPLTGPVDGGTRVTIRGSNLGQHVQDVLGMVTVAGVPCAVDAQEYEVSSSLVCITGASGEEVAGATAVEVPGRGRGVSEHDFAYQDPKVHSIFPARGPRAGGTRLTLNGSKLLTGRLEDIRVVVGDQPCHLLPEQQSEQLRCETSPRPTPATLPVAVWFGATERRLQRGQFKYTLDPNITSAGPTKSFLSGGREICVRGQNLDVVQTPRIRVTVVSRMLQPSQGLGRRRRVVPETACSLGPSCSSQQFEEPCHVNSSQLITCRTPALPGLPEDPWVRVEFILDNLVFDFATLNPTPFSYEADPTLQPLNPEDPTMPFRHKPGSVFSVEGENLDLAMSKEEVVAMIGDGPCVVKTLTRHHLYCEPPVEQPLPRHHALREAPDSLPEFTVQMGNLRFSLGHVQYDGESPGAFPVAAQVGLGVGTSLLALGVIIIVLMYRRKSKQALRDYKKVQIQLENLESSVRDRCKKEFTDLMTEMTDLTSDLLGSGIPFLDYKVYAERIFFPGHRESPLHRDLGVPESRRPTVEQGLGQLSNLLNSKLFLTKFIHTLESQRTFSARDRAYVASLLTVALHGKLEYFTDILRTLLSDLVAQYVAKNPKLMLRRTETVVEKLLTNWMSICLYTFVRDSVGEPLYMLFRGIKHQVDKGPVDSVTGKAKYTLNDNRLLREDVEYRPLTLNALLAVGPGAGEAQGVPVKVLDCDTISQAKEKMLDQLYKGVPLTQRPDPRTLDVEWRSGVAGHLILSDEDVTSEVQGLWRRLNTLQHYKVPDGATVALVPCLTKHVLRENQDYVPGERTPMLEDVDEGGIRPWHLVKPSDEPEPPRPRRGSLRGGERERAKAIPEIYLTRLLSMKGTLQKFVDDLFQVILSTSRPVPLAVKYFFDLLDEQAQQHGISDQDTIHIWKTNSLPLRFWINIIKNPQFVFDVQTSDNMDAVLLVIAQTFMDACTLADHKLGRDSPINKLLYARDIPRYKRMVERYYADIRQTVPASDQEMNSVLAELSWNYSGDLGARVALHELYKYINKYYDQIITALEEDGTAQKMQLGYRLQQIAAAVENKVTDL

SEQ ID NO: 47490 - protein, 746 aa, Artificial Sequence
  derived and/or modified sequence
MPFRHKPGSVFSVEGENLDLAMSKEEVVAMIGDGPCVVKTLTRHHLYCEPPVEQPLPRHHALREAPDSLPEFTVQMGNLRFSLGHVQYDGESPGAFPVAAQVGLGVGTSLLALGVIIIVLMYRRKSKQALRDYKKVQIQLENLESSVRDRCKKEFTDLMTEMTDLTSDLLGSGIPFLDYKVYAERIFFPGHRESPLHRDLGVPESRRPTVEQGLGQLSNLLNSKLFLTKFIHTLESQRTFSARDRAYVASLLTVALHGKLEYFTDILRTLLSDLVAQYVAKNPKLMLRRTETVVEKLLTNWMSICLYTFVRDSVGEPLYMLFRGIKHQVDKGPVDSVTGKAKYTLNDNRLLREDVEYRPLTLNALLAVGPGAGEAQGVPVKVLDCDTISQAKEKMLDQLYKGVPLTQRPDPRTLDVEWRSGVAGHLILSDEDVTSEVQGLWRRLNTLQHYKVPDGATVALVPCLTKHVLRENQDYVPGERTPMLEDVDEGGIRPWHLVKPSDEPEPPRPRRGSLRGGERERAKAIPEIYLTRLLSMKGTLQKFVDDLFQVILSTSRPVPLAVKYFFDLLDEQAQQHGISDQDTIHIWKTNSLPLRFWINIIKNPQFVFDVQTSDNMDAVLLVIAQTFMDACTLADHKLGRDSPINKLLYARDIPRYKRMVERYYADIRQTVPASDQEMNSVLAELSWNYSGDLGARVALHELYKYINKYYDQIITALEEDGTAQKMQLGYRLQQIAAAVENKVTDL

SEQ ID NO: 47491 - DNA, 6408 bp, Artificial Sequence
  derived and/or modified sequence
atgcccgcactgggaccagccttacttcaagccttgtgggctggctgggttctgaccctgcaaccactcccccctacagcgttcactcccaacggcacatatctccagcaccttgccagagatcccacgtccggcaccctctaccttggcgcaaccaatttccttttccagctctcgccaggcctccagctggaggctactgtctctacgggcccagtcctcgatagtcgtgactgtctcccccctgtcatgccggacgaatgtccacaagctcagccgactaacaatcccaatcagctgctcctggtgtcacctggcgctttagtggtgtgcggatccgtgcaccagggagtctgtgaacagagacgcttaggacaactggaacagctcctgttgagaccggagcggccaggggatactcagtatgtggctgccaacgatccagctgtgagcactgtcggactcgtggctcaaggcctggctggcgaaccactattgtttgttggcagaggctacacctcccgaggagtggggggaggcattccaccgattactacccgggctctttggccgcctgatccccaggcggcatttagctatgaggagactgccaaactggccgtaggcaggctttcggagtactcccatcatttcgtcagtgcattcgcaagaggggcttcagcctattttctgttccttagaagagatctgcaggctcaatcccgcgctttcagagcatatgtgtcaagggtatgtctccgggatcagcattactactcctatgtcgagttgcccctggcctgtgaaggaggacgatatggtctcatccaagcagcagcagttgccacatctcgcgaggtagcacatggggaggtactgttcgcagccttctccagcgcagcacctccaacggttggcagacctcccagcgctgccgcaggcgcttcaggcgcaagtgccctgtgtgctttccctctcgatgaggtggaccgactcgctaacaggacgagggatgcctgttataccagggagggaagagcagaagatggaacagaagtagcatacatcgaatacgatgtgaactccgattgcgctcagctgcccgtggataccctagatgcatatccttgcggttcagaccataccccaagcccgatggcaagtagagtgccccttgaagccacgccaatcctggagtggccaggtattcaactgacagccgtggcagtgactatggaggacggacatacgatcgcattcttaggggactcccaagggcagcttcacagggtctacctcgggccaggcagcgacggccacccctactccacgcagtccattcagcagggatccgccgtgtctcgtgatctgactttcgatggtaccttcgaacacctgtatgtgatgacgcagagtacccttctgaaggttcctgtcgcttcttgtgcccagcacctggattgtgccagttgtttggctcacagggacccatactgcggatggtgcgtccttctcggcaggtgtagcaggagaagtgaatgttctaggggtcaggggcctgaacaatggctgtggtctttccagccggagctgggctgtctacaggttgccgctatgtctcctgccaacatttcccgcgaagaaacccgcgaggtgtttctctccgttcccgacttgcctcccctgtggcctggagagtcatatagttgccattttggtgagcaccagtcccccgcactgcttactggcagcggggtgatgtgcccatcgcccgatccatccgaggccccagtcctgcccaggggagctgattatgtgagcgtgagtgtggagctacgcttcggcgcagtggtcatcgctaaaactagtttgtccttctacgactgcgtcgcggtgactgagctccgtccctcggcacaatgccaggcttgtgtaagtagcagatggggatgtaattggtgcgtgtggcaacacctgtgtacccataaggccagttgtgatgccggaccaatggtggccagccaccagtcccccctggtgagtcccgacccgccagctagaggcggtccatcacccagtcctcctactgcccctaaagcccttgcgaccccagcacctgacaccctgcccgtggaacctggggctccaagtacggcaaccgcatcggacatcagtcctggagccagcccctcgctgttgagcccatggggtccctgggcgggttcaggttccatcagctctcctggttccacgggctctcctttacacgaagagccctcaccacctagcccccagaatggaccgggtaccgctgtgccagcaccaaccgattttcgccctagtgctactccagaggatctgctcgcgtctccactcagcccaagcgaggtcgctgccgtccccccagccgatccagggccagaggcactccacccaaccgtccccttggaccttcctccagcgacggtgcccgctaccactttccccggtgcaatgggatccgtgaaacccgcactcgactggctaactcgggaaggtggcgagctacctgaagccgatgaatggacgggaggcgatgcccctgctttttccacatccacactgctgtctggagacggcgactctgcggagctggaaggacctcctgctcctttaatcctgccaagttcccttgattatcagtatgacactcccggattgtgggaattggaggaagcgaccttgggcgcaagttcatgtccatgcgtggagagcgtgcaaggctcaactctaatgcccgtacacgtggagcgggaaatcagactcctaggcagaaacctacatctcttccaagacgggcctggtgacaatgaatgtgtgatggagctcgagggcttagaggttgtggttgaagctcgcgtcgagtgcgagcctccccctgacacacagtgccacgttacttgtcagcagcaccagctgagctatgaggctctgcagccagagctgagggtgggattatttcttaggagagccggacgactgcgcgtagattccgctgaagggctgcacgtggtgctgtacgattgctcggtcggacacggagattgcagccgctgccaaaccgccatgccgcagtacgggtgtgtgtggtgcgaaggggagcgacccaggtgtgtgacacgtgaggcgtgtggcgaagctgaagccgtggcaacgcagtgtccagcaccactcattcattctgtcgaacctctgaccggaccggtcgacgggggaacccgagtcaccattcgtggctctaaccttggtcagcacgttcaggacgtgcttggtatggtgactgtagctggtgtgccatgcgccgtcgacgcccaggagtacgaggtcagtagcagccttgtatgcattactggagccagcggggaagaagtagctggggcaactgctgtggaggttcccggacgcggacgcggtgtgagtgagcacgatttcgcctatcaagaccctaaggttcacagcatcttccctgctagaggcccacgggctggtggaacccgtctgacactcaatggatccaaactgcttactggtagacttgaggatattcgtgttgttgtgggcgatcagccctgccatctactgccagagcaacagtccgagcagcttcgttgtgagaccagcccacggcctacccccgcaacactcccagtggctgtgtggtttggagccaccgagcgccgtctgcagagggggcagttcaagtataccctggatccaaatattaccagcgcaggacctaccaagtcttttctgagcgggggacgcgaaatatgtgtccggggacaaaatctggatgtggtgcagacgcctaggatccgagttacagtggtgagcagaatgctgcaaccctctcagggcttgggcaggcggcgtcgggtggttccagaaactgcctgcagcttgggaccctcttgcagcagccaacagttcgaggaaccctgtcatgtgaactcttcgcaacttattacctgcaggactcccgcactcccagggctgcccgaggacccctgggttcgggtggagttcattctggacaacctagtattcgattttgcaacgttaaaccccacacctttcagttacgaagctgatcccacactccagcctttgaatcctgaagacccaacaatgcccttccggcacaagccagggagcgtgttttctgtggagggggagaacctcgacctggccatgagcaaagaagaggtcgtggccatgattggtgatggcccatgtgttgtgaaaactctcacacgccatcatttatattgtgagccacccgtcgagcagccacttccacgccaccatgctctgagagaagcacccgatagtctccccgagttcaccgtacaaatgggaaaccttaggttttcacttgggcacgttcagtatgacggggagagtcctggggctttcccagtggctgcccaggtgggactgggggtggggacaagcctcctggccttaggagttatcatcatcgttctgatgtaccgtaggaagtcgaagcaggctctgagagattacaaaaaggtgcagatccagctggaaaacctggagagctccgtacgtgaccggtgtaaaaaggagttcacagatctaatgacggagatgacagacctaacttcagaccttctcgggagtggcatcccctttcttgactacaaggtgtatgctgaacgtattttttttccaggtcaccgcgaaagtcccctgcaccgggacctgggcgtgcctgagtcacgccgtccgactgtggaacagggtctgggccagttgtccaatctcctgaacagtaaacttttcctgacaaagttcatccacaccctggaatcacagcgaacgttttcagctcgtgaccgagcatatgtagcgtctctgcttacagtggctctgcatggaaagttagagtattttactgatatcctcagaacacttctgagtgatctggtggcgcagtacgtggctaaaaaccccaagcttatgttacggagaacagagacagtcgtggagaagttgctcactaactggatgtctatttgtctgtacactttcgttcgggactctgttggcgaaccgctgtatatgctttttcggggtatcaaacatcaagtcgacaagggcccagttgattcagttaccggcaaagccaagtatacgctgaatgacaacagactgttgagagaggatgtcgaatacagacctctgactctgaacgcattgttggccgtgggcccaggcgctggcgaggcccagggcgttccagtgaaggtgctggactgtgataccatttctcaggcaaaagagaagatgctggatcagctgtacaaaggcgtgcctctcacgcagcgaccagatcccaggaccttggatgtggagtggcggtcaggagtggccggacatctgatcctatcggacgaggatgtaaccagcgaggtgcaggggctatggcggagattaaatactctacagcactacaaagtgcccgacggagccacggtggcactcgtcccatgcctaaccaaacacgtgctcagagaaaaccaagattatgtacctggagagcggacacccatgctggaagatgttgatgagggtggcattagaccctggcatcttgtcaaaccctccgacgaacccgagccaccccgtcccaggaggggcagccttagaggaggcgaaagagaaagagcgaaagcaataccagagatttatctgactcgattgctctctatgaagggcactctgcagaagttcgtggacgatctgttccaagtcatactatctactagtagacctgtgccactggcagttaagtacttttttgatctgcttgacgaacaagcccaacagcatggaatctccgatcaggacacaattcatatctggaaaaccaattctttacccctaaggttctggatcaatataatcaaaaatcctcaattcgtgttcgatgtccaaaccagtgacaatatggacgcagtcctgctggttatcgcccagacctttatggatgcctgtaccctggccgaccacaagctagggcgagatagtcccatcaacaagctgctgtatgctagggacattccaagatacaaacgaatggtggaacggtactatgccgacataagacagaccgtacctgctagcgaccaagaaatgaactcagttcttgccgagttatcatggaactattccggggacctcggagcacgggtggcattgcacgagctgtacaaatatattaataaatactacgaccagattatcacagcactcgaagaagatggtacggcgcagaaaatgcagctgggctatcgcctgcagcagattgcagccgcagtggaaaacaaggtgaccgacctttag

SEQ ID NO: 47492 - DNA, 5858 bp, Artificial Sequence
  derived and/or modified sequence
atgcccgcactggggccagctctgctgcaggcgctctgggccggatgggtcttgaccctgcagccactgccgccaaccgctttcacacctaacggcacctacctgcagcatctggcacgtgatcccaccagtggaacgctttacctgggcgcaacaaattttctgtttcaacttagccccggtctgcagttagaggctacagtgagcactggccctgtactggattctagggattgtttgcctcccgtgatgcccgacgagtgcccacaggctcagcccacaaacaaccctaatcaactcttgttggtttcccccggtgcactggtggtctgtggcagcgtgcaccaaggagtgtgtgaacaaagaaggttgggacagctggagcaactactgctgcgaccagagaggcccggtgacacacagtatgtggctgcaaacgaccctgccgttagtactgtggggctggtggctcagggactggcgggagagcccttgctctttgtgggccgtggctacacatctcggggtgtaggaggtggaatccccccaattaccacccgcgctctctggccccctgacccgcaggcagctttctcctatgaggagaccgcaaagctggccgttggtcgcctctctgaatactcccatcacttcgttagcgcattcgcccgaggcgcaagtgcttatttcctgtttttacggcgagacctgcaggctcagagtcgggctttccgtgcatatgtgagccgtgtgtgtctacgggatcagcattactacagttatgtggaactgccacttgcttgcgaaggagggagatatggcctcattcaagccgcagctgttgctactagcagagaagtcgcccacggagaagtcctgttcgcagccttttcctccgccgcacctccaactgtcggaaggccaccatctgccgctgccggtgcctccggagcgtccgcactgtgcgctttccccctggacgaagttgacagactggcaaatcggacccgggatgcatgctacacccgcgagggacgagcggaggatggaacagaggttgcctacattgaatacgatgtcaatagcgactgtgcccagctgccagtagatacattagacgcttacccttgcggctccgaccacactcctagcccaatggcatctcgagtgcctctggaagcaactcccattctcgagtggcctggtattcaactaacggccgtggcagtcactatggaagatggacatactattgcctttctgggggattcacagggacaacttcatcgcgtctatctgggcccaggcagcgatgggcacccgtacagcactcagagtattcagcagggcagcgccgtgtccagagacttgactttcgatggcaccttcgaacatctgtacgttatgacacagtccactctccttaaggtcccggtggcctcttgcgcacagcacctggactgcgcaagctgtttggctcaccgagacccctattgtgggtggtgtgtactgctgggcaggtgctccagacgtagcgagtgtagccgaggacagggacccgagcagtggttgtggtcttttcaaccagagttagggtgcctgcaagttgcagccatgtcccccgcaaatatcagccgggaggaaacccgagaggttttcctaagcgttcccgatctcccgcctttgtggcccggagaatcttactcatgtcactttggcgagcaccagagtcccgctttgctcacaggttctggtgtgatgtgtccatcccccgatcccagtgaagcaccagttcttcccaggggagccgattatgtgtccgtcagtgtggagctccggtttggtgccgtagtcatcgcaaagacgtctttgagcttctacgactgtgttgcggtgacggaactgcggccatcagcccagtgtcaggcctgtgtttcaagccggtggggttgtaattggtgtgtctggcaacacctgtgtacccataaagccagctgtgatgccggaccgatggtggccagtcatcaatcccccttggtttcgcccgacccccctgccaggggggacggggattctgctgagctggagggacctcccgcaccgttgattcttccgtcttcactggactaccaatacgatacacctggcttgtgggagctggaggaggctaccctgggcgcatccagttgtccatgtgttgagagcgtgcagggcagtaccctgatgccagtgcatgtcgaacgggagattcgcctgctcggacgaaacctgcatctcttccaggatggacctggagataatgagtgcgtgatggaactcgaggggcttgaagtcgttgttgaagctcgcgttgagtgcgagccgcctccagatacgcaatgccacgtcacatgtcagcagcatcagctttcgtatgaagctttacagcctgaacttcgcgtgggcctgttcttgaggcgggcaggaaggctgcgagtggattccgctgagggactgcatgtagtgctctacgattgcagtgtgggacacggcgactgcagtcgctgccaaaccgccatgcctcagtatgggtgcgtgtggtgtgaaggtgaaagacccaggtgcgtgacacgcgaggcctgtggggaagcggaagccgtcgccactcagtgccccgcacctctaattcatagcgttgagcccctaacaggcccagtcgatgggggaaccagagtgactatacggggtagcaacctgggccagcatgtgcaggatgtactgggcatggtgactgtggccggagttccctgcgccgtggacgcccaggagtacgaagtgtctagttcgttggtgtgcatcaccggcgctagcggagaggaggttgcaggcgctacagccgttgaggtacccggtagaggcagaggtgtgtctgaacatgacttcgcctatcaggaccctaaagtgcactctatatttccagcgagaggccctcgtgcaggcggtacacgactgactctgaacggatcaaagttgctgactgggagactggaagatatcagggtggtggtgggtgaccaaccttgccacctgcttccagagcagcagagcgagcaattgcggtgcgagacttcccccagacccacaccagctaccctgcccgtggccgtgtggttcggggctactgagcggagacttcagaggggccaatttaagtataccttggaccccaacatcacctctgccggacccactaagtcatttctgagcggtggacgtgagatctgtgtaagaggacagaatctggacgtggtccaaacccccagaattagagtgaccgttgttagtcggatgctgcagcccagccagggcctgggccgacggagacgcgtggtccccgaaaccgcgtgctccctgggtccatcttgtagcagtcagcagtttgaagagccttgccacgtgaacagttcgcaactgattacatgcagaactcccgcactacccggactccccgaggatccttgggtccgggtcgaatttattcttgacaacctggtcttcgatttcgccacccttaacccaacacccttctcatatgaggccgaccctactctgcaacctctaaaccctgaggaccctactatgccattcaggcacaagccagggtccgtattctccgtggagggcgagaacttagatctggcaatgtcgaaggaggaggtggttgctatgattggagatggcccatgtgtggtcaaaactctcacgcggcatcacttgtactgtgaaccaccagtcgagcagccgttgcccagacatcacgcgcttagagaggctccagactcacttccggagttcacagtgcaaatgggaaacttaaggttttctctgggtcacgtgcaatatgacggggaatcgccgggtgctttccccgttgctgcccaagtcggtctgggcgtgggcacatctctcctggccctcggagttattattatcgtgctcatgtaccggagaaaatccaagcaggcccttagagattataaaaaagtacagattcaactggagaatcttgaaagctctgtaagagataggtgcaaaaaggagttcacagatcttatgactgagatgactgatctgacttcggacctgctggggtccggcatccctttcctggattataaagtctatgcagaaagaatcttttttcctggccatagagagtcccccctacacagggaccttggtgtgccagaaagtcggaggcctaccgtagaacagggactgggccagttatccaacctgctcaattcaaagttgtttctgacaaagtttatccacaccttggagtctcagagaaccttttcggctagagacagggcatacgtcgcctcgcttctcactgttgctctgcatgggaagctggaatattttaccgatatccttcgcacccttctgagtgacctggtggcgcagtatgttgccaagaatcctaagctcatgctccggaggaccgaaactgtggtcgaaaaactgttaacgaactggatgtccatctgtctgtatacatttgtgagagactctgtcggtgaacctctttacatgctttttagggggattaagcaccaggtcgacaagggaccagttgatagcgttactggaaaagccaaatatacactgaatgacaatcgtcttctgagagaagacgttgaatacagacccctgaccctgaacgctcttctggctgttggccctggagccggtgaggcccagggagtgcccgtaaaagtcctcgactgtgacactatttctcaggcaaaagagaagatgttggatcagttatacaaaggagtgccactgactcagcgtccagaccctcgcactcttgatgtagagtggcgaagtggggtggctggacacctcatcctgtcagacgaagatgttacatccgaggtccaggggctgtggcgccgactgaacacactacaacactataaagtgccggatggcgcaactgtggcactcgtcccttgtctgaccaaacacgtgctacgcgaaaatcaggattacgtacccggagagcggaccccaatgctcgaagatgtggacgagggaggaattagaccgtggcatctggtcaagcccagcgacgagcctgagccgcctcggcctagaaggggctctctgcggggaggtgagcgggagagggctaaagcaattcccgagatctacttgacccggctgctatccatgaaaggaacgcttcagaaattcgtggacgacttgtttcaggtcattctcagtacctctcgacctgtacctctggcagtgaaatatttcttcgacctgcttgacgagcaggcgcagcagcacggcatctctgaccaggacactatccacatttggaagactaatagtctgcccctgcgcttttggattaatatcataaagaatccacagttcgtgttcgatgtgcagactagcgataacatggatgccgtgctcctcgtgattgcccagaccttcatggatgcctgcaccttggccgatcacaaactgggacgcgactctcctataaataaactgttgtatgcgagagacattcccaggtacaagcgtatggtcgagcggtactatgcggacattcgccagacggtgccagcatcagatcaggagatgaactccgtactggccgaactttcttggaattactccggcgacctgggcgctcgagtcgctttgcacgaattatataagtacatcaataagtattacgaccagattattaccgctctggaggaggatgggactgctcaaaaaatgcagttgggctacaggctgcagcaaatcgccgcagcagtggaaaacaaagtgacagacctcta

SEQ ID NO: 47493 - DNA, 6408 bp, Artificial Sequence
  derived and/or modified sequence
atgcctgcgttgggccctgccctcctccaggccctgtgggccggatgggtattgacgctgcagcccttacctccgacggccttcacccccaatgggacttatctgcaacacctcgcaagagatcccacaagtgggactttgtatctcggagcaacaaactttctctttcagctgagccctggcctgcagttggaggccacagtgtctactggcccagtgcttgactcgagggactgcctcccacccgttatgccagatgagtgcccgcaggcccagccaaccaacaaccccaaccagctgctgctcgtgtcccccggagccctggtagtgtgcgggagcgttcatcagggcgtgtgcgaacagaggcgactaggccagctcgaacagctgcttcttcgtcctgagcgccctggcgacacccagtacgtcgccgcaaatgacccggcagtgtctaccgtgggtctcgtggcacaggggctagcgggagaacccctactctttgttggacgaggctatacttcccgcggagttggcggaggtatccctcccattactacgcgggcactgtggccaccagacccacaagccgcattttcttatgaggaaaccgccaaattggcagtgggaaggttaagcgagtatagccaccacttcgtgagtgcttttgctagaggagcatctgcctacttccttttcctgagaagggatctccaggctcagtctagagcttttagagcttacgtcagccgagtgtgtttgcgagaccagcactactattcctacgtggaattgcctctcgcatgcgagggtggaagatacggccttatccaggcagccgcagtcgcgacttctagggaagtcgcccacggcgaagtgctgttcgcggctttctcctccgctgcccctcccacagtggggcgacctccatcggctgctgccggagcctccggtgcctctgcgctgtgcgccttcccattagacgaggtggatagattagccaacagaacaagagacgcttgttacacacgcgaaggtagagccgaggacggaactgaggtggcatacatagagtacgacgtgaattccgactgcgcacagctccccgtggacactcttgatgcatatccatgtggctctgaccacacgcccagtcctatggctagtcgggtgccgctggaggccacccccatactggagtggcctggaatacagcttaccgccgtggccgtgaccatggaggacggccacacgattgccttcctaggggactcgcagggtcaactgcaccgtgtttatttaggacctggaagcgatggacatccctactctacacagtctattcagcagggtagcgccgtttcaagagatttaaccttcgatgggactttcgagcatctgtacgtcatgactcagtctactttgcttaaagtgccagtcgccagttgtgcccaacatttagactgcgctagctgtttagcccatcgcgacccatactgtgggtggtgcgtgctgctgggacggtgttcccgcaggagcgaatgctcaagaggccaaggccctgaacagtggctttggtccttccagcctgaactggggtgtttacaggtagcagcaatgagccccgcaaatatcagccgcgaagagacacgggaggtctttctgtcagtgcctgatctgccccctctatggcccggtgagtcctacagctgtcatttcggggaacaccaatccccagcactgcttaccggatcaggagtgatgtgtcctagcccagacccatcggaggccccagtccttccacgcggtgccgactatgtctctgtcagcgtggagctgaggtttggcgctgtggttatcgctaaaacgtccctgtctttctacgattgtgtggccgtgacggaactccggccttcagcgcagtgccaagcgtgcgtgtccagtcgctggggatgcaattggtgcgtgtggcaacatctctgcacacataaagcgagctgtgatgccggacctatggtggcctctcatcagtcccctttagtctctcctgacccccctgccagaggaggtccctcacccagcccacccaccgctcccaaagcccttgcaaccccagcgcctgacacactacctgtggagccaggagcaccctccacagcaactgccagcgatattagcccgggtgcttccccttcactgctatccccttgggggccatgggctgggtccggatccatctcgtctcctggatctaccgggtctcctctccacgaggaaccaagtccaccgtcaccccagaatggacctggtacagccgtaccagcaccaaccgattttcgcccatcagcaactcccgaggatttactggcttcgcctcttagcccttccgaggttgccgctgtgccacctgccgatccaggacctgaagccttgcaccctaccgttcccctcgaccttccaccagctaccgttccagcaaccacttttcccggagcgatggggtccgttaaacctgccttggactggttgacgcgcgaaggaggcgagttgcccgaggcggatgaatggaccggtggcgacgccccagccttcagcacatccactctcctgtcaggggatggggacagcgccgagctggaaggtccccctgctcctctgatcctcccgtcatcactggactatcaatacgacacacctggcctgtgggaacttgaggaggccacattgggcgcttcttcatgtccgtgcgtggaatctgtgcaaggtagtacactgatgcctgtccatgtcgagcgcgagatacgtctgctgggcagaaatttgcacctatttcaggacggcccaggagataatgaatgcgtgatggaattggagggtctggaggtcgtggtggaagccagagtggagtgtgagccacccccagatacccagtgtcacgtgacctgccagcagcaccagctctcttacgaagccctacagcccgaattgagggtcgggctgttcttgcgacgggctgggcgacttagagttgattctgcagagggcctccatgttgtgctttatgactgcagtgtgggccatggtgattgttcaagatgccagactgccatgccacagtatggctgtgtgtggtgtgagggcgagcggccacgctgtgtgacccgcgaagcttgcggcgaggcagaggctgtagcaactcagtgtcccgcacccctcatccactccgtcgagccccttaccggtccagtggacggcggtacccgagttacaattcgtggttcaaatttgggacagcatgtgcaggacgtacttggaatggttactgtggcaggggttccctgcgcagttgatgcccaggaatatgaggtaagttcatccctggtttgcattacgggagctagcggggaagaagtcgcaggggcaaccgctgtggaagttcctggccgaggaagaggagttagtgaacatgacttcgcataccaagaccccaaagtccactccatattccccgctaggggccctagagcaggaggaacccggttgacgctgaacggctccaaactactgacaggacgactggaggacattagggtggtcgtaggtgatcaaccttgtcatctgctgcctgagcagcagagcgaacagctgcgctgtgaaacgtcccctaggccaacgccagccactctgccagtggccgtgtggtttggggctactgaaaggagactgcagcggggacagtttaagtataccctcgatccaaacatcacatctgcaggtcctacaaaatcttttctgagcggagggagagagatttgtgtgcggggtcagaacctcgatgtggtgcaaactcctcggattagagtgactgtggtgagccgaatgttacaaccaagccaggggctcggaaggcgacgtcgagtggtgccggagacagcgtgctctctggggcctagttgcagctcccagcagttcgaagagccatgccatgttaactccagccagctgattacttgccgtactcctgcgttgcctggacttcctgaagacccttgggtcagagtagaatttatcctcgacaacctggtttttgattttgctactctaaaccctactcccttttcctatgaggcggacccaacgctgcaacctctgaatcccgaagatcctacgatgccattccgacataagcccggtagcgtctttagtgtagagggggagaacctggacttggccatgtcaaaggaggaagtggtcgcgatgattggcgacgggccttgcgtcgtgaagaccttaacacggcaccacttatattgcgaacccccagtggaacagcccttaccaagacatcacgctctgcgagaagcccctgattccctgcccgagttcaccgtgcagatgggcaacctccggttcagcctaggccacgtccaatacgacggcgaaagccctggagcattccctgtcgccgctcaggtaggtctcggcgtcggtacaagtctgctcgcgctcggcgtcattatcatagtgctgatgtaccggaggaagtccaaacaggcactgcgggactacaagaaagtccagatacagctggagaatctggagagctccgtgcgcgatcgatgcaaaaaagaattcacggaccttatgacagaaatgaccgacctcaccagtgacctgctgggcagcggcattcccttccttgactataaggtgtacgccgagagaattttcttccctggccatcgcgaatcccctcttcaccgagacctcggtgttcccgagagcaggcgtcctaccgtggagcaagggctggggcaactgtccaatttgcttaattcaaaactctttctgaccaagtttatccacacactggagagtcagagaacattttccgctcgggacagggcctatgtggcttcactccttacggtggcgctgcatggaaaactcgagtactttacagatatcctgcgtacactgttgtcagaccttgtcgcccagtacgtcgcaaagaaccctaaactcatgttaaggcgaactgagaccgtcgtggagaagctgctgactaattggatgtctatatgcctgtacaccttcgtgagagatagcgtgggggaacccctgtacatgttgttccggggtattaagcaccaggtggataaagggccagtggattcggttacaggcaaggcaaaatatacactgaatgacaaccgtctcctgcgagaggacgtcgagtacagaccacttacactcaacgcccttctggccgttgggccaggggctggagaggcccagggagttccagttaaagtgctggattgtgatactatttctcaagccaaagaaaaaatgctggaccagctgtataagggggtcccgctgactcagcgccctgaccccagaacgcttgatgtggaatggagatccggtgtcgcagggcacctcattctgagtgacgaggatgtcaccagcgaggtgcaaggtttgtggcgaagacttaacaccctgcagcactacaaagttccagatggagcaacagtcgcccttgtcccgtgccttacgaagcatgtgctgcgagagaatcaggattatgttcccggagaacgaacaccgatgctggaagacgtggacgaggggggaatccgcccttggcatctggttaaaccgtcggatgaacctgaaccccctcggccaaggagaggatctttgcgcggtggggaaagggagcgagccaaggctattcctgagatatatttaactagattgctgagcatgaaaggcaccctgcagaaattcgtagacgacctgtttcaggtgatcctctccacaagccgcccagttccgcttgcggtaaagtacttctttgatttgttagacgagcaggctcagcagcatggaatttctgaccaagacacaattcacatttggaaaacaaatagcctcccactgcggttttggatcaacatcatcaagaacccccagtttgtctttgatgtgcaaacctctgacaacatggatgcggtgctgctcgtgatagctcagacctttatggacgcatgtacccttgctgatcacaagctcggcagagattctccaattaacaagctcctttatgccagggatatacccagatacaaaagaatggtggaacggtactacgctgacattcgtcagaccgtccctgctagcgaccaagaaatgaatagcgtcctggccgaactctcatggaactacagcggggacctcggtgcacgagtggcgcttcatgagctgtacaagtacattaataagtactacgatcagattatcactgccctggaagaagacggcaccgcccagaaaatgcagctcggataccgcttgcagcaaatcgccgctgctgttgagaacaaggtaaccgatctgtac

SEQ ID NO: 47494 - DNA, 2241 bp, Artificial Sequence
  derived and/or modified sequence
atgccttttagacataaacctgggagcgtcttttctgttgaaggagaaaatttagacctggccatgtccaaagaggaggttgtggcgatgatcggggacggtccatgcgtggttaagactctgacccgccatcacctctattgtgagccacccgtggaacagcctctgccacgacatcatgcgttaagggaggcacctgacagtttacctgaattcaccgtgcaaatgggcaacctgagattttcacttggtcatgttcaatatgatggagaatcacccggtgccttcccagttgctgctcaggtcggtctgggcgttggcactagtctcctggccctgggggtcatcatcatcgtgttgatgtaccgacgcaagtcaaagcaggcccttcgggattataagaaagttcagattcagctcgagaatctcgagtcgtcagtgagggaccgttgtaaaaaggagtttactgatttaatgacggagatgaccgatttgacttcggacctgctgggctctgggatcccttttttagactacaaggtgtacgccgaaaggatcttcttcccagggcatcgagaaagcccgctgcacagagatctcggcgtgcccgagagccgtcggcctacagtggaacagggtctgggtcagttatcgaacctcctcaatagtaaactttttttgaccaaattcatccacacactggagtcgcagaggacattttctgcccgtgaccgggcatacgtcgcaagtctcttgactgtggccctccatggcaagctggagtacttcactgacatcctgaggacactcttgtcagatttagtggcccagtacgtggctaaaaaccccaaactcatgctgcggagaactgaaacggtagtggagaagctgttaacaaattggatgagtatttgtctgtataccttcgtcagggatagtgtcggggaacctctgtatatgctgtttagaggaatcaagcatcaggtggataaaggaccagtcgactccgtgaccggaaaagctaaatatacactaaatgacaaccgcttgctgagggaagatgtggagtaccggcctctgaccctgaatgccctactagcagtagggcctggcgcaggcgaggctcaaggagttcctgttaaagtccttgattgtgatacaatcagccaggcaaaggagaagatgctggaccagttgtacaagggggttccacttactcagcggcctgatcctagaactctagacgtggagtggaggtctggcgtcgccggacacctgatcttgagcgacgaagatgtcactagtgaggtacaaggattgtggaggagactcaatactctgcagcattacaaagtaccggacggagccaccgtagccttagtgccatgcctgacaaagcatgtcttgcgggagaatcaggattacgtcccaggcgaacgtacccccatgctggaagacgtggatgaggggggaatccgtccatggcatctggtcaagccatcggacgagccagaacccccaagacccaggcggggaagcctccggggaggcgagcgggagagagccaaggccatcccagagatataccttacacgcctgctgtcgatgaagggaacactccagaaatttgtagatgacctcttccaggtgatcctgagtacaagccggcctgtcccactggccgttaagtatttcttcgatctgttagatgaacaggctcagcagcatggcatctcagatcaggatactattcatatttggaagactaattctctgccacttaggttttggatcaacattattaagaacccccaattcgtgttcgatgtgcagacatcggataatatggatgcagttctgttggtgatcgcacagacgttcatggatgcgtgcaccctggccgaccataaattgggccgagatagcccgatcaataagttgctgtacgcccgtgatattcctagatacaagcgtatggtcgagcgctattatgctgacattagacaaactgtgccagcttctgatcaagagatgaattcggttctggctgagctctcctggaattactcaggggatttaggggctcgcgtggctcttcatgagttgtacaagtatataaacaagtactatgatcaaattattacagcactcgaggaagatggcacagcccaaaaaatgcagctgggatatcgtctgcagcaaattgcagctgcagtagagaacaaggtcactgacctctag

SEQ ID NO: 47495 - DNA, 5858 bp, Artificial Sequence
  derived and/or modified sequence
atgcctgccctgggccctgccctgctgcaggctttatgggccggatgggttctgacactgcagcctttacctccaaccgccttcaccccgaatggcacatatctacagcacctcgctagagacccaacctccgggacgctatatttgggcgctacaaatttcctttttcagttgtcacccggtttgcaactggaggccacagtaagcacaggccctgtgcttgacagtcgggactgtctccccccagtcatgcctgatgagtgtccacaggctcagcccactaacaatcccaaccagctcctcctcgtcagccccggtgcactcgtcgtgtgtggctcggttcatcagggcgtgtgcgaacagcgcaggttaggtcagctggagcagcttctgctgaggccagagcgcccaggagatactcagtacgtggccgcaaacgaccctgccgtgtccactgtcggtcttgtggcacagggactggctggggaacctctgctgtttgtaggaagaggttacacatcccgtggagttggagggggaattcctcccatcaccacccgggcactttggcctccagacccccaagccgcattctcctacgaggagacagcaaagctggccgttggcagattgtctgagtacagtcatcatttcgtgtcggctttcgctagaggagcctcagcgtacttcctcttcctccgcagagatttacaggcccaatctcgcgcattccgagcctacgtaagtcgggtgtgtctgcgcgaccagcactactatagttatgttgaactgcctctggcctgtgaagggggaaggtacggtctgatacaggctgcggcagtggctacgtccagggaggtggctcatggtgaagtgttatttgcagcattctcttccgccgctccccctacagtaggacgccctccaagtgccgctgcgggagctagcggagcgtctgccctttgtgcatttccactcgacgaggtggataggctggccaatcggacccgcgacgcctgttatactagagaaggtagggctgaggatggtacagaggtggcttatattgaatatgatgtgaattcagattgcgcacaattgcctgtggatacactggacgcatacccttgcggatctgatcatacacctagccccatggccagccgcgtccctctggaggcaacaccaattctggaatggcctggaatccaattgacggcagttgcggtgaccatggaagatggacacactatcgccttccttggagacagccagggacagctgcatcgcgtgtacctggggccagggtcagacggccacccctacagtactcagagcattcagcagggctcagcggtgtcccgggatctgacttttgatggaacctttgaacatctatacgtgatgacacaatccaccctgcttaaggtccccgttgcttcctgtgctcagcacttggactgtgccagttgtcttgcccaccgcgatccctactgcggttggtgtgttttgctgggtcgctgctctagacgatccgaatgttccagagggcagggccctgagcagtggctctggtcatttcagcctgagcttggctgtctgcaggtcgctgcgatgtctcctgccaatatatcccgggaggaaacaagggaagtgttcctgagcgtacctgacctcccaccactctggccgggagaatcttacagctgccactttggtgagcaccagtcccctgcgctcctgacagggtcaggagttatgtgcccaagtccagacccttcggaggcacctgttctgcccagaggagcggattatgtaagcgtgtccgtcgagctacggtttggcgctgtcgttatagctaaaacctcgctgtcattttacgattgcgtggccgtcaccgaactcagaccaagtgcccagtgtcaggcctgcgtctcgtccaggtggggttgtaactggtgcgtctggcagcacctgtgcactcacaaagcttcctgtgacgctggaccaatggtggcttcacaccagagcccccttgtctcccctgatcctcctgcgcgaggtgacggcgattccgctgaactcgaggggcctccggctccccttattctgcccagcagcctggactatcagtacgatacgcctggcctctgggaactggaagaggccaccctcggagctagctcctgtccctgtgtggagtctgtgcagggatcaaccctgatgccagtccacgtggaaagagagatcaggcttctggggagaaacctgcatctattccaggacggcccaggggataatgagtgcgtgatggaactcgaagggctggaggtagtggtggaggcaagggtcgagtgtgagcctccacccgacactcaatgccatgtcacttgtcagcaacaccagctgagctacgaggccctccaacctgaattgagggtggggttatttctacgtcgtgcaggtcgcctccgcgtcgatagtgccgagggactgcatgtagttttatatgattgttctgtgggccatggcgactgctccagatgtcagaccgccatgccacagtatggatgtgtctggtgtgagggcgagcgcccaagatgcgtgaccagagaggcgtgtggtgaggctgaggctgttgctacccagtgtccagctccgcttattcattcagtcgaacctctgaccgggccagtcgatggcggaacaagagtaactataagaggcagcaacctaggccaacacgtacaagacgttttgggtatggtcactgtggccggagtgccttgtgccgtggacgctcaggagtatgaggtgagtagcagtctggtttgtataaccggggcttcaggggaggaagtggcaggcgcaacagcagtggaagtgccaggacgaggccgtggcgtttctgagcacgacttcgcctaccaagatcccaaagtacactctatctttcccgcacggggtccaagagcaggaggtactagactgacgctgaatggcagcaagctcttgacaggcaggttggaggatatccgcgtggtggtgggggatcagccatgtcatcttctacccgaacagcagtccgagcagttgcggtgtgaaacgagccccaggcccactccagctacactgccagtggcagtctggttcggcgctaccgagaggcgtttgcagcggggtcagttcaaatataccttggatcccaatattacaagcgccggtcctacgaaatcttttctttcagggggaagggagatctgcgtccgaggacagaacctggatgtcgttcagacacctcggatacgggtgaccgtcgtatcccgaatgttacaaccttcccagggtttgggtcgcagacggcgagtcgttcctgagacggcgtgcagcctcggcccatcctgtagctctcagcagttcgaagagccttgtcatgtcaactcctcccaacttatcacctgtcgcaccccagccctgcccggtctgccagaggacccatgggttagggtcgagttcattctggacaatcttgtgttcgactttgctaccctgaaccccacaccttttagttatgaggctgaccccactctacagcctctgaaccccgaagaccccaccatgccttttaggcacaagccgggaagtgttttttccgtggagggtgaaaacctcgatctggccatgtctaaggaagaagttgtcgcaatgataggagacgggccatgtgtggtgaaaactctaacccgccaccatctgtactgtgaacctccagttgaacaacccctgcctcgccaccatgccttgagagaggcgcctgactccctgccggagttcacagtgcagatgggtaatctccggttcagccttgggcatgtgcagtacgatggtgagtccccaggagcttttccagtggcagcgcaagtggggctgggcgtcggcacctcacttcttgctcttggcgtcatcatcatcgtgctcatgtaccgacgcaaaagcaaacaggctttgcgtgattacaaaaaggtgcagattcagctggagaaccttgagtcaagcgttagagatcggtgcaagaaagagtttacagacttgatgaccgaaatgacagacctgactagcgacttgctgggtagcgggattccattcctggattacaaagtttatgcggagcgcatcttcttcccaggacaccgggagtctcctctgcacagagacttaggagtgcctgagtctcgcagacctactgtggagcagggcttgggccagctttcaaatttactgaatagcaaactattcctgaccaagtttatccacacgttggaatcccagcggactttcagtgccagagacagggcttatgtcgcctctctgttgaccgtggctctgcatgggaagttggagtactttaccgatattcttaggacgcttctgagcgatctggtcgctcagtatgtggcaaaaaatccgaagctaatgctgagaagaacagagacagttgtggagaagcttctcacaaattggatgagtatttgtctatacacattcgtaagggattccgtcggcgagcctctatatatgctcttccgaggaatcaagcatcaggtcgataaagggccagtagatagtgtaactggcaaggcaaagtacactttgaatgacaaccggcttttgagggaagatgtggaatacaggccactgacactgaatgcgctgttggccgtcggcccaggagctggtgaggcacagggcgtccctgtgaaggtacttgattgtgataccattagccaggctaaagaaaaaatgcttgatcagctgtataagggagtacccctgactcagcgccctgatccgcgaaccctagacgttgaatggcggtctggggttgcaggccatttgattttaagcgatgaagatgtgaccagcgaagtgcagggactgtggcgtagactcaatacactacaacattacaaggtgccagatggggcaacggtggcactcgtgccttgtctgacaaaacacgttctgcgggagaaccaggactatgtcccgggagagcgtactcccatgctggaggatgtggacgaggggggaatccggccttggcacctggtaaaacccagtgatgagcctgagcccccaagaccgagacgcggatcactaaggggcggagaaagagagcgcgcaaaagccattccggagatctacctcacccggctgctgtcaatgaaagggactctgcagaaattcgtggacgacttgttccaggtgattctatccacctcccgccctgtgcctttagcagtaaagtatttctttgatctccttgacgaacaagctcaacaacacggcatcagcgaccaagatactatccacatttggaagacaaattcgctgccactaaggttctggataaatataatcaaaaatcctcagtttgtgtttgatgttcagacctccgacaacatggatgctgtgctgctcgtgattgctcagacatttatggatgcttgcacgctcgctgaccacaagctaggtcgggattccccaatcaacaaactcctgtatgcacgcgacatcccgcgatataagaggatggtcgagcgctactatgccgacatcaggcaaaccgtgcctgcgagtgaccaggagatgaacagcgtgctggcagagctgtcatggaactattcgggcgatctgggggctcgggtggctttacacgagttgtataaatatatcaacaaatattacgatcagataattacggccctggaggaggatgggacagcccagaaaatgcaactcgggtacagactgcagcagatagcagccgctgtggagaacaaggtgacagatctgta

SEQ ID NO: 47496 - DNA, 6408 bp, Artificial Sequence
  derived and/or modified sequence
atgccggcactgggccctgcacttctccaagcgttatgggcaggttgggtgttaaccctgcagcccctgcccccaacggcctttaccccgaacggaacatatctccagcatctggcgagggatcctaccagtgggacactgtatctaggagcaacaaactttctgttccagttgtcaccggggcttcagttagaagccaccgtctccacgggccctgtgttggactctcgtgattgtctgcctcccgtgatgccggatgagtgtccccaggcacaacctacgaacaaccccaaccagctcctactggtttcccctggcgccctggtggtctgtggttctgtccaccagggagtgtgtgagcagagacggctaggccaacttgagcagctactgttaaggccagaaagaccaggcgatacccagtacgtcgctgctaacgacccagctgttagcacagtcggcctcgttgcgcagggactagcaggcgaacctcttttattcgtgggcaggggttataccagcaggggagtgggaggtgggattcctcccattacgacacgcgcgttgtggccccccgacccccaggccgccttctcctacgaagaaaccgcaaagctggcagttggcagattgtccgaatattcacatcactttgtgtctgccttcgcccggggggcatcagcttactttctctttctgcgccgggatctccaggcccagagccgagcttttagggcttatgtgtccagagtctgtctccgtgatcagcattattacagctacgttgaattaccattagcatgcgaaggaggaagatatgggttgattcaggccgctgctgttgctacctcccgggaggtagcacatggtgaggtgctgttcgccgcgttctcttctgccgcgccaccaaccgttggccgacccccctccgctgccgcaggtgcctcaggtgctagcgcactgtgtgcattcccgttagacgaggtggacaggctcgccaaccgcactagggatgcctgttacacccgagagggaagggcagaagacggcacagaagtcgcttacattgagtatgatgtcaattctgactgcgcacaattaccagtggatacactcgacgcttacccctgcggttcagaccatacgccaagtcctatggcgtcaagagtccctctggaagccacaccaattttagaatggcctggcattcagctgacagcagtcgcagtgaccatggaggacggccacactatagcctttttaggcgattcacaggggcagctgcaccgggtgtacctgggtcccgggagtgacgggcacccgtatagtactcagagcattcagcaaggcagtgctgtctctcgggacctgaccttcgacggcacattcgaacacctgtatgtgatgacccagtccacactgctgaaggtgcctgtggcgtcatgcgcacaacacttagattgcgccagttgtctggcacaccgagatccctactgcggatggtgcgtgctcctgggacggtgctctaggcggtccgagtgtagtagagggcaggggcctgaacagtggctctggtcattccagccagagctggggtgtctacaggtcgcggctatgagcccagccaatatctcccgtgaggaaacaagagaagtgtttctctccgtccctgatctaccaccactttggccaggggagagctacagctgtcactttggcgaacaccagtctcctgcccttctgaccggttccggagtgatgtgcccatcgcccgacccctctgaggctcccgtactgccccgcggcgccgattatgtgtccgttagtgttgagctaagatttggggctgttgttatagcaaagactagtctgtccttctatgactgtgttgctgtaaccgaacttcgaccatcagcccagtgccaagcctgcgtgtcttccagatggggttgcaattggtgtgtgtggcagcacctgtgcactcacaaagcgtcatgtgacgccggccccatggtcgcaagtcaccagagtcccctcgtgagcccagacccgccagctaggggtggcccttccccctctccccccacagctcctaaggcccttgccaccccagctcccgacactttgcctgtggagcctggtgccccaagtaccgccacagccagtgacatctcccccggcgcatcccccagcctcctgtctccctggggcccttgggcgggctcaggctctatcagttctccaggttcaaccgggtctcccctacacgaagaaccctccccccccagcccacagaatggccctggtactgctgtcccagccccaactgactttcgaccttccgcgaccccagaggatcttctggcctcacctctctcccctagcgaagtggctgctgttcctcccgcagatcctggcccggaggcactacatcctacagtgcccctcgacctcccaccagccaccgtccccgccactaccttcccaggggctatgggatccgtaaaacctgccctggattggctgacacgcgaaggaggtgagttacctgaagctgacgaatggactggaggagatgcgccagcattcagcacatccacactgcttagcggcgatggagatagcgccgaactggagggcccgccagcccccttaattctcccaagttcgttagattatcagtatgacacaccagggctgtgggagttagaggaggccaccttaggcgcaagctcttgcccctgcgtcgagtccgttcagggatcaaccttgatgcccgtccacgtggagagagaaattcggctcctagggcgaaatctgcacttgttccaagatggaccaggagacaacgaatgtgttatggagctggaaggacttgaagttgttgtagaggccagggtggagtgcgagcctccaccagatacccagtgccatgtgacctgtcaacagcaccagctaagctacgaggccctgcaaccagaactcagagtgggtctctttctgagaagggccggacgtttgcgcgtcgactctgccgagggcctgcatgtagtgttatacgattgcagtgtgggccatggtgattgctccaggtgccagaccgccatgccccagtacggctgtgtgtggtgcgagggggagaggcctaggtgcgtcactagggaagcctgtggtgaggcagaagctgtcgccactcagtgtcctgcccctttgatccacagcgtggaaccactgaccggtccagtggatggcggcacacgcgtgaccattcgggggagcaatctcgggcagcacgtccaggacgtccttggaatggtcaccgtcgctggtgtgccttgcgctgtggatgctcaggagtacgaggtctcatcgtcacttgtgtgcatcactggcgcatccggagaagaggttgctggtgcgacagctgtggaggttccagggcgaggaagaggggtgtctgagcatgacttcgcctaccaggaccccaaagtgcacagtatcttccctgctcgtggcccgcgcgccggcggcacacgacttaccctgaatggctcaaagttgctcacggggaggcttgaggatatcagagttgttgtgggagatcaaccctgtcatcttctgcccgagcagcaatcagagcaactgcgttgcgagacatcccctcgaccaacacctgcaaccctgcccgtcgccgtttggtttggcgccactgaacggagactccagagaggtcagttcaaatacactctcgacccaaatatcacctccgcagggcctactaaaagcttcctgagcggtggacgggaaatctgcgtgagggggcagaacctagatgtggtacagacgccaaggattagagtaacagttgtgtcacggatgctacagccgagtcagggattaggacggagacggcgcgttgtgcctgagaccgcttgttctttagggcccagctgttccagtcagcaattcgaagagccatgccacgtcaattcatcccagttgataacgtgtcgtacccccgcactgcccggtctccctgaggacccctgggtaagagtggagtttatcttagacaatctcgtcttcgactttgccaccctcaacccaactcccttttcttatgaggcggacccaacattacagcccctgaatcctgaagaccctaccatgccattccgacacaaacctgggtctgtcttcagcgtggaaggagagaacctcgaccttgcaatgtctaaggaagaagtggtcgccatgataggagacgggccctgcgttgtgaaaaccctcacccgtcaccatctgtactgtgagccacctgtggaacagcctcttccccgacatcatgcgctcagggaagccccggattccctaccagaattcacagtgcagatgggcaacctgcggttttctctgggccacgtacagtatgatggcgagagtccaggcgcattcccagtcgccgcgcaggttgggctgggggtcggtacttccctcctggccctaggggtaattatcatcgtcttaatgtatcggagaaaatccaaacaagccttgagagattataaaaaggtgcagatacagttggagaacctggagtccagcgtaagagaccgatgtaaaaaagaattcactgatctcatgaccgaaatgaccgatcttacaagcgacctccttggttcagggataccattccttgactacaaggtatacgcggagcggatttttttcccagggcaccgagagtcccccctgcatcgagacctgggtgtcccagaatcacgccggcccaccgtcgaacaagggctgggtcaactgagcaacctcctgaacagcaaacttttccttacaaaattcatccatactctggagtctcaacgcaccttctcagccagggatagagcttacgtggcgagtttgctgaccgttgccctgcacggaaaactcgagtactttactgacattctacgtaccctgttaagtgatttggtggcccagtatgttgcaaaaaatcctaaactgatgttacgacgtactgagaccgtagtagagaagctcctgaccaactggatgtccatctgcctgtacacctttgtacgcgatagcgtgggagagccactctacatgctgttccggggcatcaaacaccaggtcgacaaggggccggtggacagcgtgaccggtaaggctaaatacacgctcaacgataatcggctgctcagagaagacgtagagtaccggccgttaactctcaatgccttgctcgccgtcggccctggagctggcgaggctcaaggtgtccctgtgaaagtgctagactgtgacaccatttcccaagccaaagaaaaaatgctcgatcaactgtacaagggtgtcccattaacccaaagaccggacccacgaactctggatgtcgagtggcgaagcggcgttgctggccacctcatcttatccgatgaggacgtgacgtctgaagttcaagggctgtggcggagactcaatactctgcaacactacaaagtgccagatggcgccacggtggccctcgtgccatgcctgactaagcatgtcctccgtgaaaaccaggactacgtgcctggcgagcgtactccaatgctggaagacgtagatgagggcgggatccgcccatggcatctggtcaaaccgtccgatgaacctgaacctcctcgtccgaggcgaggatcattgcgggggggcgagagagaacgcgcaaaagcaatccctgaaatctatcttactagactgctctcaatgaaaggaaccctgcagaaatttgtggacgatctattccaggtgatcctatcgacaagccgacctgtaccactggccgttaagtacttcttcgacttgttggatgagcaggcccaacaacacggcattagcgaccaggacacaatccatatctggaagactaactctctgcctctgcgtttctggatcaatatcattaaaaatccccagttcgtgtttgacgttcagacctctgacaatatggatgccgttctcctagtcattgctcagacttttatggacgcatgcacccttgctgaccacaagctgggaagggacagccctatcaataaactgctgtacgccagggatatcccacgttataaacggatggtagagcgatactacgctgatatacggcagaccgtgcccgcatccgatcaagaaatgaactccgtcctggccgaattgtcttggaattattccggggacttgggagctcgtgtcgccctgcatgaactgtataagtatattaacaagtactatgatcagattatcactgccctcgaagaagatggcacagcccagaaaatgcagttagggtatagactgcaacagatagccgcagccgtagaaaataaggtgactgatctttag

SEQ ID NO: 47497 - DNA, 5859 bp, Artificial Sequence
  derived and/or modified sequence
atgcctgccctgggccccgcgttgttgcaggccctgtgggccgggtgggtgctgacactgcagccactgcctccgaccgctttcacacctaatggcacatacctacagcaccttgctcgggatccgacgagcgggaccctttacctgggagccacaaacttcttgtttcaattgtcccctggactgcagttggaagcgacagtttccaccggtcccgttttggatagtagagactgtttgcctccggtgatgcccgatgagtgtccccaggcccagcctaccaataacccaaaccagttgttgctggttagcccgggggccctcgttgtctgtgggagcgttcaccagggtgtatgcgagcagagacgtctgggacagctggaacagctcctcctccggcctgaaagacccggagatacacagtacgtggcagctaacgatcccgccgtctcgacagtcggattagttgcccaagggctggcaggcgagccactgctttttgtcggaagggggtatacgtcacgaggggtcggtggaggcataccaccaatcaccacaagagctttgtggccacccgaccctcaagctgcattttcatatgaggaaacagcgaagctggctgtggggagactgtcggagtatagccatcatttcgtgtcagccttcgcgagaggcgcctctgcttatttcctgtttctccgccgggatctccaggcccagtcccgcgcctttcgtgcatatgtgtctagggtttgtttaagagaccaacactactacagctacgtagaacttcccctggcctgtgaaggcgggcgatatggattaatccaggccgccgctgtggccacctcacgggaggttgcccatggggaggtgcttttcgctgctttcagctcagcagccccccctactgttgggaggcccccgtctgctgccgccggcgcatccggagccagtgccctgtgtgcattcccactggacgaagttgaccgcctagcaaacagaactcgcgacgcatgctacactcgagaaggcagggccgaggacgggacagaggtggcgtacatcgaatatgacgtgaattcagactgtgctcagttaccagtagacactctggacgcatacccctgcggatctgatcacacaccatccccgatggcttcacgggtgccacttgaggccactccaattcttgaatggcctggcatacagcttaccgccgtggccgtcaccatggaagatggtcacactatcgctttcctcggcgatagccaggggcagctccatagagtctatttagggccagggagtgatggtcacccttatagcacacaatcaattcaacagggctctgccgtttcgcgggatctgacttttgacggtactttcgaacacctgtatgtgatgactcagtctaccctgctgaaagttccagtggcctcctgcgcccagcacctcgactgtgcaagttgtttggctcatcgtgatccctactgtggatggtgcgtgctcttaggtcgatgtagccgacggtcggaatgtagtcgcggacaggggcctgaacagtggttgtggtccttccaacccgaactggggtgtctgcaggtcgccgctatgtcccccgcaaatatatcccgggaggaaacacgagaggtgtttctgtctgtcccagatctccctcccctctggccgggagagtcttactcatgccactttggggagcatcaaagccccgccctgctgactggtagtggggtcatgtgcccaagcccagatccctctgaggcacccgtgctgcctcgcggagcagattacgtaagcgtgtccgtcgaactccggttcggggccgtcgtgatcgccaagacaagtctaagcttctatgattgcgttgcggtaacagagctgcgaccgtctgcacagtgccaggcttgtgtgtcttcccgatggggctgtaattggtgtgtgtggcagcacttatgcacccataaggcgtcctgtgatgctggtcccatggtggcatctcatcagtctcctctggtgtctcccgatccacccgcacgaggagatggagactccgctgagcttgaaggccccccagcacccttgattctcccttcctcactggactatcaatatgacaccccaggcttatgggagctcgaagaggccacccttggcgccagttcatgcccttgcgtggaaagtgttcagggatccaccctcatgcctgtgcacgtcgagcgtgagatacgccttctcgggcgcaatctgcatctcttccaagacggccccggggacaacgagtgcgtgatggagctggagggactggaagtggtggtggaagcacgggtggagtgcgaaccaccccctgatacccaatgtcacgtgacttgccagcagcaccagctgagttacgaggccctgcagccagagctacgcgtgggtcttttccttcgccgagctggccgattgcgggtggatagcgctgagggattacacgtggtactctatgactgctccgtgggacacggcgattgctcgagatgccagacggccatgccacaatacggctgtgtgtggtgtgaaggagagagacccagatgcgtgacccgcgaggcgtgcggagaagccgaggccgtggccacccagtgtccagccccgctgatccactccgtcgagcctttaacaggtcccgtggatgggggtacccgagttaccatacgcggcagcaacctaggccaacatgttcaggatgtgctcgggatggtcaccgtcgcaggagtgccgtgtgccgtagacgctcaggaatatgaagtctcctcctcccttgtttgcattaccggagcgagtggcgaagaagtcgctggggccactgcagtggaggtgcctggcagagggaggggagtgagcgagcacgacttcgcatatcaggaccccaaggtgcattccatctttccagcgagaggtccccgagctggtggaaccagactaacccttaatggatctaagctgctcaccgggcgcctggaggacattagggtcgtagtcggcgaccagccttgtcatttacttccagagcagcaatcggagcagctgcggtgtgagacatctcccagaccaacacccgccacgctgccagtcgccgtgtggttcggagctacagagagaaggttacagcgcggacagtttaagtatacgctcgacccaaacatcacatccgctggcccaactaagagctttctgagcggggggagggagatatgtgtcagaggtcagaatctggacgtagtgcagacacctaggatcagagtgactgtcgtttcaaggatgctccagccatcgcagggcttgggtcgcagaaggcgagtcgttccagaaacagcctgttcccttggcccttcctgttcctcacagcagtttgaagagccctgccacgtaaactccagccagctgattacctgtcgtactcctgccctgcctggattgcctgaggatccatgggtgagggtagagttcattcttgacaatctggtctttgattttgccaccctaaacccgacacctttttcctacgaagcagaccccaccctccagcctctaaaccctgaagatcccaccatgcctttcagacacaagcctggctcagtgttttctgttgagggcgagaaccttgatctggcaatgtctaaagaggaagttgttgccatgatcggagacggaccatgcgtcgtaaagaccctgacccggcatcatttatattgtgaaccacctgtggaacaacccttgccacgacaccacgccctgagagaggctcctgatagccttcccgaatttaccgtgcaaatgggcaacttgagattttcattaggacatgtacagtatgacggagaatctccaggggcgttccctgtggcagctcaggtgggcctgggtgttggaacatcccttttggctctgggtgtaattatcatcgtgttgatgtaccgaagaaagtcaaagcaggccctgcgtgattataagaaagtacagatccagttggagaacctggagtcctcagtgcgcgacaggtgtaaaaaggagttcactgacctaatgaccgaaatgacggatctaacctccgacctgctgggttcaggaatcccctttttggactacaaggtgtatgctgaaaggatcttttttccgggacacagggaaagccctttacatagagatctaggtgttcctgaatcacgacgcccaactgtggagcagggcctggggcagctatccaacctcctcaatagcaaactattcctgaccaagttcattcataccctagaatcgcagcgcacatttagtgccagggatagggcatatgtggcttctctcctgacggtggctctccacggcaaactggagtatttcacggacatcctgagaaccctgctatccgacctcgtggcgcaatatgttgcaaagaacccaaagctcatgctccgccggactgagaccgtggtggagaagctgctgactaattggatgagcatttgtctgtatacatttgttcgcgactcagtgggtgagccactgtatatgttattccggggtatcaaacaccaggtggacaaagggcctgtcgatagcgtgactggcaaggccaagtacactctcaatgataacagactcctgagagaggatgtggagtacagaccgcttactctaaatgctctgctcgctgtgggaccaggcgccggcgaggcccagggagtgccggtgaaggtgctggattgtgacactatctcacaggctaaggagaaaatgctagaccagctatataaaggcgtcccactcacgcagaggccagacccccggacattggacgtggagtggcggtcaggcgtggccggacaccttatcctgagcgacgaggacgtgaccagcgaggtgcaggggctgtggagaagactgaacaccctccagcattacaaggtgcctgatggtgctactgtggctctcgtcccctgtctgaccaagcacgtattacgagagaaccaggattacgtgcccggcgagcggacccccatgctggaggacgtggatgagggcgggattaggccatggcatctggtcaaaccttcggatgagccggagccaccacgaccacgccgtggcagcctcagaggaggcgaacgcgagagggccaaggccatacccgagatatatctgactagactgctgagtatgaaagggacactgcaaaagtttgtagatgatttattccaggtgatcctgtctacaagccgccctgttcccttagcagtgaaatatttttttgacctgttagatgagcaagcccagcaacacgggatatcagaccaggacaccattcatatatggaaaaccaattcccttccgctcaggttttggatcaacataatcaagaatccgcagttcgtgttcgacgtccagacaagtgataatatggacgcagtcctgctggtcatagcacagaccttcatggatgcctgtactctggctgatcacaaactaggcagagactctccgatcaacaagctgctctatgcacgagacataccgaggtataagagaatggtggaaaggtactacgccgacatcagacagacagtcccagctagtgaccaggagatgaactcggtcttggcggaattatcctggaattactccggagatctcggcgcccgagtcgcattgcatgaattgtataaatacataaacaagtattacgatcaaattataaccgccttagaggaggacggaaccgcccagaagatgcaactggggtaccgtttacagcagatcgcagctgcagttgagaataaagtaactgatctgtag

SEQ ID NO: 47498 - DNA, 6408 bp, Artificial Sequence
  derived and/or modified sequence
atgccggccttagggcctgctctacttcaggccctatgggcaggctgggtccttacgctgcagccactgccccctaccgcctttacccctaacggcacctatctccaacacctggctagagaccctacgagcggcaccctctatctgggcgcaaccaattttttgtttcaattaagtcctgggcttcagctggaagcaaccgtaagcactggcccggtgcttgactccagagattgtttgcccccggtcatgccagacgaatgcccacaggcgcaacctaccaataatccaaaccagctgctgcttgtcagccctggtgccctggtagtttgcggcagcgttcatcagggtgtgtgtgaacagcgacgcctcggacagctcgagcaattactactgcgtcccgagcgcccaggtgacactcagtatgttgctgctaacgaccctgcagtgtctacagtgggcctggtcgctcagggcctggccggggagcctttattgtttgttggacggggttacactagtaggggcgtaggtggtggaatcccaccgattactactagagctctatggccccctgacccacaagcagcatttagctatgaggaaactgcgaaactagccgtcggtagactctctgagtactcccatcacttcgtgtctgcttttgctaggggtgcatcagcctatttcctgtttctgcggcgggacttacaggctcagtcccgggccttccgcgcctacgtgtcgcgagtgtgtctgagggaccagcactactacagctacgtggaactgccattggcgtgcgagggcggaagatacgggctgattcaggcggccgctgtggccacaagccgggaggtggcccatggcgaggttttattcgccgcattcagctccgcggcacctcccacagtgggccgacctccctccgctgcagctggggcatcaggtgcatcagctctctgcgcttttcccctcgacgaagtagatcgcctggctaacagaacacgcgatgcgtgttatacccgagaaggaagagcggaggatggaacagaagtagcctacatcgagtacgacgtcaacagtgactgcgcacagctgcccgtggacacgctggatgcctacccttgtggcagcgatcacactcccagtcccatggcaagtcgcgtgccgctagaggcaacaccaattctagagtggcctggaatccaacttaccgcagtcgccgtgacaatggaagacggtcacacaatcgcctttctgggagacagccaaggacagcttcatagggtgtacctgggaccagggtccgatggacatccttactcgactcagtctattcagcagggtagcgctgtctcaagagacttgacctttgatggcacttttgagcacctatacgtgatgacacagtctaccctgcttaaggtgccggtcgcttcctgcgcccagcatttggattgcgcaagctgcctggcacacagggatccatattgcgggtggtgcgtgctgttgggtaggtgctccagacgctctgaatgttctcgcggccagggtcctgaacagtggctgtggagttttcagcccgaactagggtgtcttcaggtggctgctatgtcccctgctaatataagtcgcgaagaaacaagagaggtctttcttagcgtacccgaccttccacctctgtggcccggggagtcctacagttgccattttggagaacatcaaagcccagcactccttaccggatcaggcgtcatgtgtccatctccagacccttccgaagccccagtgctgcctaggggggccgactacgtaagtgtcagcgtggaattaaggttcggtgccgtagtgattgcgaaaacaagcctgagtttctacgattgcgttgctgttaccgagttacgccctagcgctcagtgccaagcttgtgttagttctcgatggggatgtaactggtgcgtttggcagcatttatgtactcataaggcctcttgcgacgccggccccatggtggcttcccatcagagtcctttggtgagccctgacccccctgcacggggcggaccgagcccaagcccccccaccgccccaaaggccttagctaccccggctcccgacaccctgccagtggagccaggggccccctctaccgcaaccgcgtcagacataagtccgggggcttctccatcacttttgtctccctggggaccatgggcagggagtgggtccatttcctcccccggctccactggtagtcccctgcatgaagaaccgtctcctccaagccctcagaatgggccgggaacagccgtgcccgcaccaactgatttccggccctccgccactccagaagacctcctggcatcacctctctctcccagcgaggtcgccgccgtaccaccagctgatcccggcccagaagcgttgcaccctacagtgcccttagatcttcctcccgctacagtccccgctacaactttcccaggagcaatgggctccgtcaagccagcgctggattggctgacccgggaaggaggcgaactccctgaagcagatgagtggacaggcggggacgctcccgcatttagcacaagtactctcctatccggcgatggagattccgctgagctggaaggcccgccagcacccctgattctgcctagtagcctggattatcagtatgacacccccggactctgggaattggaggaggccaccctgggcgcttccagttgcccctgcgttgagtccgtgcagggatctactctcatgcctgtccacgtggaacgggaaatacgcctcctcgggaggaaccttcatctcttccaggacggcccaggtgataatgaatgtgttatggagttggaggggctggaagtcgtggtcgaggctagagtggagtgtgagcctcccccagacacgcagtgccacgttacctgccagcagcatcaactgagctatgaagccctgcagcccgaactgagggtcgggctgttccttagaagagcaggcaggttgcgggtggattcagctgaggggctccacgtggtgttatacgactgtagtgtaggacatggtgactgctctcgttgtcaaacggcaatgccacagtatggttgcgtgtggtgtgaaggcgagaggccccgctgtgtcaccagagaggcgtgcggcgaggccgaagctgtggccacccaatgccccgcaccactgattcacagcgtggaacctctgactggacccgtggacggcggaacacgagtgacaatccgtggcagtaacctcggacagcatgtacaggacgtgctggggatggtcacagtggccggagtgccgtgtgccgttgatgcgcaggagtacgaggtctcgtctagtcttgtgtgtatcacgggcgcctctggagaggaggttgctggtgcaaccgcagtggaagtgcccgggcgcggaagaggcgtcagtgaacatgacttcgcttaccaggaccccaaagtgcactctattttcccggcgaggggaccccgcgccggaggaactaggcttacattaaacggaagtaaacttttgactggccgactggaagacattcgagtggtcgtgggggatcagccctgtcatctgctgcctgaacagcagtctgaacagctgcgatgtgagaccagcccacgcccgacgcctgccacactgcctgtggcagtgtggtttggagccaccgaacggaggctccagaggggccaattcaaatataccctagaccctaacattacctcagccgggcccacaaagagttttttgtccggcggtcgggagatttgcgtgaggggccagaatctcgatgtggtgcagacacccagaattagggtgacagtcgtaagccgaatgttgcagccgtctcaaggcctgggaaggcgtcggagagtggttcctgagacagcatgttctctcgggccttcttgcagtagtcagcagtttgaagaaccctgtcacgttaactcgagccaactgatcacatgccgcacgccagcactgcctggcctcccagaggacccctgggtacgagtagagtttattttagacaatctggttttcgactttgctaccctaaaccctacacccttttcgtatgaagctgatccaacactacagcccctaaaccccgaagaccctaccatgccgtttcgacataagcccggctctgtttttagtgtggagggagagaaccttgacttggctatgtcgaaggaggaggtcgtggccatgataggagatggaccttgcgtcgtgaaaactctgactaggcaccatctctactgcgaacctccagtggagcagcccttgcctcgacaccatgcactccgcgaagctccggacagcctgcctgagttcacagtgcagatggggaacttaagattttccctcggccacgtgcagtacgatggcgaatctccaggcgcattcccagtcgccgcccaggtcggactgggagtcggcaccagcctgttggcccttggcgttataattatcgtgcttatgtatcgtagaaaaagcaaacaggctctcagagattacaaaaaggtgcagattcagctggagaacttggaatcttctgtgagagatcggtgcaagaaggaattcacagatttaatgaccgaaatgactgacctcacatccgacctgctggggtccggaattccttttctggattataaggtgtacgccgaacgcatattttttccggggcacagagagagcccattgcatcgcgacctgggtgtgcctgaaagcaggcgaccaacggtggagcagggactcggccagctctcaaatctgttgaacagcaagctcttccttacaaaatttatccacactctggaatcccagcggacctttagcgccagagaccgcgcttacgttgcatcactgctgactgtagccctgcacgggaagctggaatattttacagacatcctccggactctcctgagcgatctcgtggcccagtacgtcgcgaagaaccccaaacttatgctgaggcgtaccgagaccgtggtggagaagctgctgacgaattggatgtcgatttgtttatatacgttcgtcagagactcagtcggtgagccactgtacatgctgtttcgcggcataaagcatcaggtcgacaaaggaccagtggattcagtaaccgggaaggccaaatatactctcaacgacaacaggcttcttcgggaggacgtcgagtacaggccgctcacactgaacgctctcctagcagttgggcctggcgctggcgaagcacaaggagtgcctgtaaaggttctggactgcgacaccatttcccaagctaaagaaaaaatgctcgaccagctgtacaagggcgtcccactgacccagaggcccgaccctcgcaccttggatgtagagtggagatcaggcgtggccgggcaccttatcctgagcgacgaggatgtgaccagtgaggtgcagggcctatggaggagactcaacacacttcagcactacaaggttccagatggcgccacagttgcccttgtaccatgtttgacaaagcatgtacttcgagagaaccaagattacgtccccggtgaacggactcccatgctcgaagacgtcgatgaaggcggcatcagaccatggcacctcgtcaagcccagcgatgaaccagagccccccaggcctcgaaggggatccctgagagggggcgagcgcgaaagagcaaaggctattccagaaatttatcttacccgcctattgtctatgaagggaactctgcagaagttcgtcgatgatttattccaggtaatcttgtctaccagtaggcccgtgcccctcgccgtgaagtacttctttgatctcttagacgaacaggcgcaacagcacggcatctccgaccaagacaccattcacatttggaagactaacagccttcctctccgattttggatcaacatcattaagaatccacaatttgtcttcgatgtgcagacttccgataacatggacgcagtgcttctcgtgatcgcgcagaccttcatggatgcctgtactctcgcggaccacaagctcgggagagattcacccatcaacaagttgttgtacgccagggatatccccagatataaaagaatggtcgagaggtattatgcagacatcaggcagactgtgccagcttccgaccaagagatgaacagtgtactggcagagctgagctggaattactctggtgaccttggcgcccgcgtggcacttcatgagctgtataaatacataaataaatactacgatcagattatcactgccctggaagaagacggtaccgctcagaagatgcaactggggtacagactgcagcaaattgcagctgctgtcgagaataaagttacagacctgtag

SEQ ID NO: 47499 - DNA, 2241 bp, Artificial Sequence
  derived and/or modified sequence
atgccttttcggcacaagcctgggtctgtctttagcgtggagggcgagaacttagatctggctatgtcaaaagaagaagtagtggctatgataggagatgggccatgtgtggtgaagacattgactaggcaccatctgtactgcgaaccccctgtggagcagccactccccagacaccacgccctgcgcgaggctcctgactctttgccggaattcacagtacagatgggaaatctgagattctctctcggccatgtgcagtacgatggagagtcccctggtgcatttccggttgcggcacaggtggggttgggagttggaacatccctcctggccttaggcgttatcattatcgtgcttatgtataggcgtaaaagtaagcaggccctgagagattataaaaaagtccagatacagctcgaaaacttggaatcctccgttcgcgatcgctgtaaaaaggaattcactgacttaatgaccgagatgactgatctcacgagtgacctattgggttccggtataccatttctggactataaagtgtacgcggagcgtatcttctttccaggccatagggagtcaccccttcacagagacctgggcgttcccgaaagtaggagaccgaccgtcgaacagggtcttgggcagttaagcaatctcctgaatagtaaactcttcttaactaagtttattcatacgctcgaatcccaacggaccttttcagcacgagatcgcgcatacgtagcaagccttctcactgtcgcactgcacgggaagctggagtatttcaccgatatcctccggacactcctttccgacctggttgcccaatatgtcgcaaagaatccaaagttgatgctgcgccgcaccgaaacagtcgttgagaagctgctaacgaactggatgtcgatctgtttgtacacgtttgttcgcgattctgtgggggagccgctctacatgttgtttcgcggaatcaagcaccaagttgacaaagggccagtggattccgtaacagggaaggccaaatataccctgaatgacaatagattattgagagaagatgtggaatatcgcccgctcacattgaatgcattgttggccgtgggtcctggcgctggcgaggctcagggcgttcctgtcaaagtcctcgactgcgatactatcagccaggcaaaggaaaaaatgctcgatcagctttacaaaggtgtgcccctaacacaaaggcctgacccccgcaccctggacgtggaatggaggtccggcgtcgcaggccaccttatcctctctgacgaagatgttactagtgaagtgcagggactttggcgcagactgaacaccttgcagcactataaagtgccggatggggctaccgttgccctcgtgccgtgcctgactaaacacgtgctaagagaaaatcaggattacgtgcccggcgagcgaactcccatgctggaggacgtggacgagggaggaatccgtccttggcaccttgtcaagccaagtgacgaaccagaaccaccacgccctagacgaggctcactccgagggggtgaacgcgagcgcgctaaggcgattcctgagatctacctgacccgtctgctgtcaatgaaaggtacgcttcaaaaattcgtcgatgatcttttccaggtaattctctctacatctcgacctgtgccccttgccgtgaagtatttttttgatcttttagacgaacaggctcagcagcacgggatatcggaccaggataccattcacatatggaagactaactcgctgcccctaaggttctggattaatattatcaaaaatccacagttcgtgttcgacgtgcagacctctgataatatggacgccgttttactcgttatcgcacaaacttttatggacgcatgtaccctggcagatcacaaactcggacgagactcacccatcaataagctcctatatgctagggacattcctcgctacaagagaatggtggagagatactatgcagatattcgccaaacagttcctgccagtgatcaggaaatgaattcagtgttggccgaactcagctggaactattccggggatcttggcgcgcgagtggcccttcatgagctttataaatacataaacaagtactacgaccaaattatcactgcactggaggaggacggtaccgcccaaaaaatgcagctcggctacagactgcagcagatcgcagcggctgtggagaataaagtgacagacctttag

SEQ ID NO: 47500 - DNA, 5859 bp, Artificial Sequence
  derived and/or modified sequence
atgccagctctggggcccgcactactgcaggcactctgggccggatgggtgctcactctccagccgctacccccaaccgcattcactccaaatgggacgtatcttcagcacctcgctagagatcccacaagcggaaccctgtacttgggcgcaacaaactttctgttccaactttcccccggattgcagctcgaagcaacagtgtcaacaggaccggtactggattctagagattgcttgcctcctgtgatgccggacgagtgtccccaggcccaacctacgaataatcccaaccagttactgctcgtgtctccaggcgccttagtagtatgtggaagcgtccaccaaggggtctgcgagcaaagaagactggggcagctggagcagctcctgctgcgccctgagcgccctggtgacactcagtacgttgcagcgaatgaccctgctgtgtcaacagtcggcctggtcgcccagggacttgcgggcgaaccactgctgttcgtgggtcgcggttacacatccaggggagttggagggggtattcctccaatcaccacgagagcactctggccgccagacccacaagccgccttctcctatgaagagacagctaagctggcggtgggcagactctctgagtatagccaccactttgtgtcggcattcgcccgaggtgcttccgcatatttccttttcctgcgccgcgacctgcaagcccaatccagagccttccgagcctatgtgtctagggtgtgcctccgcgatcagcactactacagctacgtcgaactaccactggcctgtgagggaggacgttacggcctgattcaggccgctgccgtcgctacttctcgcgaagtggcccacggggaagtcctgttcgccgcttttagctcagccgctccacccactgtcggtcggcctccctcggcagctgccggagctagcggggctagcgcactgtgcgcttttccattagacgaagttgatcgcctcgcaaatcgtacacgggacgcatgctacactagagagggccgggccgaggacggtaccgaagtggcatacatcgagtacgacgtgaacagtgactgtgcccagctaccagtagacactcttgatgcttatccttgtggatccgaccacacaccatcccccatggccagtagagtgcccctggaagccaccccaatcttagagtggcctgggatccagctgacagcagtcgccgtgacaatggaagatggtcacacaatcgcttttttgggagactctcagggccagcttcacagagtgtatctggggcctggttcggatgggcatccatatagtacccagtcaattcagcaggggtcagctgtgagtcgcgatctcacttttgacgggaccttcgagcacctttacgtgatgacacagtccactttgttaaaagtccctgtggccagttgtgctcagcacttagactgtgcctcttgtctcgcccatcgggacccttattgcggctggtgcgttctgctcggaaggtgcagcaggcgcagcgagtgctctcgaggccagggtcctgaacagtggctgtggtcctttcagcctgaactgggatgcctccaggtggccgccatgtctcctgcgaatatctcacgggaggaaacacgcgaagtgtttctcagcgtgccggaccttcccccactgtggcctggcgaaagttactcttgtcactttggcgagcatcaaagccccgctcttctgactggaagtggtgttatgtgtccctctcccgatccaagtgaagcccctgtattgccccgcggcgccgattacgtaagtgtgagtgttgagctcaggtttggggcagtcgtcatcgcaaaaacaagcctgagtttctacgattgcgtcgcagtgaccgagctgagaccgagcgcccagtgccaggcttgcgtgagctctagatggggctgtaattggtgtgtgtggcagcacctctgtacacataaggctagttgcgatgcaggccccatggttgcatctcatcaaagcccattggtctctccagatcccccagcaaggggggatggagactccgccgagctggagggacctcccgcgccactcatcctgcccagtagcctggactaccagtacgatactccaggcctatgggaattggaggaggctacactgggcgcatcctcatgcccctgcgtggaatcggtgcagggatccactttgatgcccgtccacgtggagagagagattagacttttggggagaaatttgcatctcttccaggatggcccaggagataacgagtgcgtgatggagctcgaaggactcgaggtggtagtcgaagcaagggtagagtgcgaacctcccccagatacacaatgtcatgtcacgtgccagcagcatcaactctcatatgaagcgctccaaccggagctcagggtggggctgtttttgagacgggcgggtcgtctgcgagttgattccgccgaaggactccacgttgtcctctatgattgctctgtgggccacggagattgctctagatgtcaaacagccatgccacagtacgggtgtgtatggtgcgagggtgagagacctcgatgcgtaacacgagaggcatgtggggaagcggaggcagtggccacacagtgcccagccccactaattcacagcgttgaacccctgacagggcccgtggacggtggaactagggttactattagggggagtaaccttggtcaacatgtgcaggatgtgctgggcatggtgaccgttgctggtgttccctgtgcagtcgacgcccaggaatacgaagtgtcatccagtcttgtctgtatcacgggtgcctcaggcgaagaggtcgctggcgcaaccgcggtggaggtgcctggacgggggcggggcgtgagtgagcatgatttcgcctaccaggatcccaaagtccacagtatttttccagccagagggccacgagcaggtgggaccagactgactctgaacgggagtaagctccttacaggtcggctcgaagatattagagtagtggtaggggatcagccatgtcacctgctgcccgagcagcagtcagaacagctgcgatgcgagaccagcccccgccccacacccgcaaccctgccagtggccgtgtggtttggagctacagagagaaggctccagcgcggacagttcaaatatacgctagacccgaacatcacctctgctggtcccaccaagtccttcctgtctggcggccgggagatttgcgtgcgcgggcagaacttagatgtggttcaaacgcccaggatccgggtgactgtcgtctcaaggatgctgcaaccatcacagggtttgggaagacgacgtcgagttgttccagaaacagcatgcagtttgggcccttcttgcagctctcaacaatttgaagagccctgccacgtaaattccagtcagctgataacatgtcggacaccagctctgcctggacttcccgaagacccatgggtgcgtgtggagttcatactggataatctggtatttgacttcgcaacattgaaccccacccccttctcttacgaagccgaccccaccctgcagcccttaaaccctgaggatcccacaatgcccttcagacacaagcctgggagcgtcttttcagttgaaggggagaacttagatttggccatgagcaaggaagaagtggtggcaatgatcggcgatggaccctgcgtcgtgaagacccttacgaggcatcacctctattgcgaaccccctgtcgaacagcccctgccaaggcaccacgcccttcgtgaggcacccgatagtttgcccgagttcactgttcagatgggaaacctccgtttttctttgggccacgtccagtatgatggagaatctccaggagccttcccagtggcagctcaggtgggcctgggtgtagggactagtcttctggcccttggtgtgataattatagtactgatgtaccgaaggaaatcaaaacaggctctgcgcgactacaagaaagtacaaattcagctggagaatctagaaagcagcgtgcgcgaccggtgtaaaaaggagtttacagacttgatgactgagatgaccgatctgacctccgaccttctcgggtcaggaattcccttcttggattataaagtttatgctgagcgcatcttctttccaggccatcgggagtcccctctgcacagggacttgggtgtacctgaaagcaggcgccctactgtggaacagggcctgggacaactttctaaccttctaaatagcaaactgtttctaactaaattcatccacactctggagagccaacgtaccttctctgccagggatcgcgcatacgtagcctctttactgacagtcgccctgcatggaaagctggaatacttcaccgatattctgaggacgctcctgagcgatctagtcgctcagtacgtggccaagaaccccaagctgatgctgagaagaaccgagaccgtggtggaaaaattgctgactaattggatgtccatctgtctctacacgtttgtcagagactctgtgggcgagcctctatacatgttatttagaggcatcaagcatcaggtggataagggcccagtcgattccgtgacagggaaagctaaatatacactgaacgataatcgcctactacgagaggacgtggagtataggcctctcactcttaacgcccttctggctgtaggacccggagccggcgaggcgcaaggagtcccagttaaagtactcgattgtgacaccatcagtcaggcgaaggagaaaatgcttgaccagctgtataaaggggttcccctgacgcagagaccagatcctcggacactggatgtggagtggcgatctggcgtcgccggccacttgatattgagtgatgaagatgtcacaagtgaagtgcaaggcctgtggcgaagactgaacacgctgcagcactataaggtaccggacggcgcaactgtggcgttggtcccgtgtcttactaagcatgtgcttcgtgaaaatcaggattatgttccaggcgagagaacccccatgctggaagacgtggatgaagggggtatccggccctggcacttggttaaaccgagcgatgaacccgaacccccacgaccacgccggggctccctccgcggaggtgagcgagagagagctaaagctatcccagagatctatttaacccgcttgctttccatgaaaggcacactccagaagttcgttgatgatctatttcaggtgattctctccaccagtcgtcctgtcccacttgccgtcaaatacttctttgatctactggacgagcaggcccagcagcacgggattagtgaccaggacacaattcatatttggaagactaatagcctccccctcaggttctggatcaacatcattaagaatccccagtttgtgttcgatgtgcagacctcagacaatatggatgccgtgctccttgtgatcgcccagacctttatggatgcctgtactttagccgaccataaactggggagggattcaccgataaacaagcttctctatgctcgcgacatccctcgttataagcgaatggtcgaaaggtactatgccgacatcaggcagaccgtgccagcctctgatcaagaaatgaacagtgtccttgctgaactgtcatggaactattccggagacctgggagcaagagtagccctccatgaactctacaagtacatcaataagtattatgatcagattattacagccctcgaggaagatgggactgctcagaagatgcaacttggctacaggctacagcagatcgcggctgccgttgaaaataaagtcaccgatctctag

SEQ ID NO: 47501 - DNA, 6408 bp, Artificial Sequence
  derived and/or modified sequence
atgcctgccctgggaccagcactcctgcaagcactgtgggccggctgggtcttgacactccaaccactgccccctaccgctttcaccccaaacggaacctacctgcagcaccttgcacgcgaccccacatcaggcactctttacctgggcgcgaccaacttcctctttcaactctctcctggactgcaactggaggccacagtgagcaccggacccgtacttgatagccgtgactgtctgcccccagtgatgccggacgagtgccctcaagctcagccaacaaacaacccaaatcagcttcttcttgtatctccaggcgccctcgtcgtgtgcggctccgtccaccaaggggtatgtgaacagcggcgactgggacagctggaacagcttctcctgagacccgagaggccaggtgacacacagtatgtggctgccaatgaccccgccgtttcaacagtcgggttggtcgcacagggccttgctggcgagccattactatttgtgggtaggggctacacatcacggggagtgggcggcggtatccctccaattactacccgtgccctctggccacccgatcctcaggctgccttttcctatgaagagaccgcgaaacttgcggtggggagacttagtgaatactcccatcattttgtgtcagcatttgcgcggggtgcctcggcgtactttttattccttcgaagggatctgcaggcacaaagtagagctttcagagcttacgtgagtcgcgtatgtcttagggaccagcactactattcttacgttgagcttcccttggcatgtgaaggcggaagatacggattgatccaggccgctgctgtggcaactagtcgcgaagtcgcccacggtgaggtgctttttgccgcttttagctctgccgccccgccaaccgttggccgcccacccagtgccgctgctggagcgtcgggcgcaagtgccctatgtgccttcccactggatgaggtggacagattagcaaatcgcactcgggacgcatgctacacccgcgaaggccgcgcagaggatggaacggaagtcgcttacatcgagtatgatgtcaactctgattgtgcacaacttcccgtagatacattagatgcctacccatgtgggagcgatcacaccccttcaccaatggcctccagagttccactggaagcaacaccaatactcgaatggcccggaatccagcttaccgccgttgcagtaaccatggaggatggccacacaatcgcttttctcggagattcgcagggacaattacacagagtgtacctgggaccagggtcagatggacacccttattcgacacaatcaattcagcagggctcggctgtgtctagggacctaacttttgacggaacatttgaacacttatacgttatgacacaatcaactctgctcaaagtacctgtagccagctgtgctcagcatctggactgcgcctcatgcctggctcacagggacccatattgcggctggtgtgttttactgggcaggtgttcccggcggtcagagtgcagccgaggccagggacccgaacagtggctatggtccttccaaccagaattgggctgtttacaggtggcagctatgagccccgcaaacatctcgcgggaagagacaagagaagttttcctttcagttcctgatcttccccccttgtggcctggtgaatcttattcttgccacttcggggagcaccagtctcccgctttgttgaccggttccggtgttatgtgtcccagtcccgacccttctgaggccccggtactcccccgcggcgccgattatgtgtccgttagtgttgagctaagatttggggctgttgttatagcaaagactagtctgtccttctatgactgtgttgctgtaaccgaacttcgaccatcagcccagtgccaagcctgcgtgtcttccagatggggttgcaattggtgtgtgtggcagcacctgtgcactcacaaagcgtcatgtgacgccggccccatggtcgcaagtcaccagagtcccctcgtgagcccagacccgccagctaggggtggcccttccccctctccccccacagctcctaaggccctcgcaactcccgcaccagacactctgccagtcgaaccgggcgcaccgagcaccgcaaccgcatctgacatctctcctggggcttctccttcacttctatctccatggggcccatgggctggatcagggagcatttcttctccaggtagcactggtagtcctctgcacgaagaaccgtctccgcccagcccgcagaacggaccaggaaccgcagttcccgcacctacagatttcaggccttctgccacccccgaggatctcttagccagcccactctccccgtccgaagtggccgccgtccctccagctgatcccgggcccgaggccttacaccctaccgtcccattagacctgccccctgccacggtgccagccactacttttcccggggcaatggggtctgtgaaacctgctctcgactggcttaccagggaaggaggcgaactgcccgaagccgacgaatggaccggcggcgatgctccagctttctcaaccagtaccctgctcagcggcgacggcgactctgcggaattagagggcccgcccgcccccctgattctcccaagttcacttgactatcagtacgacacaccggggctgtgggagctggaagaagctacacttggagccagctcctgtccttgcgttgaatctgtacagggatctacactgatgccagttcatgttgagagggaaatccggcttttgggtagaaatctgcaccttttccaagacggtcctggagataacgaatgcgtgatggaattggagggactggaagtggtagtcgaagcccgcgtcgagtgtgaacctccacccgatactcaatgtcacgtgacatgccagcagcatcaacttagttatgaagccctacagcctgaactccgggtgggattgttcttacggagagctggccgtctgcgagtggactctgctgaaggactgcacgttgtgctttacgattgcagcgtgggtcacggagattgttcacgctgtcaaaccgcgatgccccagtacggctgtgtctggtgcgagggtgaaagaccaagatgtgtcaccagggaagcatgtggcgaagcagaagccgtggctacacaatgccccgcgcccctgattcattccgtcgagccccttacaggcccggtagatggagggaccagagtgacgataagaggatcaaatctgggacagcatgttcaggacgtgttaggtatggtcactgtggccggcgtgccgtgtgcagtcgatgcccaagaatatgaggttagttcgagcctggtgtgcatcacaggggccagtggtgaggaggtggccggagcaaccgccgttgaagtgcccggtaggggaaggggcgtgtccgagcacgatttcgcttaccaagacccaaaagtacactcgatcttccctgctagaggaccacgcgcgggtggcactagactcaccctgaacggatccaaattattaacggggcgcctagaggacataagggtggtggtgggagaccagccatgtcatctgctacccgagcagcagtccgagcaattgagatgtgaaacgtccccacggccaacaccagcaaccttacctgtggccgtatggtttggcgccacagaacgaaggctccagcgaggccaattcaaatatacactggacccaaatattacctctgcagggccaacaaaaagcttcctcagcggcgggcgggagatatgcgtgagaggacagaacttagatgttgtgcagacccctcgcattcgcgtgactgtagtctctagaatgcttcagcccagccaggggctgggcaggcgcaggcgagttgtgccagaaaccgcctgttccctcggcccatcctgttcctcacagcagtttgaggaaccgtgccatgtcaatagtagccaactcattacctgccgcacacccgctctcccaggcctccctgaagatccatgggtccgagtcgaattcatccttgacaacctagtctttgacttcgccaccttaaacccaactcccttctcctacgaagctgaccccacactccagccactgaatcctgaagatccaaccatgcccttccggcacaaacctggctccgtattttctgtggaaggtgagaacttggatctggccatgagcaaggaagaagtagtagctatgattggtgacggcccttgtgtcgtgaaaactctcaccaggcaccatctatactgcgaaccacccgtggaacagcccctccctagacaccacgcactacgcgaggcacccgactctttacctgagtttaccgtgcaaatgggaaatcttcgattttcgttagggcatgtacaatatgatggcgaatctccaggcgcattccccgtggcagcacaggttggcctgggggtagggacttctctcctggcactgggcgtaatcatcatcgtgctgatgtaccgccgtaaaagcaagcaggctctgagagactataaaaaagtacagattcaactggaaaatctagaatcatccgtgagagatcgatgcaagaaggagtttacagacctaatgacagaaatgacagacttgacttctgacttgctaggttccggcatcccttttctggactacaaggtgtacgcggaacgaatcttttttcctggccaccgtgaatctcctctgcacagggaccttggagtaccagagtcgcgccgaccaactgtagagcagggcctaggccaactgtcaaatcttctgaattctaaactattcctcaccaagttcatacacactctcgaatcccagcgcactttctcagctcgcgatagggcttatgtggccagcctcctcaccgtcgccctgcatggaaaactggagtactttacagacatcctaagaacactgctcagcgacctggtggcgcaatacgtcgcgaaaaacccaaaattaatgctcagaagaaccgagaccgtcgtcgaaaagttacttactaattggatgtcaatttgcttatatacttttgtcagagattctgtaggcgaacctttgtacatgctcttccgcggcatcaagcaccaggtggataagggacccgtcgactcagtgactggcaaagctaaatacacactcaacgataatagattacttagggaagatgtcgaataccgccccctgacccttaacgctcttctggctgttggtccaggcgcaggggaggcccagggtgtgcctgttaaagtactcgattgtgacactatctctcaggctaaggagaaaatgttagatcagctctacaaaggcgtccctcttacccaacgtccggacccacggacccttgatgtagaatggcgcagtggagtcgcgggacatctgattctgagtgacgaagacgttacgtctgaagttcagggcttgtggcggcgactcaacaccctccagcattacaaagtccctgatggtgcaaccgttgcccttgtcccctgcttaaccaaacatgtgctgagagagaaccaggattatgtgccaggcgagcgtacccctatgttagaggacgtagatgagggcggtattaggccttggcatcttgttaagccctcagatgagcccgagccacctaggcctcgccgagggtccctgcgggggggagaaagagaaagagccaaagcaataccagaaatttacctgactagactgctgtctatgaagggaaccctccagaagtttgtcgacgatttattccaggttattctgtcaacatcccgtcccgtccccttggccgtcaaatacttttttgaccttcttgacgaacaggcccagcagcacggtatctccgatcaggacaccattcacatttggaagactaattccttaccattaagattttggattaatatcatcaaaaatccccagtttgtgttcgacgtccagacctccgataatatggacgcagtgctgctggtgatcgcacaaaccttcatggatgcctgtacccttgccgatcataagctgggccgggattcccccattaacaaactgctgtacgcaagagacatccctcgctataagcggatggtcgaaagatactacgctgacatccgccaaaccgtcccagctagcgatcaagaaatgaatagtgtcttggctgaactttcctggaactactccggtgaccttggcgctagagttgccctccacgaactgtacaagtacataaacaaatactacgatcaaatcatcactgccctggaagaagatggtaccgctcagaagatgcagttgggttatcgccttcaacagattgccgctgctgtggagaacaaagtcaccgacctatag

SEQ ID NO: 47502 - DNA, 2407 bp, Artificial Sequence
  derived and/or modified sequence
acatggtttagttgatggcgcaagcccaggtccaaagcccatgctcttctcaaacagccagaggtgactcccacacgggtcatgctgttgtctcctgatccagccggccctgccaggaccccaccatgccattccggcacaagcctgggagtgtgttctccgtggagggggagaacctggaccttgcaatgtccaaggaggaggtggtggctatgataggggatggcccctgtgtggtgaagacgctgacgcggcaccacctgtactgcgagccccccgtggagcagcccctgccacggcaccatgccctccgagaggcacctgactctttgcctgagttcacggtgcagatggggaacttgcgcttctccctgggtcacgtgcagtatgacggcgagagccctggggcttttcctgtggcagcccaggtgggcttgggggtgggcacctctcttctggctctgggtgtcatcatcattgtcctcatgtacaggaggaagagcaagcaggccctgagggactataagaaggttcagatccagctggagaatctggagagcagtgtgcgggaccgctgcaagaaggaattcacagacctcatgactgagatgaccgatctcaccagtgacctcctgggcagcggcatccccttcctcgactacaaggtgtatgcggagaggatcttcttccctgggcaccgcgagtcgcccttgcaccgggacctgggtgtgcctgagagcagacggcccactgtggagcaagggctggggcagctctctaacctgctcaacagcaagctcttcctcaccaagttcatccacacgctggagagccagcgcaccttttcagctcgggaccgtgcctacgtggcatctctgctcaccgtggcactgcatgggaagcttgagtatttcactgacatcctccgcactctgctcagtgacctggttgcccagtatgtggccaagaaccccaagctgatgctgcgcaggacagagactgtggtggagaagctgctcaccaactggatgtccatctgtctgtataccttcgtgagggactccgtaggggagcctctgtacatgctctttcgagggattaagcaccaagtggataaggggccagtggacagtgtgacaggcaaggccaaatacaccttgaacgacaaccgcctgctcagagaggatgtggagtaccgtcccctgaccttgaatgcactattggctgtggggcctggggcaggagaggcccagggcgtgcccgtgaaggtcctagactgtgacaccatctcccaggcaaaggagaagatgctggaccagctttataaaggagtgcctctcacccagcggccagaccctcgcacccttgatgttgagtggcggtctggggtggccgggcacctcattctttctgacgaggatgtcacttctgaggtccagggtctgtggaggcgcctgaacacactgcagcattacaaggtcccagatggagcaactgtggccctcgtcccctgcctcaccaagcatgtgctccgggaaaaccaggattatgtccctggagagcggaccccaatgctggaggatgtagatgaggggggcatccggccctggcacctggtgaagccaagtgatgagccggagccgcccaggcctcggaggggcagccttcggggcggggagcgtgagcgcgccaaggccatccctgagatctacctgacccgcctgctgtccatgaagggcaccctgcagaagttcgtggatgacctgttccaggtgattctcagcaccagccgccccgtgccgctcgctgtgaagtacttctttgacctgctggatgagcaggcccagcagcatggcatctccgaccaggacaccatccacatctggaagaccaacagcttgcctctgaggttctggatcaatataataaaaaacccgcagtttgtgttcgacgtgcaaacatctgataacatggatgcggtgctccttgtcattgcacagaccttcatggacgcctgcaccctggccgaccacaagctgggccgggactccccgatcaacaaacttctgtatgcacgggacattccccggtacaagcggatggtggaaaggtactatgcagacatcagacagactgtcccagccagcgaccaagagatgaactctgtcctggctgaactgtcctggaactactccggagacctcggggcgcgagtggccctgcatgaactctacaagtacatcaacaagtactatgaccagatcatcactgccctggaggaggatggcacggcccagaagatgcagctgggctatcggctccagcagattgcagctgctgtggaaaacaaggtcacagatctataggaacccaggagccacggcctgctgttgcttcagcctggcct

SEQ ID NO: 47503 - DNA, 5859 bp, Artificial Sequence
  derived and/or modified sequence
atgcccgctctgggacccgcacttctgcaggccctttgggctggatgggttctcacactgcaacccttgcctcccaccgctttcacccccaatggcacataccttcagcacctagcccgagaccccacttctggtaccctgtatctcggcgcaactaacttcctgttccagctttcccccggcctgcagcttgaggcaactgtttccactggacccgttcttgactcacgtgattgcctcccaccggtgatgcctgatgagtgtcctcaggcccaaccgactaataaccctaatcagctcttgctggtctcacctggcgcattggttgtgtgtgggtccgtgcaccaaggcgtgtgtgagcagagaagattaggtcagctcgaacagttactgctcaggcccgagagaccgggagacactcaatatgttgccgccaatgacccagcagtaagcaccgtgggacttgttgctcaggggctcgcaggggagccactgctgtttgtcggcagggggtacacatcacgcggcgttggcggcggaattcctccaatcactaccagggcactatggccaccagatccacaggcagcatttagctacgaagaaacggctaagctcgccgttgggcgtctctcagaatattcccatcattttgtttccgcattcgctcggggcgcctccgcgtacttcctgttcctgaggagggacctgcaagcacaatccagggcttttcgggcttacgtgtccagagtttgtctacgagatcagcattattatagttacgtcgagctgccgttggcatgcgaagggggtcggtacggactcatacaggcagctgcagtggccacatccagggaggtagctcacggggaagtcctattcgccgcttttagctctgctgccccccctactgttgggaggcccccgtctgctgccgccggcgcatccggagccagtgccctgtgtgcattcccactggacgaagttgaccgcctagcaaacagaactcgcgacgcatgctacactcgagaaggcagggccgaggacgggacagaggtggcgtacatcgaatatgacgtgaattcagactgtgctcagttaccagtagacactctggacgcatacccctgcggatctgatcacacaccatccccgatggcttcacgggtgccacttgaggccactccaattcttgaatggcccggaattcaactgactgctgtggccgtcaccatggaggatggtcacactatcgctttcctgggagatagtcagggacaattacatcgtgtttacctgggacccgggagtgatggacacccatacagtactcagagcattcagcaaggtagcgccgtgagcagagacctgacatttgatggtacattcgagcacctttacgtcatgacccaatctactcttctcaaggttcctgttgctagttgtgcccagcatctcgattgcgcatcctgtctggctcatcgagacccttactgtgggtggtgcgtcctgttgggtcgctgcagccgacggagtgaatgttctcgcggtcaaggcccggagcaatggctgtggtcatttcagcctgagttgggctgtctgcaggttgccgcaatgagccctgctaatatctctcgcgaagagacacgcgaagtcttcctgtccgttccagacttacctcctttatggcccggggagtcgtattcatgccattttggcgagcaccaaagtcctgcattattgacgggttcaggagtgatgtgtccatcccccgatccctcagaagcacctgtgttgccaagaggagctgattatgtcagtgtctcagtggagctccggttcggggccgttgtcatcgctaaaacaagcttgagcttttacgattgcgtggcagtaaccgagctccgaccctccgctcagtgccaggcctgtgtttccagccggtggggctgcaactggtgcgtctggcagcatttgtgcactcataaagcatcctgtgacgctggtcccatggttgcctcccatcagtccccactcgtatcacccgacccccccgccagaggcgatggagatagtgcagagttagaaggtccccccgcaccccttatcctcccctcctccctggactatcagtatgatacccccgggctttgggagcttgaagaggctacacttggtgccagtagctgtccatgcgttgagtctgtgcagggttctacactgatgccagtgcatgtcgagagagagattcgcttactagggagaaatttgcatctttttcaggacggccccggtgacaacgaatgcgtgatggagctggaaggactggaggtggttgtggaggctcgggtggaatgcgaacccccccccgacactcagtgtcatgtcacatgccagcagcatcagctctcatacgaagcattgcaacctgagctgagagttggactgttcctgagacgagccggccgtctgagagtagatagtgccgaggggctccatgtggtcctttatgattgctccgtaggtcacggggattgcagccggtgccagacagctatgccccagtacggatgcgtgtggtgcgaaggtgagagaccaaggtgcgtcactagggaggcctgtggcgaagcggaagctgtcgcaacccaatgccccgcccctttgattcactccgtggaacctctgaccgggcccgttgatggcggaacaagagtcaccatcaggggcagtaatctgggacaacacgttcaggatgtcctcggaatggttacggtggctggcgttccatgtgcagtggatgctcaagaatacgaagtgtcaagctccctggtctgcattaccggcgccagcggggaagaagtcgctggagctaccgcagtggaggtgcccggcagaggtagaggggtaagcgagcatgactttgcctatcaggaccctaaagtccattccattttcccggcaagagggcccagggctggggggacacggctgaccttaaacggcagtaagttgctgacagggcgccttgaagatatccgtgtggtggttggagaccagccttgccatcttctcccagaacagcagtccgaacaattgagatgtgaaacaagtccgaggcctacgcctgctactctgccagttgccgtgtggtttggcgcaacagaacgccggttacagcggggacaatttaagtacacgctcgacccaaacatcaccagcgccgggcccaccaaatctttcttgagtgggggaagagaaatctgtgttcgcggtcaaaacctcgacgtggtgcaaacccctcgtattcgagtgacagtggtgtccaggatgttacaaccatcacaaggactgggtcgaagacggagagtggttcctgaaacagcatgcagtctgggcccctcttgttcctcacagcagttcgaagaaccctgtcacgtgaacagttcacagctgattacatgccgaactccagcactgcccggtcttccagaggatccctgggtgcgagtggaattcatcttagataacctggtctttgacttcgctacattgaaccccacccccttttcctatgaagccgaccctacgctccagcctttaaaccctgaggaccctactatgccatttcggcacaagccaggaagtgtgttttctgtagagggcgagaaccttgacttggcgatgagcaaggaggaggtcgtggctatgataggggacggaccatgtgtggtaaaaactctgacccgacatcacctgtactgcgagccacctgttgaacaaccactgccccgccaccacgccctccgagaggcccctgattccctacccgaatttactgtccagatgggaaatctgcgtttctccctcggccacgtgcagtatgacggagaaagccccggcgccttccctgtcgccgcacaggtgggactcggtgtcggtacttctctgctcgcccttggagttatcataatagtgttgatgtatcgccgcaagtctaaacaagctctccgcgactataaaaaggttcagatccagctcgaaaacctggaatcctccgtgcgtgaccgctgtaaaaaggaatttaccgacctgatgacagagatgaccgatctcactagcgatctactggggtcaggcatcccctttctcgactataaagtgtacgcggagcgaatcttttttccaggacatcgggaatccccattacaccgtgatctcggagtccctgagtcccggcgccctactgtcgagcagggcctcggccaactatccaatctgctcaactccaaactttttctgaccaagttcatccatacgttagaatcccagcggacattcagcgctagagatcgtgcatatgtcgccagcctgctaaccgtggcattacatggaaagctggaatactttactgacattctccgaaccttgctgtctgacttagtggcccagtacgttgctaagaacccaaaattaatgcttcgtagaaccgaaaccgtggtcgaaaaattgctgactaattggatgtctatctgcctctacaccttcgtacgtgactccgttggtgaacccctatacatgctcttccggggaatcaagcaccaggtggacaaaggcccagtcgatagcgttaccggcaaagccaagtacaccctcaacgacaaccggttactgcgagaggacgttgaatacaggcccctcacattgaatgcactcttggccgtaggccccggggccggtgaagcacagggcgttccagtgaaagttttggactgcgatactatcagccaggctaaagagaaaatgctggaccagctctataagggcgtcccactgacacagcgccccgatccaagaactctcgacgtcgaatggaggtccggtgtagctggtcatttgattcttagcgacgaagatgttacatccgaggtacaaggtctgtggcgtagacttaacacattacaacattataaggtgcccgacggcgcgactgtggcactggtgccttgtctgacaaaacacgtcctgagagaaaaccaggattatgtgcccggtgagagaaccccaatgctggaagacgtggatgaaggcggtatccgcccctggcatctggtgaagccatctgacgaaccggaacccccccgtccgcgccgtggcagcttgcgtggtggcgagcgcgagcgagccaaagcaatcccggaaatctacctgactcgcttgctcagtatgaaggggaccttacaaaaattcgtcgacgatctcttccaggtgatactatctacaagccggcctgttcctctcgcagtgaaatatttcttcgaccttctcgacgagcaagcacagcaacacggaatctccgaccaagacacaattcatatctggaaaaccaatagtttgcccttaagattttggataaatattataaaaaatcctcagttcgtatttgacgtgcaaacctccgataacatggacgctgtgctgctggttatcgcccagaccttcatggacgcctgtacactggccgaccataaacttggccgcgactcaccaattaataaactgttgtatgcgcgcgacattcccagatataaaaggatggttgagagatactacgctgatatacgacaaacagttcccgccagcgatcaggaaatgaacagtgttctggcggagctatcctggaattactctggcgatctgggagcacgagttgccctgcatgagctgtataagtacatcaacaaatactatgatcagattatcaccgccctggaagaagatggcaccgcccagaaaatgcagctaggttaccgcctccaacaaattgcggctgctgtagaaaacaaagtcacggatctctag

SEQ ID NO: 47504 - DNA, 6408 bp, Artificial Sequence
  derived and/or modified sequence
atgcctgccctgggacccgctctgctgcaggctctttgggccggttgggtactgaccctccagccccttcccccgaccgcctttactcctaatggtacatatcttcaacacctagcacgcgacccgaccagtggcacactgtatctgggcgctaccaatttcctattccagctctcccccggacttcagttagaagcaacagtgtcaacaggacccgtgttagattcccgtgactgcctgccacctgtaatgcccgatgaatgtcctcaggcccaacctacaaacaacccaaatcagttactgttagtttcgcccggcgccctcgtggtttgcggatcagttcaccagggggtatgtgaacagagaagactcggccagctcgagcagctgttactgcgcccagagagaccgggggacacacaatacgtcgccgccaatgatccagctgtgtcaactgtgggactcgtagcccagggcctcgcaggagaacccctgctatttgttggtcgtggttacacgagcaggggggtgggcggcggaattccaccaattaccactagggccttgtggccaccagatcctcaggccgcttttagctatgaagagacagccaagctggccgtcggtcgcttaagcgaatacagccatcacttcgtttccgccttcgcccgtggagccagtgcctacttcctgtttttgaggagggacctacaagcccagtcacgagctttccgggcctatgtttcccgggtatgtctgagagatcagcactattattcttacgttgaattacctctggcctgtgaaggaggaagatacggtttgattcaggctgccgccgtggctactagcagagaagttgcacacggagaagtcttgttcgcggcttttagctctgctgcccctccgactgtggggagaccaccctccgcagctgccggagcttctggagcaagtgctctgtgtgccttccctttggacgaagtggaccgattagctaataggaccagggacgcatgctacacaagagaaggaagggctgaagacggaacagaagttgcctacatcgaatatgatgttaattcagattgcgcccagctgccggtggacacattagacgcatacccctgtggctcagaccacacaccatctcctatggcatcccgggtacccctagaggccacacccattctggagtggcctggtattcagctgacagccgttgccgtgacgatggaggacggtcatacaattgcatttttgggtgatagccagggtcagttacatcgggtgtacctgggcccaggttcagacggccatccttactctacccagtcgattcaacaaggatccgcggtttccagggatttgacattcgatgggacattcgagcacttatacgttatgacgcagtccactctcctcaaagtgcccgttgccagttgcgcccagcacctagactgtgcgtcgtgtctcgcccaccgggacccatactgtggttggtgtgtcctattaggccgttgtagccggcgtagtgaatgttctagaggacagggtccagaacagtggctatggtcttttcaacccgaacttggatgcctccaggttgcggccatgagtcccgctaacatcagtcgtgaggagacccgtgaggtctttctatcagtaccagatcttcctcctctgtggcctggtgagtcttattcatgccatttcggcgagcaccagagtccagctctgctcactgggtcaggggttatgtgcccttctccagacccttctgaagcacctgtcttgccccgcggcgctgactacgtttcggtttccgtggaattgcgtttcggagctgtcgtgatcgccaaaacaagcctaagcttctacgattgtgtggccgtaactgaactgagacccagtgcccaatgccaagcatgcgtttcgtcacggtggggttgcaattggtgtgtctggcagcatctctgtacacataaagcctcatgcgacgccggaccaatggtagcaagccatcagagccccctggtctcacctgacccccccgcacgagggggaccctccccatcccctccaactgcgcctaaagccctggccacccccgctccagacacactgccagttgaacccggtgccccttctacagccactgcctccgacatttccccgggtgcctccccgtccctgctctccccatgggggccctgggctggatcaggatctattagttcacctggctctacgggttctcccctccatgaagaaccatctccaccatcaccccagaacggtcctggtactgctgtgcctgctccgactgactttagaccaagtgcgacgcccgaggacttgcttgcatcccccttatcaccctcagaggttgctgcggtgccacccgctgatcctggccccgaggccctgcacccgaccgtccctttagatttgcctccagctaccgtgccggctacaacgtttccgggagcgatgggctctgtgaaaccggcacttgattggctgaccagagagggaggagagctacccgaagccgacgaatggaccggaggagacgcgccagctttttcaaccagcacacttctcagcggagacggggacagcgccgagctcgaaggccccccggcccctctgattctcccttccagccttgactaccagtatgacaccccagggctctgggaactcgaagaggccactttgggagcctcaagttgtccttgtgtggaatcagtccaagggtcaaccctgatgcctgtgcatgtcgagagggaaataagacttctcggaaggaacctgcaccttttccaggacgggccgggagacaacgaatgcgtcatggagctagagggcctggaggtggtcgtggaggccagagtggagtgcgaacccccccccgatactcagtgtcacgttacatgccaacaacatcaactcagttacgaagcgttacagcccgagctgcgggtgggcctgttcctaaggagagctggtagactgagggtggactctgctgaggggcttcacgttgtactgtacgactgcagcgtcggacacggagactgcagccgctgtcaaactgccatgcctcaatatggatgtgtctggtgtgagggagaaaggccaaggtgtgtaactcgggaagcgtgtggagaagcggaggctgttgcaactcagtgtcctgcgcccctaatccattctgtggagcctctgactggccccgtcgacggcggaactcgcgtgacaatcaggggcagtaatttaggtcagcacgtccaggatgtgctgggcatggtcaccgtagctggcgtcccctgtgctgtcgatgcccaggaatacgaagtttctagtagtttagtgtgcatcaccggtgcgtctggcgaagaggttgcaggagccacagccgtagaagttccagggcgtggaaggggcgtgtctgaacacgatttcgcttaccaggatccaaaagtgcattccattttccccgcaagagggccgcgcgctgggggaactcgcttgaccctgaacggctctaagctcctcaccggcagactggaagacattcgggttgtagttggagatcaaccttgccacctacttccggaacagcagagtgagcagctgcgatgcgagaccagcccccggccgacccccgctacacttccggtagctgtttggttcggtgcaacagagcgacgtcttcagcgggggcagtttaagtacacactcgaccctaacataacaagcgccggtccaaccaagagctttctgtcggggggacgagaaatctgtgttcgtggtcaaaatttggacgttgtacagacacctaggatccgtgtaactgttgtttcaaggatgctgcaaccctcccagggactcggaaggcgtcggagagtggttcctgagacagcatgttctctcgggccttcttgcagtagtcagcagtttgaagaaccctgtcacgttaactcgagccaactgatcacatgccgcacgccagcactgcctggcctcccagaggacccctgggtacgagtagagtttattttagacaatctggttttcgactttgctaccctaaaccctacacccttttcgtatgaagctgatccaacactacagcccctaaaccccgaagaccctaccatgccgtttcgacataagcccggctctgttttttcagtcgagggcgaaaacctggatctggcgatgtcaaaagaagaagtggtggcaatgataggtgacggaccatgcgtcgttaaaactctcaccagacaccacctctattgcgaaccccccgttgaacaaccactgccgcggcaccacgccctccgtgaagccccagacagccttcctgaattcactgtgcaaatgggaaacttgaggttctctttgggacacgttcaatatgatggcgagagtccaggcgctttccctgtggcagctcaagtcgggctcggcgtgggtacgtcattactggctctaggggttattatcatagtactcatgtataggcgtaaaagtaaacaggccttgagagattacaaaaaggtgcagatccaattagagaatttggagagttccgttagggaccgctgcaagaaggaattcacggacttgatgacagagatgacggacctgactagtgacctgctcggcagtggaattcccttcctagactacaaggtatacgcagagcgcatttttttccctgggcatagagagagcccattacatagagacctgggcgtgcctgaatcaaggaggccgaccgtcgaacagggattaggccagctttcgaatttgcttaattcaaagttatttcttaccaagtttattcataccctagaaagccaaaggaccttcagcgcaagagaccgcgcttatgtagccagcctcctgaccgttgcgttacatggtaaattggagtactttacggacatacttaggaccctcttgtccgacctggtagcccaatatgtagcaaagaatcctaaactgatgttgagacgcaccgagaccgtggtggagaaacttctcacaaactggatgagtatatgcctgtacacgttcgttcgcgactccgtaggcgagccactctatatgcttttcaggggtattaaacatcaggtggacaaaggaccagtcgattctgtgaccggaaaagctaagtacacgctcaatgataataggctcttgagggaagatgtcgagtaccggcctctaacactgaacgccctcctcgccgttggccctggcgctggcgaagcgcaaggcgtaccagtcaaagtgctcgattgtgacacgatatctcaggcaaaggaaaaaatgctcgaccagctgtataagggcgtacctctcacccagagacctgatccccggacactggatgttgagtggagaagtggggttgccggacatctgatcctcagtgatgaagacgtaacctcggaagttcagggattatggcgcagattgaatacgctgcagcactataaagtgcctgatggtgcaacggtggcactggttccgtgcctcacaaaacacgtgctcagagaaaatcaggactatgtaccaggtgaaagaacccccatgctggaggatgtggatgaaggaggcattcgcccttggcatctcgttaaaccgtcggacgaaccggagccaccccggccaaggagaggttcccttcgcggtggagaacgagagcgggctaaggcaattcccgaaatttacttgactaggctgttatctatgaagggtacgctgcaaaagtttgtcgatgacctattccaggttatcctgtccactagcagacctgtgccattggctgttaaatacttctttgatctgctagacgagcaagcccaacagcacggaatctcagatcaggataccattcacatttggaaaacaaattctctgcccctaagattctggatcaacatcatcaaaaacccacaatttgtcttcgacgtccagacatccgacaacatggatgcagtcctattagtcatcgcacaaaccttcatggacgcttgcacgctagccgaccacaagctcgggcgagattcacctatcaacaaattgctgtatgccagagatatcccacgctacaagaggatggtggagcgttactacgctgacatcagacagaccgtacccgcttccgatcaagagatgaactcggtcttagcagagctcagctggaattattccggagacttaggagctcgcgtagccctacacgagctgtataagtatatcaataagtactacgaccaaataataacagccttggaagaggatgggactgcccagaaaatgcaattaggatatagactgcaacaaatcgctgccgctgtcgagaataaagtgaccgacctctag

SEQ ID NO: 47505 - DNA, 5859 bp, Artificial Sequence
  derived and/or modified sequence
atgcctgctctgggcccagctcttctccaggctctctgggccgggtgggtcctcaccctccagccccttccaccaactgcattcactcccaatggcacgtatctgcagcacctggcaagggaccccacctcaggcaccctctacctgggggctaccaacttcctgttccagctgagccctgggctgcagctggaggccacagtgtccaccggccctgtgctagacagcagggactgcctgccacctgtgatgcctgatgagtgcccccaggcccagcctaccaacaacccgaatcagctgctcctggtgagcccaggggccctggtggtatgcgggagcgtgcaccagggggtctgtgaacagcggcgcctggggcagctcgagcagctgctgctgcggccagagcggcctggggacacacaatatgtggctgccaatgatcctgcggtcagcacggtggggctggtagcccagggcttggcaggggagcccctcctgtttgtggggcgaggatacaccagcaggggtgtggggggtggcattccacccatcacaacccgggccctgtggccgcccgacccccaagctgccttctcctatgaggagacagccaagctggcagtgggccgcctctccgagtacagccaccacttcgtgagtgcctttgcacgtggggccagcgcctacttcctgttcctgcggcgggacctgcaggctcagtctagagcttttcgtgcctatgtatctcgagtgtgtctccgggaccagcactactactcctatgtggagttgcctctggcctgcgaaggtggccgctacgggctgatccaggctgcagctgtggccacgtccagggaggtggcgcatggggaggtgctctttgcagctttctcctcggctgcaccccccactgtgggccggcccccatcggcggctgctggggcatctggagcctctgccctctgtgccttccccctggatgaggtggaccggcttgctaatcgcacgcgagatgcctgctacacccgggagggtcgtgctgaggatgggaccgaggtggcctacatcgagtatgatgtcaattctgactgtgcacagctgccagtggacaccctggatgcttatccctgtggctcagaccacacgcccagccccatggccagccgggtcccgctggaagccacaccaattctggagtggccagggattcagctaacagctgtggcagtcaccatggaagatggacacaccatcgctttcctgggtgatagtcaagggcagctgcacagggtctacttgggcccagggagcgatggccacccatactccacacagagcatccagcaggggtctgcagtgagcagagacctcacctttgatgggacctttgagcacctgtatgtcatgacccagagcacacttctgaaggttcctgtggcttcctgtgctcagcacctggactgtgcatcttgccttgctcacagggacccatactgtgggtggtgcgtgctccttggcaggtgcagtcgccgttctgagtgctcgaggggccagggcccagagcagtggctatggagcttccagcctgagctgggctgtctgcaagtggcagccatgagtcctgccaacatcagccgagaggagacgagggaggttttcctatcagtgccagacctgccacccctgtggccaggggagtcatattcctgccactttggggaacatcagagtcctgccctgctgactggttctggtgtgatgtgcccctccccagaccctagtgaggccccagtgctgccgagaggagccgactacgtatccgtgagcgtggagctcagatttggcgctgttgtgatcgccaaaacttccctctctttctatgactgtgtggcggtcactgaactccgcccatctgcgcagtgccaggcctgtgtgagcagccgctgggggtgtaactggtgtgtctggcagcacctgtgcacccacaaggcctcgtgtgatgctgggcccatggttgcaagccatcagagcccgcttgtctccccagaccctcctgcaagaggtgatggagactcagcagagcttgagggccctcccgcccccctcatcctcccgtccagcctcgactaccagtatgacacccccgggctctgggagctggaagaggcgaccttgggggcaagctcctgcccctgtgtggagagcgttcagggctccacgttgatgccggtccatgtggagcgggaaatccggctgctaggcaggaacctgcaccttttccaggatggcccaggagacaatgagtgtgtgatggagctggagggcctcgaggtggtggttgaggcccgggtcgagtgtgagccacctccagatacccagtgccatgtcacctgccagcagcaccagctcagctatgaggctctgcagccggagctccgtgtggggctgtttctgcgtcgggccggccgtctgcgtgtggacagtgctgaggggctgcatgtggtactgtatgactgttccgtgggacatggagactgcagccgctgccaaactgccatgccccagtatggctgtgtgtggtgtgagggggagcgtccacgttgtgtgacccgggaggcctgtggtgaggctgaggctgtggccacccagtgcccagcgcccctcatccactcggtggagccactgactgggcctgtagacggaggcacccgtgtcaccatcaggggctccaacctgggccagcatgtgcaggatgtgctgggcatggtcacggtggctggagtgccctgtgctgtggatgcccaggagtacgaggtctccagcagcctcgtgtgcatcaccggggccagtggggaggaggtggccggcgccacagcggtggaggtgccgggaagaggacgtggtgtctcagaacacgactttgcctaccaggatccgaaggtccattccatcttcccggcccgcggccccagagctgggggcacccgtctcaccctgaatggctccaagctcctgactgggcggctggaggacatccgagtggtggttggagaccagccttgtcacttgctgccggagcagcagtcagaacaactgcggtgtgagaccagcccacgccccacgcctgccacgctccctgtggctgtgtggtttggggccacggagcggaggcttcaacgcggacagttcaagtataccttggaccccaacatcacctctgctggccccaccaagagcttcctcagtggaggacgtgagatatgcgtccgtggccagaatctggacgtggtacagacgccaagaatccgggtgaccgtggtctcgagaatgctgcagcccagccaggggcttggacggaggcgtcgcgtggtcccggagacggcatgttcccttggaccctcctgcagtagccagcaatttgaggagccgtgccatgtcaactcctcccagctcatcacgtgccgcacacctgccctcccaggcctgcctgaggacccctgggtccgggtggaatttatccttgacaacctggtctttgactttgcaacactgaaccccacacctttctcctatgaggccgaccccaccctgcagccactcaaccctgaggaccccaccatgccattccggcacaagcctgggagtgtgttctccgtggagggggagaacctggaccttgcaatgtccaaggaggaggtggtggctatgataggggatggcccctgtgtggtgaagacgctgacgcggcaccacctgtactgcgagccccccgtggagcagcccctgccacggcaccatgccctccgagaggcacctgactctttgcctgagttcacggtgcagatggggaacttgcgcttctccctgggtcacgtgcagtatgacggcgagagccctggggcttttcctgtggcagcccaggtgggcttgggggtgggcacctctcttctggctctgggtgtcatcatcattgtcctcatgtacaggaggaagagcaagcaggccctgagggactataagaaggttcagatccagctggagaatctggagagcagtgtgcgggaccgctgcaagaaggaattcacagacctcatgactgagatgaccgatctcaccagtgacctcctgggcagcggcatccccttcctcgactacaaggtgtatgcggagaggatcttcttccctgggcaccgcgagtcgcccttgcaccgggacctgggtgtgcctgagagcagacggcccactgtggagcaagggctggggcagctctctaacctgctcaacagcaagctcttcctcaccaagttcatccacacgctggagagccagcgcaccttttcagctcgggaccgtgcctacgtggcatctctgctcaccgtggcactgcatgggaagcttgagtatttcactgacatcctccgcactctgctcagtgacctggttgcccagtatgtggccaagaaccccaagctgatgctgcgcaggacagagactgtggtggagaagctgctcaccaactggatgtccatctgtctgtataccttcgtgagggactccgtaggggagcctctgtacatgctctttcgagggattaagcaccaagtggataaggggccagtggacagtgtgacaggcaaggccaaatacaccttgaacgacaaccgcctgctcagagaggatgtggagtaccgtcccctgaccttgaatgcactattggctgtggggcctggggcaggagaggcccagggcgtgcccgtgaaggtcctagactgtgacaccatctcccaggcaaaggagaagatgctggaccagctttataaaggagtgcctctcacccagcggccagaccctcgcacccttgatgttgagtggcggtctggggtggccgggcacctcattctttctgacgaggatgtcacttctgaggtccagggtctgtggaggcgcctgaacacactgcagcattacaaggtcccagatggagcaactgtggccctcgtcccctgcctcaccaagcatgtgctccgggaaaaccaggattatgtccctggagagcggaccccaatgctggaggatgtagatgaggggggcatccggccctggcacctggtgaagccaagtgatgagccggagccgcccaggcctcggaggggcagccttcggggcggggagcgtgagcgcgccaaggccatccctgagatctacctgacccgcctgctgtccatgaagggcaccctgcagaagttcgtggatgacctgttccaggtgattctcagcaccagccgccccgtgccgctcgctgtgaagtacttctttgacctgctggatgagcaggcccagcagcatggcatctccgaccaggacaccatccacatctggaagaccaacagcttgcctctgaggttctggatcaatataataaaaaacccgcagtttgtgttcgacgtgcaaacatctgataacatggatgcggtgctccttgtcattgcacagaccttcatggacgcctgcaccctggccgaccacaagctgggccgggactccccgatcaacaaacttctgtatgcacgggacattccccggtacaagcggatggtggaaaggtactatgcagacatcagacagactgtcccagccagcgaccaagagatgaactctgtcctggctgaactgtcctggaactactccggagacctcggggcgcgagtggccctgcatgaactctacaagtacatcaacaagtactatgaccagatcatcactgccctggaggaggatggcacggcccagaagatgcagctgggctatcggctccagcagattgcagctgctgtggaaaacaaggtcacagatctatag

SEQ ID NO: 47506 - DNA, 2241 bp, Artificial Sequence
  derived and/or modified sequence
atgcccttcagacacaagcctgggagtgtcttcagcgttgagggggagaacttggatctcgcaatgtcaaaggaggaggtcgttgcaatgatcggcgatgggccatgtgtggtaaagaccctgacccggcaccacctgtactgtgagcccccagttgaacaacccctcccgaggcatcatgcattacgagaggcacccgactccttacccgagtttacagtgcagatgggtaacctgcgtttcagtctaggacatgtgcaatacgacggggagtcccccggagctttcccggtggccgctcaagtcgggctgggcgtgggcacatctttactggccctcggggtaatcatcatcgtgctgatgtacagacggaaatcaaagcaggccttgcgagactataagaaggtccagatacaactggagaatctcgagtcgagtgtgcgcgacaggtgtaagaaggagtttacagaccttatgaccgaaatgaccgacctcacgtctgatctgctaggttctggtatcccctttctggattacaaagtatatgctgaaaggatctttttcccagggcatagagaatctcctctccatagggatttgggcgtacccgagtcgcgcagacctaccgtcgaacaggggctgggccagctctcaaacctgctaaactcgaagctctttctgacaaaattcattcatacactggagagccaacggacattcagcgccagagatcgagcttacgtggcctctctgctgactgtggcattgcatggcaaactcgaatatttcactgacatcttacgaaccctgctctccgatttagtggctcagtatgttgccaaaaaccccaaactcatgctgcgaagaactgagacagttgtggagaagctgcttactaattggatgtccatttgcctgtataccttcgtgcgagactccgtgggggagcccctttatatgctgttccgaggcattaaacaccaggtggataaaggacccgttgacagcgtgaccggaaaagcaaaatatacacttaatgataaccgactgttgcgagaggatgtggaatatagaccactcactctgaatgctctgttagctgtgggtcccggggccggagaagcccagggcgtgccagtgaaggtcttagattgcgatacaatttcccaggccaaggagaagatgctggatcaactttacaaaggagtcccactgacgcaacgccctgacccccggacccttgacgttgaatggagaagcggtgtcgcagggcacttgatcctgtctgacgaggatgtaactagcgaagtgcaggggctgtggcggcgactaaataccttacaacattacaaagtcccagatggcgcaaccgtggccttggtgccgtgtctaaccaagcacgttctaagggaaaatcaggattacgttcctggagagcggactcccatgttagaagacgtggacgagggtggtattaggccctggcatttagtgaaaccatctgacgaacccgagccacctagaccccgccggggcagtttacgcggaggggaaagagaacgcgccaaggcgattcccgagatctatctcaccaggttattgtccatgaagggcactttgcagaagttcgtagatgacctattccaagtcatcctgtctacatctagacccgttccactggctgttaagtactttttcgatcttctggacgagcaggcccagcaacacggaatttctgatcaagacacaattcacatatggaagaccaactcactgccattgagattctggattaatattatcaaaaatccacagttcgtgttcgacgtgcagacctctgataatatggacgccgttttactcgttatcgcacaaacttttatggacgcatgtaccctggcagatcacaaactcggacgagactcacccatcaataagctcctatatgctagggacattcctcgctacaagagaatggtggagagatactatgcagatattcgccaaacagttcctgccagtgatcaggaaatgaattcagtgttggccgaactcagctggaactattccggggatcttggcgcgcgagtggcccttcatgagctgtataaatacattaacaaatactatgaccagataatcacagccctggaggaagacggaacggcacagaaaatgcagttaggctatcggttacaacaaatcgccgctgctgtggagaacaaggtgacagacttatag

SEQ ID NO: 47507 - DNA, 5859 bp, Artificial Sequence
  derived and/or modified sequence
atgcctgctcttggacctgccctgctacaggccttgtgggcaggctgggtacttacactgcagcccctcccccctacggcgttcactcctaatggaacatatcttcagcatctcgcacgggacccaacaagtggtacattgtatctaggagccaccaattttcttttccaacttagccccggccttcagctggaagctaccgtctctactggcccagttcttgactctcgggactgtttgcctcctgtcatgcctgacgagtgccctcaggcccagcccactaacaaccctaatcagcttctgctggtctcgcccggcgccctcgttgtgtgtggatcagttcatcagggtgtttgtgagcaacggcgactgggacaattggaacagctccttctgcgcccggaacgccctggagacacacaatatgtcgcagcgaatgatcccgccgtctcgaccgttggcctagttgctcagggactggcgggggaaccattgttgttcgttggtcgcggctatacttctcgaggggtcggcggaggtatccctccaatcactaccagagcattgtggccacctgatccccaagcggccttctcttatgaagagacagctaaacttgctgttggccggctgtcagagtacagccatcacttcgttagtgcttttgctcgcggagcttccgcctacttcctgttcctgcgccgagatctgcaggcccaatcccgtgcgtttagagcatacgtatcaagagtctgcctccgcgaccaacattactattcatacgtagagctaccactcgcttgcgagggagggcgttatgggctcatccaagccgctgctgtggccacatcacgagaggttgcccatggggaagtgctgttcgcagccttcagtagtgcagcccccccaactgtgggtaggccaccttccgccgcagctggcgcttccggagctagcgccctctgtgctttcccactagacgaggttgatcgacttgccaatagaactcgcgacgcctgctacacaagagaagggagagctgaggatggaactgaagtagcttatatcgaatacgacgtaaactctgattgtgctcagttgcccgtggacacactggacgcctatccatgtggatccgatcatacaccgtctcctatggcgtcacgcgtgcctttagaagccaccccgatcttagagtggcccggcatccagctgactgctgtcgccgtgactatggaagacggccacaccattgcatttttgggagatagtcagggccaacttcaccgcgtttacctaggtcccggcagtgatgggcatccatattcaacccagtccattcagcagggctcagctgtgtccagggacttaacttttgatgggacatttgagcatctgtacgtcatgactcaatccaccctgctcaaagtgcctgttgcatcatgcgctcagcaccttgattgcgcttcatgtttagcacatcgggatccttactgcggatggtgcgtgctcctgggacgctgctcaaggagaagcgagtgctccagaggacaaggacctgagcagtggttgtggtccttccaacccgaacttggttgtctccaggtcgcagccatgtcccctgcaaatatctcaagggaagagactagggaggtgttcctaagcgtcccagacctccctccattatggcctggcgagtcatactcttgccatttcggcgaacaccagtcccccgccttgcttacgggctccggcgtcatgtgtcccagccctgacccatctgaggctcccgttctaccccgtggtgcagactatgtctcagtatctgtggaactccggtttggggctgtggttattgcaaagacttccctctcgttttatgattgtgttgccgtcactgaactccgtccctctgcccagtgccaggcctgcgtatcgagtcgctgggggtgtaattggtgcgtctggcagcatctgtgtacacacaaggcctcctgcgatgcgggacccatggtagccagtcatcaaagtcccctggttagcccagatccaccggcacggggtgacggtgattcagccgaattagaaggaccccctgcccctctgatcctcccttctagccttgactaccagtatgacactcctggcctttgggagctcgaagaagccacattgggtgcttcttcctgtccatgcgttgaaagtgtccaaggaagtactttgatgcccgtgcacgtggaaagagagattagactattgggcagaaatctccatcttttccaggacggccccggagataacgagtgtgtgatggagctagaaggacttgaggtcgtcgtggaggcaagagtagaatgtgagccaccacctgacacacagtgccacgtgacatgtcaacagcaccagttgtcctacgaagccctccagccagaacttcgtgttggcttgttcctacgccgggcaggaagactgcgagtggattctgctgagggactgcatgtggttctttacgactgtagcgtgggccacggcgattgttcacgatgtcaaaccgctatgccgcaatatgggtgcgtatggtgtgaaggcgaacgccctagatgcgttaccagggaagcttgcggggaggccgaagctgtggcaacccaatgccccgctcccttgatccacagcgtcgagccattaacaggtcctgtggacggcggcacaagggttacgattaggggaagcaacctgggtcagcacgtgcaggatgtgttaggtatggtgacggtcgcaggggtaccttgcgcagtagacgcacaagaatatgaggtctctagctctctagtctgcatcacaggggccagtggagaagaggtggcaggtgctactgcggtagaggtaccaggtagaggacgaggggtcagtgaacacgattttgcttatcaggatcccaaggtccacagcattttccccgcccgggggccaagagcaggcgggacaaggctgaccttgaatggatccaaactgttaaccgggagattagaagatattcgagtagtggtcggagatcaaccctgccatctgttacctgagcagcaaagcgagcagctgaggtgtgaaacaagcccccgccccacaccggccactctcccagttgccgtttggttcggtgcaacggagcggcggctgcagcgaggccagttcaaatacactctggacccaaatattaccagtgcgggccctacaaagagttttttaagtgggggaagagaaatctgcgttcgaggtcaaaatcttgatgtggtgcagaccccccgaattcgtgtgacagttgtctctaggatgctccagccctcacagggcctcggaaggaggagaagagtcgtgcctgagactgcctgctcccttggaccttcttgtagctcccaacagttcgaggaaccctgccacgtgaacagctcacagttaataacctgccgtacgcccgcattgcccgggcttcccgaagacccctgggtgagagtggagtttattctggacaatctcgtgtttgattttgccaccttgaacccaacacccttcagttacgaggctgatcctacactgcagccactaaatcctgaagaccccaccatgccttttagacataaaccaggttctgttttcagcgttgagggggagaatcttgacctcgctatgagtaaggaagaagtagtcgccatgattggagacggcccctgtgtggtgaaaacccttacccggcaccacttgtactgtgaaccacctgtggaacagcccctgccccgtcaccatgcactgagagaggcaccagattctctgcccgagttcactgtgcagatgggtaacttgcgattttccctcggacatgtgcaatacgatggcgagagcccaggagccttcccagtcgccgctcaggtaggcctgggagttggaacaagcttactggcactgggcgttataattattgttcttatgtataggagaaagtccaaacaggctttgagggattacaagaaagtccaaattcagttggaaaacctggagtcaagtgtgcgtgaccgatgcaagaaggagtttaccgacctcatgacagagatgacagatctgacttccgatctactaggctcaggtatcccgtttcttgactataaagtttatgcggagaggatcttttttccgggccatcgcgaaagtccattacaccgtgatctaggagtccccgagtctagacggccgacagtggaacaaggcctgggccagctatcaaatctgttgaactcaaagctctttctgaccaagtttatccacacccttgagtctcagcgcaccttttccgcccgtgatcgcgcctatgtggcatcccttcttacggtcgcccttcacggcaaactggaatatttcactgatatattacggacccttctctctgatcttgtcgcgcagtatgtagcaaaaaacccaaaactcatgttacgtcgaaccgaaacagtggtagagaaactactgacaaattggatgagtatttgtctatacacctttgtaagggattccgttggagagcctctatatatgttgttccggggaatcaagcatcaggtggataagggcccagttgactcagttactggaaaagcgaagtacactctaaacgacaaccggctgcttcgagaagatgtcgagtataggcccctcaccttgaacgcactactggccgtgggccctggagcgggtgaagcgcagggggtgcccgtcaaagtcctcgactgtgatacgattagtcaggctaaagaaaaaatgctcgaccaattgtacaaaggggtgcctctcactcagcgcccagatccaagaactctagacgtggagtggagaagtggcgttgctggacacttaattctctctgacgaggatgtcacaagtgaggtccagggcctgtggcgccgcctgaataccctacagcactataaggttcccgatggcgcgactgtagccctagtgccatgccttaccaaacacgtattgcgggagaatcaggattacgtacccggcgaacgaacccccatgctcgaggacgtggatgaagggggaatcagaccgtggcatctggtgaaacctagcgacgagcccgaaccccctaggcccagacgcggaagccttcgcgggggagaaagagagagagccaaagctatcccagaaatctacttaactagacttctgagcatgaaaggaactcttcagaaattcgtggacgatctctttcaagtgatactgtcaacctctcgacccgtacccctggctgttaagtatttcttcgacttactcgatgaacaggcccaacaacatggaatctccgaccaggacaccattcacatttggaagaccaattccctaccattgaggttctggatcaatattattaagaacccacagttcgtattcgatgtccagacttccgacaacatggacgccgtccttctagtcattgcacagacattcatggatgcctgcaccttagctgatcacaaactaggacgagatagcccgatcaataaactgctctatgcccgcgatatcccaaggtacaaacggatggtggagcgctactatgccgacattcgccaaacggtaccggcctcagatcaagagatgaatagtgtcctcgccgaattgtcctggaactacagtggagacctgggcgcgagagttgccctgcatgaattatataagtatattaataagtattatgaccagattattacagccttggaggaggacggaacagcacaaaaaatgcagctgggatacagattgcagcagattgcggcagccgtggagaataaagtgacagacttatag

SEQ ID NO: 47508 - DNA, 7143 bp, Artificial Sequence
  derived and/or modified sequence
agggccaggtgcgcaggggagaaacaaggcgccttggagttcaggtgactcccacacgggtcatgctgttgtctcctgatccagccggccctgccaggtgaccatgcctgctctgggcccagctcttctccaggctctctgggccgggtgggtcctcaccctccagccccttccaccaactgcattcactcccaatggcacgtatctgcagcacctggcaagggaccccacctcaggcaccctctacctgggggctaccaacttcctgttccagctgagccctgggctgcagctggaggccacagtgtccaccggccctgtgctagacagcagggactgcctgccacctgtgatgcctgatgagtgcccccaggcccagcctaccaacaacccgaatcagctgctcctggtgagcccaggggccctggtggtatgcgggagcgtgcaccagggggtctgtgaacagcggcgcctggggcagctcgagcagctgctgctgcggccagagcggcctggggacacacaatatgtggctgccaatgatcctgcggtcagcacggtggggctggtagcccagggcttggcaggggagcccctcctgtttgtggggcgaggatacaccagcaggggtgtggggggtggcattccacccatcacaacccgggccctgtggccgcccgacccccaagctgccttctcctatgaggagacagccaagctggcagtgggccgcctctccgagtacagccaccacttcgtgagtgcctttgcacgtggggccagcgcctacttcctgttcctgcggcgggacctgcaggctcagtctagagcttttcgtgcctatgtatctcgagtgtgtctccgggaccagcactactactcctatgtggagttgcctctggcctgcgaaggtggccgctacgggctgatccaggctgcagctgtggccacgtccagggaggtggcgcatggggaggtgctctttgcagctttctcctcggctgcaccccccactgtgggccggcccccatcggcggctgctggggcatctggagcctctgccctctgtgccttccccctggatgaggtggaccggcttgctaatcgcacgcgagatgcctgctacacccgggagggtcgtgctgaggatgggaccgaggtggcctacatcgagtatgatgtcaattctgactgtgcacagctgccagtggacaccctggatgcttatccctgtggctcagaccacacgcccagccccatggccagccgggtcccgctggaagccacaccaattctggagtggccagggattcagctaacagctgtggcagtcaccatggaagatggacacaccatcgctttcctgggtgatagtcaagggcagctgcacagggtctacttgggcccagggagcgatggccacccatactccacacagagcatccagcaggggtctgcagtgagcagagacctcacctttgatgggacctttgagcacctgtatgtcatgacccagagcacacttctgaaggttcctgtggcttcctgtgctcagcacctggactgtgcatcttgccttgctcacagggacccatactgtgggtggtgcgtgctccttggcaggtgcagtcgccgttctgagtgctcgaggggccagggcccagagcagtggctatggagcttccagcctgagctgggctgtctgcaagtggcagccatgagtcctgccaacatcagccgagaggagacgagggaggttttcctatcagtgccagacctgccacccctgtggccaggggagtcatattcctgccactttggggaacatcagagtcctgccctgctgactggttctggtgtgatgtgcccctccccagaccctagtgaggccccagtgctgccgagaggagccgactacgtatccgtgagcgtggagctcagatttggcgctgttgtgatcgccaaaacttccctctctttctatgactgtgtggcggtcactgaactccgcccatctgcgcagtgccaggcctgtgtgagcagccgctgggggtgtaactggtgtgtctggcagcacctgtgcacccacaaggcctcgtgtgatgctgggcccatggttgcaagccatcagagcccgcttgtctccccagaccctcctgcaagaggtggacccagcccctccccacccacagcccccaaagccctggccacccctgctcctgacacccttcccgtggagcctggggctccctccacagccacagcttcggacatctcacctggggctagtccttccctgctcagcccctgggggccatgggcaggttctggctccatatcttcccctggctccacagggtcgcctctccatgaggagccctcccctcccagcccccaaaatggacctggaaccgctgtccctgcccccactgacttcagaccctcagccacacctgaggacctcttggcctccccgctgtcaccgtcagaggtagcagcagtgccccctgcagaccctggccccgaggctcttcatcccacagtgcccctggacctgccccctgccactgttcctgccaccactttcccaggggccatgggctccgtgaagcccgccctggactggctcacgagagaaggcggcgagctgcccgaggcggacgagtggacggggggtgacgcacccgccttctccacttccaccctcctctcaggtgatggagactcagcagagcttgagggccctcccgcccccctcatcctcccgtccagcctcgactaccagtatgacacccccgggctctgggagctggaagaggcgaccttgggggcaagctcctgcccctgtgtggagagcgttcagggctccacgttgatgccggtccatgtggagcgggaaatccggctgctaggcaggaacctgcaccttttccaggatggcccaggagacaatgagtgtgtgatggagctggagggcctcgaggtggtggttgaggcccgggtcgagtgtgagccacctccagatacccagtgccatgtcacctgccagcagcaccagctcagctatgaggctctgcagccggagctccgtgtggggctgtttctgcgtcgggccggccgtctgcgtgtggacagtgctgaggggctgcatgtggtactgtatgactgttccgtgggacatggagactgcagccgctgccaaactgccatgccccagtatggctgtgtgtggtgtgagggggagcgtccacgttgtgtgacccgggaggcctgtggtgaggctgaggctgtggccacccagtgcccagcgcccctcatccactcggtggagccactgactgggcctgtagacggaggcacccgtgtcaccatcaggggctccaacctgggccagcatgtgcaggatgtgctgggcatggtcacggtggctggagtgccctgtgctgtggatgcccaggagtacgaggtctccagcagcctcgtgtgcatcaccggggccagtggggaggaggtggccggcgccacagcggtggaggtgccgggaagaggacgtggtgtctcagaacacgactttgcctaccaggatccgaaggtccattccatcttcccggcccgcggccccagagctgggggcacccgtctcaccctgaatggctccaagctcctgactgggcggctggaggacatccgagtggtggttggagaccagccttgtcacttgctgccggagcagcagtcagaacaactgcggtgtgagaccagcccacgccccacgcctgccacgctccctgtggctgtgtggtttggggccacggagcggaggcttcaacgcggacagttcaagtataccttggaccccaacatcacctctgctggccccaccaagagcttcctcagtggaggacgtgagatatgcgtccgtggccagaatctggacgtggtacagacgccaagaatccgggtgaccgtggtctcgagaatgctgcagcccagccaggggcttggacggaggcgtcgcgtggtcccggagacggcatgttcccttggaccctcctgcagtagccagcaatttgaggagccgtgccatgtcaactcctcccagctcatcacgtgccgcacacctgccctcccaggcctgcctgaggacccctgggtccgggtggaatttatccttgacaacctggtctttgactttgcaacactgaaccccacacctttctcctatgaggccgaccccaccctgcagccactcaaccctgaggaccccaccatgccattccggcacaagcctgggagtgtgttctccgtggagggggagaacctggaccttgcaatgtccaaggaggaggtggtggctatgataggggatggcccctgtgtggtgaagacgctgacgcggcaccacctgtactgcgagccccccgtggagcagcccctgccacggcaccatgccctccgagaggcacctgactctttgcctgagttcacggtgcagatggggaacttgcgcttctccctgggtcacgtgcagtatgacggcgagagccctggggcttttcctgtggcagcccaggtgggcttgggggtgggcacctctcttctggctctgggtgtcatcatcattgtcctcatgtacaggaggaagagcaagcaggccctgagggactataagaaggttcagatccagctggagaatctggagagcagtgtgcgggaccgctgcaagaaggaattcacagacctcatgactgagatgaccgatctcaccagtgacctcctgggcagcggcatccccttcctcgactacaaggtgtatgcggagaggatcttcttccctgggcaccgcgagtcgcccttgcaccgggacctgggtgtgcctgagagcagacggcccactgtggagcaagggctggggcagctctctaacctgctcaacagcaagctcttcctcaccaagttcatccacacgctggagagccagcgcaccttttcagctcgggaccgtgcctacgtggcatctctgctcaccgtggcactgcatgggaagcttgagtatttcactgacatcctccgcactctgctcagtgacctggttgcccagtatgtggccaagaaccccaagctgatgctgcgcaggacagagactgtggtggagaagctgctcaccaactggatgtccatctgtctgtataccttcgtgagggactccgtaggggagcctctgtacatgctctttcgagggattaagcaccaagtggataaggggccagtggacagtgtgacaggcaaggccaaatacaccttgaacgacaaccgcctgctcagagaggatgtggagtaccgtcccctgaccttgaatgcactattggctgtggggcctggggcaggagaggcccagggcgtgcccgtgaaggtcctagactgtgacaccatctcccaggcaaaggagaagatgctggaccagctttataaaggagtgcctctcacccagcggccagaccctcgcacccttgatgttgagtggcggtctggggtggccgggcacctcattctttctgacgaggatgtcacttctgaggtccagggtctgtggaggcgcctgaacacactgcagcattacaaggtcccagatggagcaactgtggccctcgtcccctgcctcaccaagcatgtgctccgggaaaaccaggattatgtccctggagagcggaccccaatgctggaggatgtagatgaggggggcatccggccctggcacctggtgaagccaagtgatgagccggagccgcccaggcctcggaggggcagccttcggggcggggagcgtgagcgcgccaaggccatccctgagatctacctgacccgcctgctgtccatgaagggcaccctgcagaagttcgtggatgacctgttccaggtgattctcagcaccagccgccccgtgccgctcgctgtgaagtacttctttgacctgctggatgagcaggcccagcagcatggcatctccgaccaggacaccatccacatctggaagaccaacagcttgcctctgaggttctggatcaatataataaaaaacccgcagtttgtgttcgacgtgcaaacatctgataacatggatgcggtgctccttgtcattgcacagaccttcatggacgcctgcaccctggccgaccacaagctgggccgggactccccgatcaacaaacttctgtatgcacgggacattccccggtacaagcggatggtggaaaggtactatgcagacatcagacagactgtcccagccagcgaccaagagatgaactctgtcctggctgaactgtcctggaactactccggagacctcggggcgcgagtggccctgcatgaactctacaagtacatcaacaagtactatgaccagatcatcactgccctggaggaggatggcacggcccagaagatgcagctgggctatcggctccagcagattgcagctgctgtggaaaacaaggtcacagatctataggaacccaggagccacggcctgctgttgcttcagcctggcctgggcagccctggaagctcggaggagaggccaccttcttaggtgcctgtagtgactgacaagcagagttagtggaaggtgactcccagtctcctggtggctctggcctcggccctgctggatccacctcctagacccggggcctcaaggctcatggggtagtacccagcctgctccccgagtccagcgaccctgtgacaccggtctgcagggagttggggactaagggcttccagagagtggctggaagagactccaggcccctggggagactgtactgttcctgaacactggccttggccacactgggattcggagaggaaggaggagagccccatgcttcctgtctgcctcctccaccatccctgacctcagttgagctgcctctggccttgttgctgctgccacatcctaggtctaagagttgaacgcctctcctaggccactacaaactgacccctcagcagggctggctgccacagggctgccctgcctcataggtagccatggtgagggctatctgctgcaggggggtcttggggagagtggtgactccattgacccagcttttcattaaaggataacacactgca

SEQ ID NO: 47509 - DNA, 6408 bp, Artificial Sequence
  derived and/or modified sequence
atgcccgccctgggccccgccctgctgcaggccctgtgggccggctgggtgctgaccctgcagcccctgccccccaccgccttcacccccaacggcacctacctgcagcacctggccagagaccccaccagcggcaccctgtacctgggcgccaccaacttcctgttccagctgagccccggcctgcagctggaggccaccgtgagcaccggccccgtgctggacagcagagactgcctgccccccgtgatgcccgacgagtgcccccaggcccagcccaccaacaaccccaaccagctgctgctggtgagccccggcgccctggtggtgtgcggcagcgtgcaccagggcgtgtgcgagcagagaagactgggccagctggagcagctgctgctgagacccgagagacccggcgacacccagtacgtggccgccaacgaccccgccgtgagcaccgtgggcctggtggcccagggcctggccggcgagcccctgctgttcgtgggcagaggctacaccagcagaggcgtgggcggcggcatcccccccatcaccaccagagccctgtggccccccgacccccaggccgccttcagctacgaggagaccgccaagctggccgtgggcagactgagcgagtacagccaccacttcgtgagcgccttcgccagaggcgccagcgcctacttcctgttcctgagaagagacctgcaggcccagagcagagccttcagagcctacgtgagcagagtgtgcctgagagaccagcactactacagctacgtggagctgcccctggcctgcgagggcggcagatacggcctgatccaggccgccgccgtggccaccagcagagaggtggcccacggcgaggtgctgttcgccgccttcagcagcgccgccccccccaccgtgggcagaccccccagcgccgccgccggcgccagcggcgccagcgccctgtgcgccttccccctggacgaggtggacagactggccaacagaaccagagacgcctgctacaccagagagggcagagccgaggacggcaccgaggtggcctacatcgagtacgacgtgaacagcgactgcgcccagctgcccgtggacaccctggacgcctacccctgcggcagcgaccacacccccagccccatggccagcagagtgcccctggaggccacccccatcctggagtggcccggcatccagctgaccgccgtggccgtgaccatggaggacggccacaccatcgccttcctgggcgacagccagggccagctgcacagagtgtacctgggccccggcagcgacggccacccctacagcacccagagcatccagcagggcagcgccgtgagcagagacctgaccttcgacggcaccttcgagcacctgtacgtgatgacccagagcaccctgctgaaggtgcccgtggccagctgcgcccagcacctggactgcgccagctgcctggcccacagagacccctactgcggctggtgcgtgctgctgggcagatgcagcagaagaagcgagtgcagcagaggccagggccccgagcagtggctgtggagcttccagcccgagctgggctgcctgcaggtggccgccatgagccccgccaacatcagcagagaggagaccagagaggtgttcctgagcgtgcccgacctgccccccctgtggcccggcgagagctacagctgccacttcggcgagcaccagagccccgccctgctgaccggcagcggcgtgatgtgccccagccccgaccccagcgaggcccccgtgctgcccagaggcgccgactacgtgagcgtgagcgtggagctgagattcggcgccgtggtgatcgccaagaccagcctgagcttctacgactgcgtggccgtgaccgagctgagacccagcgcccagtgccaggcctgcgtgagcagcagatggggctgcaactggtgcgtgtggcagcacctgtgcacccacaaggccagctgcgacgccggccccatggtggccagccaccagagccccctggtgagccccgacccccccgccagaggcggccccagccccagcccccccaccgcccccaaggccctggccacccccgcccccgacaccctgcccgtggagcccggcgcccccagcaccgccaccgccagcgacatcagccccggcgccagccccagcctgctgagcccctggggcccctgggccggcagcggcagcatcagcagccccggcagcaccggcagccccctgcacgaggagcccagcccccccagcccccagaacggccccggcaccgccgtgcccgcccccaccgacttcagacccagcgccacccccgaggacctgctggccagccccctgagccccagcgaggtggccgccgtgccccccgccgaccccggccccgaggccctgcaccccaccgtgcccctggacctgccccccgccaccgtgcccgccaccaccttccccggcgccatgggcagcgtgaagcccgccctggactggctgaccagagagggcggcgagctgcccgaggccgacgagtggaccggcggcgacgcccccgccttcagcaccagcaccctgctgagcggcgacggcgacagcgccgagctggagggcccccccgcccccctgatcctgcccagcagcctggactaccagtacgacacccccggcctgtgggagctggaggaggccaccctgggcgccagcagctgcccctgcgtggagagcgtgcagggcagcaccctgatgcccgtgcacgtggagagagagatcagactgctgggcagaaacctgcacctgttccaggacggccccggcgacaacgagtgcgtgatggagctggagggcctggaggtggtggtggaggccagagtggagtgcgagcccccccccgacacccagtgccacgtgacctgccagcagcaccagctgagctacgaggccctgcagcccgagctgagagtgggcctgttcctgagaagagccggcagactgagagtggacagcgccgagggcctgcacgtggtgctgtacgactgcagcgtgggccacggcgactgcagcagatgccagaccgccatgccccagtacggctgcgtgtggtgcgagggcgagagacccagatgcgtgaccagagaggcctgcggcgaggccgaggccgtggccacccagtgccccgcccccctgatccacagcgtggagcccctgaccggccccgtggacggcggcaccagagtgaccatcagaggcagcaacctgggccagcacgtgcaggacgtgctgggcatggtgaccgtggccggcgtgccctgcgccgtggacgcccaggagtacgaggtgagcagcagcctggtgtgcatcaccggcgccagcggcgaggaggtggccggcgccaccgccgtggaggtgcccggcagaggcagaggcgtgagcgagcacgacttcgcctaccaggaccccaaggtgcacagcatcttccccgccagaggccccagagccggcggcaccagactgaccctgaacggcagcaagctgctgaccggcagactggaggacatcagagtggtggtgggcgaccagccctgccacctgctgcccgagcagcagagcgagcagctgagatgcgagaccagccccagacccacccccgccaccctgcccgtggccgtgtggttcggcgccaccgagagaagactgcagagaggccagttcaagtacaccctggaccccaacatcaccagcgccggccccaccaagagcttcctgagcggcggcagagagatctgcgtgagaggccagaacctggacgtggtgcagacccccagaatcagagtgaccgtggtgagcagaatgctgcagcccagccagggcctgggcagaagaagaagagtggtgcccgagaccgcctgcagcctgggccccagctgcagcagccagcagttcgaggagccctgccacgtgaacagcagccagctgatcacctgcagaacccccgccctgcccggcctgcccgaggacccctgggtgagagtggagttcatcctggacaacctggtgttcgacttcgccaccctgaaccccacccccttcagctacgaggccgaccccaccctgcagcccctgaaccccgaggaccccaccatgcccttcagacacaagcccggcagcgtgttcagcgtggagggcgagaacctggacctggccatgagcaaggaggaggtggtggccatgatcggcgacggcccctgcgtggtgaagaccctgaccagacaccacctgtactgcgagccccccgtggagcagcccctgcccagacaccacgccctgagagaggcccccgacagcctgcccgagttcaccgtgcagatgggcaacctgagattcagcctgggccacgtgcagtacgacggcgagagccccggcgccttccccgtggccgcccaggtgggcctgggcgtgggcaccagcctgctggccctgggcgtgatcatcatcgtgctgatgtacagaagaaagagcaagcaggccctgagagactacaagaaggtgcagatccagctggagaacctggagagcagcgtgagagacagatgcaagaaggagttcaccgacctgatgaccgagatgaccgacctgaccagcgacctgctgggcagcggcatccccttcctggactacaaggtgtacgccgagagaatcttcttccccggccacagagagagccccctgcacagagacctgggcgtgcccgagagcagaagacccaccgtggagcagggcctgggccagctgagcaacctgctgaacagcaagctgttcctgaccaagttcatccacaccctggagagccagagaaccttcagcgccagagacagagcctacgtggccagcctgctgaccgtggccctgcacggcaagctggagtacttcaccgacatcctgagaaccctgctgagcgacctggtggcccagtacgtggccaagaaccccaagctgatgctgagaagaaccgagaccgtggtggagaagctgctgaccaactggatgagcatctgcctgtacaccttcgtgagagacagcgtgggcgagcccctgtacatgctgttcagaggcatcaagcaccaggtggacaagggccccgtggacagcgtgaccggcaaggccaagtacaccctgaacgacaacagactgctgagagaggacgtggagtacagacccctgaccctgaacgccctgctggccgtgggccccggcgccggcgaggcccagggcgtgcccgtgaaggtgctggactgcgacaccatcagccaggccaaggagaagatgctggaccagctgtacaagggcgtgcccctgacccagagacccgaccccagaaccctggacgtggagtggagaagcggcgtggccggccacctgatcctgagcgacgaggacgtgaccagcgaggtgcagggcctgtggagaagactgaacaccctgcagcactacaaggtgcccgacggcgccaccgtggccctggtgccctgcctgaccaagcacgtgctgagagagaaccaggactacgtgcccggcgagagaacccccatgctggaggacgtggacgagggcggcatcagaccctggcacctggtgaagcccagcgacgagcccgagccccccagacccagaagaggcagcctgagaggcggcgagagagagagagccaaggccatccccgagatctacctgaccagactgctgagcatgaagggcaccctgcagaagttcgtggacgacctgttccaggtgatcctgagcaccagcagacccgtgcccctggccgtgaagtacttcttcgacctgctggacgagcaggcccagcagcacggcatcagcgaccaggacaccatccacatctggaagaccaacagcctgcccctgagattctggatcaacatcatcaagaacccccagttcgtgttcgacgtgcagaccagcgacaacatggacgccgtgctgctggtgatcgcccagaccttcatggacgcctgcaccctggccgaccacaagctgggcagagacagccccatcaacaagctgctgtacgccagagacatccccagatacaagagaatggtggagagatactacgccgacatcagacagaccgtgcccgccagcgaccaggagatgaacagcgtgctggccgagctgagctggaactacagcggcgacctgggcgccagagtggccctgcacgagctgtacaagtacatcaacaagtactacgaccagatcatcaccgccctggaggaggacggcaccgcccagaagatgcagctgggctacagactgcagcagatcgccgccgccgtggagaacaaggtgaccgacctgtag

SEQ ID NO: 47510 - DNA, 5859 bp, Artificial Sequence
  derived and/or modified sequence
atgcccgccctgggccccgccctgctgcaggccctgtgggccggctgggtgctgaccctgcagcccctgccccccaccgccttcacccccaacggcacctacctgcagcacctggccagagaccccaccagcggcaccctgtacctgggcgccaccaacttcctgttccagctgagccccggcctgcagctggaggccaccgtgagcaccggccccgtgctggacagcagagactgcctgccccccgtgatgcccgacgagtgcccccaggcccagcccaccaacaaccccaaccagctgctgctggtgagccccggcgccctggtggtgtgcggcagcgtgcaccagggcgtgtgcgagcagagaagactgggccagctggagcagctgctgctgagacccgagagacccggcgacacccagtacgtggccgccaacgaccccgccgtgagcaccgtgggcctggtggcccagggcctggccggcgagcccctgctgttcgtgggcagaggctacaccagcagaggcgtgggcggcggcatcccccccatcaccaccagagccctgtggccccccgacccccaggccgccttcagctacgaggagaccgccaagctggccgtgggcagactgagcgagtacagccaccacttcgtgagcgccttcgccagaggcgccagcgcctacttcctgttcctgagaagagacctgcaggcccagagcagagccttcagagcctacgtgagcagagtgtgcctgagagaccagcactactacagctacgtggagctgcccctggcctgcgagggcggcagatacggcctgatccaggccgccgccgtggccaccagcagagaggtggcccacggcgaggtgctgttcgccgccttcagcagcgccgccccccccaccgtgggcagaccccccagcgccgccgccggcgccagcggcgccagcgccctgtgcgccttccccctggacgaggtggacagactggccaacagaaccagagacgcctgctacaccagagagggcagagccgaggacggcaccgaggtggcctacatcgagtacgacgtgaacagcgactgcgcccagctgcccgtggacaccctggacgcctacccctgcggcagcgaccacacccccagccccatggccagcagagtgcccctggaggccacccccatcctggagtggcccggcatccagctgaccgccgtggccgtgaccatggaggacggccacaccatcgccttcctgggcgacagccagggccagctgcacagagtgtacctgggccccggcagcgacggccacccctacagcacccagagcatccagcagggcagcgccgtgagcagagacctgaccttcgacggcaccttcgagcacctgtacgtgatgacccagagcaccctgctgaaggtgcccgtggccagctgcgcccagcacctggactgcgccagctgcctggcccacagagacccctactgcggctggtgcgtgctgctgggcagatgcagcagaagaagcgagtgcagcagaggccagggccccgagcagtggctgtggagcttccagcccgagctgggctgcctgcaggtggccgccatgagccccgccaacatcagcagagaggagaccagagaggtgttcctgagcgtgcccgacctgccccccctgtggcccggcgagagctacagctgccacttcggcgagcaccagagccccgccctgctgaccggcagcggcgtgatgtgccccagccccgaccccagcgaggcccccgtgctgcccagaggcgccgactacgtgagcgtgagcgtggagctgagattcggcgccgtggtgatcgccaagaccagcctgagcttctacgactgcgtggccgtgaccgagctgagacccagcgcccagtgccaggcctgcgtgagcagcagatggggctgcaactggtgcgtgtggcagcacctgtgcacccacaaggccagctgcgacgccggccccatggtggccagccaccagagccccctggtgagccccgacccccccgccagaggcgacggcgacagcgccgagctggagggcccccccgcccccctgatcctgcccagcagcctggactaccagtacgacacccccggcctgtgggagctggaggaggccaccctgggcgccagcagctgcccctgcgtggagagcgtgcagggcagcaccctgatgcccgtgcacgtggagagagagatcagactgctgggcagaaacctgcacctgttccaggacggccccggcgacaacgagtgcgtgatggagctggagggcctggaggtggtggtggaggccagagtggagtgcgagcccccccccgacacccagtgccacgtgacctgccagcagcaccagctgagctacgaggccctgcagcccgagctgagagtgggcctgttcctgagaagagccggcagactgagagtggacagcgccgagggcctgcacgtggtgctgtacgactgcagcgtgggccacggcgactgcagcagatgccagaccgccatgccccagtacggctgcgtgtggtgcgagggcgagagacccagatgcgtgaccagagaggcctgcggcgaggccgaggccgtggccacccagtgccccgcccccctgatccacagcgtggagcccctgaccggccccgtggacggcggcaccagagtgaccatcagaggcagcaacctgggccagcacgtgcaggacgtgctgggcatggtgaccgtggccggcgtgccctgcgccgtggacgcccaggagtacgaggtgagcagcagcctggtgtgcatcaccggcgccagcggcgaggaggtggccggcgccaccgccgtggaggtgcccggcagaggcagaggcgtgagcgagcacgacttcgcctaccaggaccccaaggtgcacagcatcttccccgccagaggccccagagccggcggcaccagactgaccctgaacggcagcaagctgctgaccggcagactggaggacatcagagtggtggtgggcgaccagccctgccacctgctgcccgagcagcagagcgagcagctgagatgcgagaccagccccagacccacccccgccaccctgcccgtggccgtgtggttcggcgccaccgagagaagactgcagagaggccagttcaagtacaccctggaccccaacatcaccagcgccggccccaccaagagcttcctgagcggcggcagagagatctgcgtgagaggccagaacctggacgtggtgcagacccccagaatcagagtgaccgtggtgagcagaatgctgcagcccagccagggcctgggcagaagaagaagagtggtgcccgagaccgcctgcagcctgggccccagctgcagcagccagcagttcgaggagccctgccacgtgaacagcagccagctgatcacctgcagaacccccgccctgcccggcctgcccgaggacccctgggtgagagtggagttcatcctggacaacctggtgttcgacttcgccaccctgaaccccacccccttcagctacgaggccgaccccaccctgcagcccctgaaccccgaggaccccaccatgcccttcagacacaagcccggcagcgtgttcagcgtggagggcgagaacctggacctggccatgagcaaggaggaggtggtggccatgatcggcgacggcccctgcgtggtgaagaccctgaccagacaccacctgtactgcgagccccccgtggagcagcccctgcccagacaccacgccctgagagaggcccccgacagcctgcccgagttcaccgtgcagatgggcaacctgagattcagcctgggccacgtgcagtacgacggcgagagccccggcgccttccccgtggccgcccaggtgggcctgggcgtgggcaccagcctgctggccctgggcgtgatcatcatcgtgctgatgtacagaagaaagagcaagcaggccctgagagactacaagaaggtgcagatccagctggagaacctggagagcagcgtgagagacagatgcaagaaggagttcaccgacctgatgaccgagatgaccgacctgaccagcgacctgctgggcagcggcatccccttcctggactacaaggtgtacgccgagagaatcttcttccccggccacagagagagccccctgcacagagacctgggcgtgcccgagagcagaagacccaccgtggagcagggcctgggccagctgagcaacctgctgaacagcaagctgttcctgaccaagttcatccacaccctggagagccagagaaccttcagcgccagagacagagcctacgtggccagcctgctgaccgtggccctgcacggcaagctggagtacttcaccgacatcctgagaaccctgctgagcgacctggtggcccagtacgtggccaagaaccccaagctgatgctgagaagaaccgagaccgtggtggagaagctgctgaccaactggatgagcatctgcctgtacaccttcgtgagagacagcgtgggcgagcccctgtacatgctgttcagaggcatcaagcaccaggtggacaagggccccgtggacagcgtgaccggcaaggccaagtacaccctgaacgacaacagactgctgagagaggacgtggagtacagacccctgaccctgaacgccctgctggccgtgggccccggcgccggcgaggcccagggcgtgcccgtgaaggtgctggactgcgacaccatcagccaggccaaggagaagatgctggaccagctgtacaagggcgtgcccctgacccagagacccgaccccagaaccctggacgtggagtggagaagcggcgtggccggccacctgatcctgagcgacgaggacgtgaccagcgaggtgcagggcctgtggagaagactgaacaccctgcagcactacaaggtgcccgacggcgccaccgtggccctggtgccctgcctgaccaagcacgtgctgagagagaaccaggactacgtgcccggcgagagaacccccatgctggaggacgtggacgagggcggcatcagaccctggcacctggtgaagcccagcgacgagcccgagccccccagacccagaagaggcagcctgagaggcggcgagagagagagagccaaggccatccccgagatctacctgaccagactgctgagcatgaagggcaccctgcagaagttcgtggacgacctgttccaggtgatcctgagcaccagcagacccgtgcccctggccgtgaagtacttcttcgacctgctggacgagcaggcccagcagcacggcatcagcgaccaggacaccatccacatctggaagaccaacagcctgcccctgagattctggatcaacatcatcaagaacccccagttcgtgttcgacgtgcagaccagcgacaacatggacgccgtgctgctggtgatcgcccagaccttcatggacgcctgcaccctggccgaccacaagctgggcagagacagccccatcaacaagctgctgtacgccagagacatccccagatacaagagaatggtggagagatactacgccgacatcagacagaccgtgcccgccagcgaccaggagatgaacagcgtgctggccgagctgagctggaactacagcggcgacctgggcgccagagtggccctgcacgagctgtacaagtacatcaacaagtactacgaccagatcatcaccgccctggaggaggacggcaccgcccagaagatgcagctgggctacagactgcagcagatcgccgccgccgtggagaacaaggtgaccgacctgtag

SEQ ID NO: 47511 - DNA, 2241 bp, Artificial Sequence
  derived and/or modified sequence
atgcccttcagacacaagcccggcagcgtgttcagcgtggagggcgagaacctggacctggccatgagcaaggaggaggtggtggccatgatcggcgacggcccctgcgtggtgaagaccctgaccagacaccacctgtactgcgagccccccgtggagcagcccctgcccagacaccacgccctgagagaggcccccgacagcctgcccgagttcaccgtgcagatgggcaacctgagattcagcctgggccacgtgcagtacgacggcgagagccccggcgccttccccgtggccgcccaggtgggcctgggcgtgggcaccagcctgctggccctgggcgtgatcatcatcgtgctgatgtacagaagaaagagcaagcaggccctgagagactacaagaaggtgcagatccagctggagaacctggagagcagcgtgagagacagatgcaagaaggagttcaccgacctgatgaccgagatgaccgacctgaccagcgacctgctgggcagcggcatccccttcctggactacaaggtgtacgccgagagaatcttcttccccggccacagagagagccccctgcacagagacctgggcgtgcccgagagcagaagacccaccgtggagcagggcctgggccagctgagcaacctgctgaacagcaagctgttcctgaccaagttcatccacaccctggagagccagagaaccttcagcgccagagacagagcctacgtggccagcctgctgaccgtggccctgcacggcaagctggagtacttcaccgacatcctgagaaccctgctgagcgacctggtggcccagtacgtggccaagaaccccaagctgatgctgagaagaaccgagaccgtggtggagaagctgctgaccaactggatgagcatctgcctgtacaccttcgtgagagacagcgtgggcgagcccctgtacatgctgttcagaggcatcaagcaccaggtggacaagggccccgtggacagcgtgaccggcaaggccaagtacaccctgaacgacaacagactgctgagagaggacgtggagtacagacccctgaccctgaacgccctgctggccgtgggccccggcgccggcgaggcccagggcgtgcccgtgaaggtgctggactgcgacaccatcagccaggccaaggagaagatgctggaccagctgtacaagggcgtgcccctgacccagagacccgaccccagaaccctggacgtggagtggagaagcggcgtggccggccacctgatcctgagcgacgaggacgtgaccagcgaggtgcagggcctgtggagaagactgaacaccctgcagcactacaaggtgcccgacggcgccaccgtggccctggtgccctgcctgaccaagcacgtgctgagagagaaccaggactacgtgcccggcgagagaacccccatgctggaggacgtggacgagggcggcatcagaccctggcacctggtgaagcccagcgacgagcccgagccccccagacccagaagaggcagcctgagaggcggcgagagagagagagccaaggccatccccgagatctacctgaccagactgctgagcatgaagggcaccctgcagaagttcgtggacgacctgttccaggtgatcctgagcaccagcagacccgtgcccctggccgtgaagtacttcttcgacctgctggacgagcaggcccagcagcacggcatcagcgaccaggacaccatccacatctggaagaccaacagcctgcccctgagattctggatcaacatcatcaagaacccccagttcgtgttcgacgtgcagaccagcgacaacatggacgccgtgctgctggtgatcgcccagaccttcatggacgcctgcaccctggccgaccacaagctgggcagagacagccccatcaacaagctgctgtacgccagagacatccccagatacaagagaatggtggagagatactacgccgacatcagacagaccgtgcccgccagcgaccaggagatgaacagcgtgctggccgagctgagctggaactacagcggcgacctgggcgccagagtggccctgcacgagctgtacaagtacatcaacaagtactacgaccagatcatcaccgccctggaggaggacggcaccgcccagaagatgcagctgggctacagactgcagcagatcgccgccgccgtggagaacaaggtgaccgacctgtag

SEQ ID NO: 47512 - DNA, 6408 bp, Artificial Sequence
  derived and/or modified sequence
atgcctgctctgggacctgctctcctccaggcattgtgggccggctgggtcttgacgctccagccccttccaccaaccgccttcactccaaatggaacctacctgcaacatttggctcgcgaccctactagtgggacattgtatctcggagccacaaattttctgtttcagctaagccccggcttacaactggaagcaaccgtgtcaacagggcccgtattggatagccgtgactgtctgcctcccgtcatgccagacgagtgtcctcaggctcaacctaccaacaatccaaaccagctcttactcgtctctcccggagctttggtggtttgtggaagcgtgcatcaaggggtgtgcgaacagagaagactgggccagctggagcaactcctgctgcgaccggagcggcctggcgatacccagtatgtggccgctaatgatcccgctgtcagcactgtgggattggttgcccaaggattggccggcgaaccactgcttttcgtcggccgagggtacaccagtagaggggtgggagggggcatccccccaattacgactagggcactgtggccccctgacccacaggctgcatttagctacgaggaaacggccaagctggcagtcggacgactgtcagagtatagccaccatttcgtcagcgcattcgctcggggcgcctccgcctatttcttgttcttgagacgggacttgcaggcccaatcccgggctttccgagcttatgtgtccagggtttgccttagagaccaacactactattcctacgtggaactgccccttgcctgcgagggcggcaggtacggcctgattcaggcagctgctgtagccacttcccgcgaggtggcgcatggagaggtgctctttgccgctttttcgtccgccgccccccccaccgtgggtcgcccaccaagcgccgcagctggggcctctggggccagcgcgttatgcgctttcccactggatgaggtcgataggcttgcaaataggactagagacgcatgttatacccgagaagggcgtgctgaagatggtactgaagttgcttacatcgaatatgatgtaaatagcgattgtgcccagttgcccgtggataccctggatgcttacccatgcggctcagaccatacaccctcacctatggcctcccgagttccgctagaagccacacccattctcgaatggccgggtattcagctgactgctgtcgccgtaactatggaagacggacacacgatagccttcttaggcgactcacaggggcagttgcatcgggtttacctcggaccaggtagcgacggccacccctactccacccagagtattcagcaagggagtgccgtgtctcgggacctcacttttgatggcaccttcgagcacctgtacgtcatgactcaatccaccctgctgaaggtgcccgtagcctcttgtgcccagcacttggattgtgcctcctgtttggcccatagggatccttattgtggctggtgtgtcttgctcggtaggtgctcgagacgatccgaatgctcacgaggacaaggaccagagcagtggttatggagttttcaacctgagctgggatgcctgcaggttgctgcaatgagcccagccaacatcagccgcgaggagacaagagaagtgtttctcagcgtgcccgatcttccccctctgtggccaggcgaaagctatagttgtcactttggcgaacatcagagcccggcattactgaccgggtccggggtgatgtgccccagtccagatccatccgaagcccccgtcctcccaaggggcgctgactacgtttctgtatccgtagaactccggtttggcgctgtggtgattgcgaagacgagtctttcattctatgattgcgtcgctgtgactgagcttcgccctagtgcacagtgtcaggcctgtgtgagtagcaggtggggatgtaactggtgtgtctggcagcacttgtgcacccacaaagcaagctgcgatgcagggcccatggttgctagccaccagtctcccttggtgtcacccgatccccctgctcggggcggaccctcccctagcccacccacagcccctaaggcactggccacacccgctcccgataccctccctgttgagccaggagcgccttccactgccaccgcttccgatatctcaccaggcgccagcccctctctcttgtcgccatggggcccctgggcggggagtggcagtatatccagcccaggatccacaggctcacccctgcatgaggaaccgagcccgcctagtcctcagaatggccctggcaccgctgttcccgctccaaccgactttcgcccgtctgctacccccgaggacctccttgcttctccattgtctccttctgaggtcgccgctgtgccacccgcggaccccggcccggaggctctgcatcctactgtgcccttagatctgccaccagccacagttccagcaacgactttccctggggcaatgggctcagtgaagccagcacttgactggctgacccgcgaggggggggaattgcctgaggcggatgagtggaccggcggggacgcccccgccttttccaccagtacactgctatctggcgatggtgacagcgcagaactcgaaggcccccccgcccctctgatcctgccctctagccttgactaccagtatgatacgccaggcctgtgggaattagaggaagctactctaggcgcttcctcctgcccttgcgttgagtcagtgcaggggagcactcttatgccagtgcacgttgagcgggaaattcgattgctcggccggaacctgcacctgttccaggacggtcctggtgataatgagtgcgtaatggaactcgagggcctggaagtcgtcgtagaggctcgagtggagtgtgaacccccacccgacacccagtgccacgtaacatgtcagcaacaccaattgagctacgaggcactgcagccagaactaagggtcgggctctttttgcgtcgcgctgggcgattgagggtggattccgcagagggtctgcacgtggttttatatgattgctctgtgggacatggagattgtagcaggtgccagacagctatgcctcaatacggatgcgtgtggtgcgagggcgaaaggccccgttgtgtcactcgagaagcgtgtggagaagccgaagctgtagccactcagtgtcccgccccactgatccactccgtagagccattaaccggccccgtggacgggggaactcgcgttacaatacgaggcagcaacctgggacagcatgtgcaggacgtcttaggcatggttacggtcgccggcgtgccctgtgccgtcgacgctcaggagtacgaggtgtcatcttctctcgtttgtattacaggcgctagtggcgaggaagtggccggtgccacagccgtggaggtgcccggcagaggcagaggtgtgtccgaacatgacttcgcctaccaggaccctaaggtgcatagcatttttccggctcgagggccaagagccggaggtacacgactgacactgaatgggagtaagttgcttacaggacgtctcgaagatatccgcgtggtcgtgggggatcaaccttgccatcttctccctgaacagcagtccgaacagctgagatgcgagacgtcccctcgtccaaccccagccacactgccagtcgccgtgtggttcggcgcgactgagaggagactgcagcgaggccagttcaagtatacactcgatccgaacattaccagtgcgggacctaccaaatcatttctcagtggcgggcgtgaaatttgtgttcgcggacagaacctcgacgtggtccagacgccacgaattcgagttaccgtggtgtcacggatgttgcaaccctcacaaggcctcggccggcgtcgtagggttgtacctgaaacagcgtgctccctaggacccagctgctctagtcagcaattcgaagaaccctgtcacgtgaattcaagccagctgattacgtgccgcacccccgccttgccgggcctgccagaggatccttgggtgcgggtagaattcatcctcgataaccttgtattcgatttcgccactctgaatcccacccccttctcatatgaggctgatccgacactccaaccactgaatccggaggaccctacgatgcctttccgccacaagcccggctcggtgttctctgtcgaaggagagaacctcgacttagccatgtccaaggaagaggttgtggctatgattggtgatgggccctgtgtcgtgaaaacgctcacacgccatcatctatattgcgaaccccccgtcgagcaaccattacctagacatcatgccctgagggaggctccagattcccttcccgaattcaccgttcagatgggaaatttacggttcagcctgggacacgttcaatatgatggggagagccctggagctttcccagtggccgcccaggttgggctcggggtaggcactagcctcctggcactcggtgtgatcattatcgtgctcatgtaccgcaggaagtctaagcaggctctgcgcgactataagaaagtgcagattcagctcgagaacctcgaaagctctgttagggatcgctgtaaaaaagaatttactgatttaatgaccgagatgaccgatctgacgtccgatcttctcggtagcggcattccgttcctagattataaagtgtatgcagagaggatcttctttcccgggcaccgtgagagcccattacatcgggatttgggggtacctgagagtagacggcccactgtcgaacaaggactgggacagttaagcaacttattgaattctaagctcttcctgactaagtttatacacactctggagtcccagagaacatttagcgcaagagacagggcctatgtggcttccctactgacggtcgctttacatggaaagctggaatattttaccgacattctgcgaacgttactgtccgatttagtggctcagtatgtggccaagaaccccaaattgatgctccgacgcaccgagactgtggtcgagaaactgctgacgaattggatgagtatttgcctgtacaccttcgtgcgcgacagtgtcggagagcccctgtatatgctattcagaggaatcaaacaccaagtggataagggcccagttgactctgtgaccggtaaagccaaatacactctgaatgataaccgtctgctcagagaagacgtagaataccgaccactgaccctcaatgccttgttagctgtggggccaggggccggtgaggcccagggagtgcctgtgaaggtccttgactgtgacaccatttctcaggctaaggagaaaatgctagaccagctgtataagggcgtgcccctgactcagcgaccagacccccggacattggacgtggagtggagatcaggagttgcagggcatctcattctgtccgacgaggacgtgacgtccgaagtccagggtctctggcggaggctaaacacactccagcactataaagtccccgacggagcgacagtggcgctggtcccgtgtctgaccaagcacgtgttgcgcgagaaccaagattacgttccaggtgagagaaccccaatgctggaggatgtagatgaggggggaatcaggccatggcacttggtgaagccttccgacgaacctgaaccccctaggcctagaagaggctcgctgcggggaggagagagagaacgagctaaagccattccagagatctatctcacgagactgttgtctatgaagggtaccctgcaaaagttcgtcgacgacctctttcaggtaattctgtccacctccagacctgttccccttgctgtgaagtattttttcgatctgcttgatgagcaggcacaacagcacggcatatctgaccaggacacgattcatatttggaaaactaatagcctgcctctgaggttttggatcaacatcatcaaaaatccccagtttgtattcgacgtacagacatctgataacatggacgccgtcctgctcgtgatcgcacagaccttcatggatgcatgtactctggccgaccacaaactcggccgagattccccaataaacaaacttctgtacgctagagatattccacgatacaaacgcatggtcgaacggtattacgccgacattcggcaaactgtgcccgcttccgaccaggagatgaattctgtccttgccgagctcagctggaattatagcggcgacctgggcgcccgggtagctctgcatgaactttacaaatatataaataaatattacgaccagattattacagccctagaggaagatgggaccgcccaaaaaatgcagctgggctaccgcttacagcagattgccgccgctgtggaaaacaaagtaactgacctctag

SEQ ID NO: 47513 - DNA, 5859 bp, Artificial Sequence
  derived and/or modified sequence
atgccggctctgggacccgctctgctgcaggctctgtgggccggctgggttctcactctacagcctctgccacctactgcattcactcccaacggaacttacctacaacatctggcacgcgaccctacttcagggaccctgtaccttggagcaactaatttcctctttcaactgagtcccggtctgcagctagaggctactgtgtcaacagggcctgttcttgacagcagggactgcttaccgccagttatgccagacgagtgtccccaggcacaaccgacaaataaccccaatcagctgcttttggtatcccctggggcgttggtcgtgtgcggatccgtgcatcaaggcgtatgcgagcagcgaaggttgggtcagctagagcagctgctgctaaggccagagaggccaggagacacccagtacgtggccgcaaatgatcccgccgtatcgaccgtggggcttgtggctcagggattagcgggagaacccctactttttgtgggtaggggatatacgtcccgaggagtaggcggcgggatcccccccatcaccactcgagcactttggcctcccgaccctcaagcggcattttcttacgaggagaccgctaagttggccgtcgggcgcttgtctgagtattctcaccatttcgtgtcagccttcgcccgtggcgcatccgcctacttcctctttctgaggcgggacctccaggcacagagccgggcctttcgggcctatgtaagtcgtgtctgtctgagagatcagcattattacagctatgtagaacttcctctagcatgcgagggtggccgatatgggttaatccaagctgccgctgtggccacgtcccgcgaagtggcgcatggtgaagtcctgttcgccgccttctcatcagcagcgcccccaaccgtagggaggccaccctcagccgcagcgggcgcctccggcgcatcggcgctatgtgcctttcctctggatgaggtcgatcgcctagccaacagaacccgtgacgcatgctacacacgggaggggagggcagaagacggcacagaagtggcatacatagaatacgacgttaatagcgactgtgcacagctacctgtagacacactggatgcctatccgtgtggaagcgaccacacccctagtccgatggcatcaagagtcccgctcgaagctactccgatcttagagtggcccggcattcagttgaccgctgtggcagttactatggaagatgggcacaccatcgccttccttggcgacagtcaggggcagctccacagggtgtacttgggtccaggctctgacgggcatccttattccacgcagagcattcaacagggaagcgcagtgtccagagacctgacatttgacggcacctttgaacacctgtatgtgatgactcagtccacattattaaaggtgcctgtggctagctgtgcacagcacctggactgtgcatcctgtcttgcccatagggatccctactgcggttggtgtgtgctgctaggacggtgttcccgcagatcggaatgtagcagaggacaggggcctgagcaatggctgtggagttttcagcctgagcttggctgtctgcaggttgccgcaatgtccccagccaacatctctcgagaggagacaagggaagtatttttgtctgtgcctgatctgccacctttgtggcccggtgaatcttattcatgccactttggtgagcaccaatccccggctctgctgaccggctccggagtaatgtgtccttcccccgatccatctgaagcccccgtgctccccaggggagcggactacgtgagtgtgagcgtcgagctgcgctttggggcggtagtaattgccaaaacgtccttgagtttctacgattgcgtagctgttacagaattacgcccctctgctcagtgtcaggcctgtgtgtcttcgcgctggggatgcaattggtgtgtttggcagcacctgtgcacgcataaggcaagttgtgacgcagggcccatggtggcaagtcatcaatcccctctggtctctcctgatccgcctgctcgcggtgacggcgatagcgccgagctggaaggaccacctgcccctctgattctgcccagctccctggattaccaatacgacaccccgggcctatgggagctggaggaggcgactttgggggcctcatcttgcccatgcgtggagtcagttcaaggcagcacattaatgcccgtgcatgtcgagcgcgagattcggcttctcggacggaacttgcacctgttccaggacggccctggcgataacgagtgtgtgatggagctggaggggttggaggtggttgtggaagcgagagtggagtgtgaacctcccccggacacccagtgccacgtgacctgccagcagcatcagcttagttatgaggcactccagccagaactgcgggttgggctgtttctacgccgggcaggaagacttcgggtagactctgccgaaggattacacgttgtgctctatgactgctcggtcggccatggagactgctctcggtgtcagactgcaatgccacaatatggctgtgtgtggtgcgaaggagagagaccaagatgtgtcacaagagaagcttgcggggaggccgaagctgtggccacacaatgccccgccccattaatccacagcgtcgaacccctcacaggacctgtggacggaggcacccgtgtgaccatccggggtagcaatctaggtcagcacgtgcaggacgtcctgggcatggtgactgtggctggcgtaccctgtgcagtggacgctcaggaatacgaggtgtcatcctccctggtatgtattaccggggcctcaggggaggaggttgccggagccaccgccgtggaagtgcccggaaggggccggggcgtatcagaacatgattttgcttatcaggaccctaaagtgcactctatttttccagccagaggtccaagagcggggggcactagactaaccttgaatggaagtaaactgctcacgggaagactggaggacatcagagtggtggtgggcgaccagccttgccacctgctgccggagcagcagagtgagcagctccgctgcgaaacatcccctagaccaactccagctaccctgcccgtggcggtgtggttcggagcgaccgaaagaagactccaaagaggacagtttaagtatactttagaccctaacataacgagtgccggcccaactaaatccttcctatcgggagggcgcgagatatgtgtgagggggcaaaatctcgacgtagtacaaaccccaaggataagggtgaccgtggtttctcggatgttgcagccgtcccagggactgggaagacgacggagggtggtgcccgagacggcctgttcacttgggccgagttgtagctcccaacagtttgaagagccctgccacgtcaatagttctcaacttatcacctgtcgcacaccagcattgcctggactgccagaagatccctgggtgcgcgtagagttcatattagacaatctagtatttgattttgcaacactcaaccccacacctttcagctatgaagccgacccaactctgcagcccctaaacccagaggacccgaccatgccctttagacacaagcccggcagcgtgttctccgtggaaggggagaatctggacctagccatgtccaaggaggaagtagtggcgatgattggagacggcccgtgcgtggtgaaaaccctgactcggcaccacctgtattgcgaacctcccgtggagcagcctctgccaaggcaccatgcgttacgagaagctccagacagcttgccagaatttaccgtgcagatggggaatcttcgctttagcctcggacatgtccaatacgatggagagtcaccaggtgcctttcctgttgctgcccaggtcggactaggggtagggacgtctctgcttgccctgggcgtgatcattatcgttctgatgtaccggcgaaagagcaagcaggcactgcgcgattacaagaaggtgcagatccaactcgaaaacctggagtcttccgtgcgggacaggtgtaagaaagagtttacggatttaatgaccgaaatgaccgatttgacaagcgaccttcttggctctgggatcccattcctggactacaaagtgtatgctgagagaatcttttttccagggcaccgtgagtcacctttgcatagagatcttggcgtccccgaatctagaagaccgacagtggaacagggactcggacagttgtcaaacctgctgaattccaaactcttcctcaccaaattcatacatactctggagtcacagcgaacctttagtgcaagggatcgcgcctacgtggcgagtctgctcaccgtggcactgcatggcaaattagagtattttacggacattctcaggaccctgctttctgacctagtggcccagtacgtggccaagaatcccaaattgatgctgcgacggacagagaccgttgtggaaaagctgctcacgaattggatgtcgatatgcctgtacaccttcgttcgagactctgtgggtgaacccctgtacatgcttttcagaggtataaagcaccaggtggacaagggaccagtggacagcgtaactggcaaggcaaaatacactttaaatgataataggctgctccgagaagacgttgagtacaggcccctcacactcaatgcccttcttgccgtcggcccaggggcaggagaggcacaaggcgtaccggttaaagtactggattgtgacaccatcagccaagcaaaagagaagatgctcgaccagctgtataaaggagtgcccctgacgcagcggcccgatccccgaaccctcgacgtcgaatggcgttcaggagttgccggccacctcatcctgagcgatgaggacgtaacatccgaggtgcagggactgtggcgtaggctgaatacactccagcactataaagtccctgacggagcaacagtcgctctggtgccgtgtctcacaaaacacgttctcagggagaatcaagactatgtgcctggcgaaagaacacctatgctggaagatgtggacgagggaggcatccgaccatggcatctcgtcaaaccttcagacgagccagagccccccaggcccagaagggggtcactccgaggaggggagagggaaagggctaaagcaatacccgagatttatcttacccgactgctgagcatgaaggggactctgcagaagtttgtagatgatctcttccaagtgatcctgtcgacgtctcgccccgtgcctttggccgttaagtacttctttgacctcctcgacgagcaagctcagcaacacgggatttcagaccaagatactatacacatttggaagactaatagccttcctctccggttctggattaatattatcaaaaacccccagtttgtatttgatgtgcagacaagcgataacatggatgctgtgctattggttattgctcagacgttcatggatgcctgtacgctggctgaccacaagttgggtagggattccccaatcaataagctgctgtacgctagagacatccctcgctataagagaatggtggagaggtactacgctgacatcaggcaaacggtgccagcatcggatcaagaaatgaatagtgtcctggccgaattgtcctggaattatagcggggacctcggcgccagagttgccctgcacgagctgtacaagtacattaacaagtactacgaccagatcattacagctctggaggaagatggtaccgcccagaagatgcaactcggttatcgtctgcaacagatcgctgcagccgttgaaaacaaggtgacagacctctag

SEQ ID NO: 47514 - DNA, 6408 bp, Artificial Sequence
  derived and/or modified sequence
atgcccgcgcttggtcctgcccttctgcaggctctctgggctgggtgggtgttaaccttgcagcccctgccacctacagcctttacacctaatggcacatatctgcagcatcttgctagggatcctacgtcaggcacattatatctgggtgctacaaatttcttgttccagctcagtccaggcctgcagcttgaggccaccgtgtctactgggcccgtcctcgatagtcgagactgcctgccaccggtcatgcccgacgagtgcccccaggcgcagccgacgaacaaccccaaccagttacttcttgtatctccaggggctcttgtggtctgtggcagcgtccaccagggggtgtgcgaacagcgcagacttgggcaacttgagcagctgctgctgaggccagaacgtcccggagatacccaatacgtcgccgccaacgatcccgcggtgtccaccgtcggcctcgttgctcagggcttagccggagagccgttgctgttcgtggggcgcggatacacgtcacgcggcgtcggcggcggcattcctccaatcacaaccagagctttgtggccaccagatccacaggccgctttttcttatgaagagaccgccaaattggcagtaggtaggctgagtgaatatagtcatcatttcgtaagcgcctttgcccgcggcgcgagtgcatattttctttttctgcgtcgagacctgcaggcccagtcgagagcgtttagggcctacgtgagtagggtatgcctgagggaccagcactactactcctatgtcgaactgccacttgcctgtgagggcggcaggtatgggttgatccaggcagcggccgtggcaacaagcagggaagtcgcacatggcgaggttctgttcgcggcgttttctagtgctgcccctccaactgtggggaggccccctagcgccgcggctggtgccagcggcgcatccgccctctgtgccttcccactcgatgaggtagatcgcttggccaatagaacccgagacgcatgttacacaagggagggtagagcagaggacgggacagaagtcgcctacattgagtatgacgtgaattccgactgcgctcagcttccagtagacacgctggacgcttacccttgtggctctgatcatacaccctctccaatggccagccgggttcccctggaagccactccaatcttagagtggcccggcatacaactgacagctgtcgcagttacgatggaggacggccacactatagcctttctaggtgactcccagggccaattgcatagagtgtatcttggacccggcagcgacggccatccctactccacacagagcatccagcaaggaagcgccgtgtcccgggacctgacatttgacgggactttcgaacacctgtacgtcatgacccagtctacgctgcttaaggtcccagtggcttcctgcgcccagcatctcgattgtgcatcttgtctagctcaccgggatccatattgtggttggtgtgtgttactgggtagatgttcccggagatctgagtgttctcgcggacagggacctgagcaatggctgtggagtttccagccagagctcggatgtctgcaagtggccgctatgtcgcctgctaacatttcccgcgaggagacaagagaggtattcctcagcgtgccggatctgccgccattatggccgggtgagagctactcttgtcattttggcgaacaccaatcccccgcactcctgacaggtagcggcgtgatgtgtccgtcaccagaccccagcgaagcaccggtgctgccacgcggagccgactatgtgtcagtgagtgtggagctgcgctttggtgccgttgtgattgccaagacaagtctctctttctatgactgtgtagcagtcaccgagctgcgtccaagcgctcagtgccaagcctgcgtctcaagtagatggggatgcaattggtgtgtgtggcagcacttgtgcacgcataaggcaagctgcgacgcgggacctatggtcgcctctcaccagagccctcttgtgagccccgatccccctgctcgtggtggaccttctcccagtcccccgacagcgccaaaggccctggccacccctgcaccagataccctacctgtggaaccaggcgctcctagcaccgcaacggctagtgatatcagtcctggcgcaagtccaagtttactctcaccctgggggccatgggccggcagcggctctatcagcagccctgggtctaccgggtcacccctccatgaagagccaagtccgccgagcccccagaatggaccaggcaccgcagtgcctgcccctactgactttcggccctccgccacacctgaggatctgctagccagccccctgtctccatccgaagtggctgcggtccccccagccgatccaggccctgaagccttgcacccaactgtgccactagatcttccccctgcgaccgtccccgcgaccaccttcccaggcgcgatgggaagcgtgaagcctgccctagactggctgactagggagggcggtgaactgcccgaggccgacgagtggaccgggggcgacgcaccggcttttagcaccagcactctgttgtctggggacggggatagtgctgaactggaggggccacctgcaccattgatccttcctagttctctggactaccagtatgataccccagggttgtgggagcttgaggaagctactttgggcgcatccagttgcccctgcgtggagagtgtgcagggcagcacgctcatgccagtccacgtggaacgcgaaattagactgcttggacgcaatcttcacctctttcaggacggaccaggagataacgagtgtgtcatggagcttgaggggctcgaagtcgtagttgaagccagggtggaatgtgagccaccccctgatacccagtgtcacgtgacgtgtcagcaacaccagctgagctatgaggcacttcagcccgagcttagagtgggtcttttcttaagaagggcaggacgactgagggtcgacagcgccgagggactacacgtcgtgctttacgactgtagcgtgggccacggcgattgctcaaggtgccagaccgccatgccccagtacgggtgcgtgtggtgtgaaggggagaggccacgatgtgtgactcgggaggcttgtggagaagctgaggcagtcgctacccagtgccccgcacccctgattcattcggtcgagcccctgaccggtccagtggatggcggtaccagggtaactattaggggatcaaaccttggacaacacgtccaggacgtgctggggatggtgacagtggccggggtgccgtgcgctgtggacgctcaggagtatgaggtgtcctcttctcttgtgtgtattaccggtgcttctggcgaggaggtcgctggcgctacagcggtggaggtgcccggacggggaaggggcgtctcagaacatgactttgcttaccaggatcctaaagtccactctatctttcccgcccgaggcccccgtgccggagggacacgccttaccctgaatggtagcaagctactgacaggccgactcgaggatatccgtgtcgtagtaggcgaccaaccttgccacctgttgccggaacaacaatccgaacagctccgttgcgaaacttctccccgccctacccccgctactttgccagtggctgtttggtttggtgctaccgagagacggcttcagcgtggacagttcaaatatactttggaccccaacataacaagcgccggccccactaaaagctttctgtccggaggccgcgaaatctgcgtgagaggacagaatttggatgttgtacaaactcctcgcatcagggtgactgtggtcagtagaatgctgcaaccctcgcagggtcttgggcgacggcgccgagtcgtgccagaaacggcatgtagccttggtccctcttgctcttcacagcaatttgaggagccatgccacgtgaacagttcacagctgatcacctgtcggaccccagcactgccaggactgcccgaagacccttgggtgagagtggagtttatcttagataacctcgtcttcgatttcgccacactgaatcctactccgttttcatatgaagctgaccccacactgcagcctttaaatccagaggatccaaccatgccctttagacacaaacctggcagtgtgttcagtgttgaaggggagaacttggacttggctatgagtaaggaagaagtcgttgcaatgatcggggacggcccatgcgtcgtcaaaaccctgacccgccaccacctatactgcgaacctcccgtcgagcagcctctcccccgacaccatgctctcagagaggctcccgactctctcccagaattcacggtccagatgggtaatttgagatttagtctcgggcacgtgcagtatgatggggagtctcccggtgcatttcctgttgccgcacaggtgggactgggtgtcggtacttccctgctggctctgggggttatcattattgtccttatgtataggcgcaaaagcaagcaggccctgcgcgactataagaaagtccagatccagctggaaaatctcgagtccagcgttcgcgataggtgtaagaaggagtttactgacctcatgactgaaatgacagacttgactagcgatctgctcggatccgggatcccatttctcgactataaggtctacgccgagagaatcttctttcctggccaccgagaatcacctctgcaccgggacttgggggtaccagagtccagaagaccaaccgtcgagcaaggtctcggacagttgtccaacctgctcaattctaagctgttcctcaccaagttcatccatacgctcgaaagccagaggacatttagcgcccgggaccgggcctacgtcgcgtccttgttgacagttgcactacatggtaagttagagtattttacagacatcctccgaactttgctcagtgacctcgttgctcagtacgtcgccaagaatccaaaacttatgcttcgacgcaccgaaaccgtcgtggaaaagctgttaaccaattggatgtcaatttgtttatacacctttgtaagagacagtgtgggcgagcctctgtacatgctgttcagaggaatcaagcaccaggtcgataaaggcccagtggacagcgtcacagggaaggcaaaatataccttaaacgacaacaggctgctgagggaggacgttgaataccgtcccctgaccctgaatgccttactggcggtgggccctggagctggggaggcacaaggtgtaccggtgaaggtcttagattgtgacacgatctctcaagcgaaggagaaaatgttagaccagctttataaaggtgtcccactgactcagagaccagatccacgcactctggatgtggaatggcggtcaggggttgctggacatctgatcttgagcgacgaagatgtcacctccgaagtgcaaggtctgtggaggagactgaatacactccagcattacaaagtgcccgacggtgccactgtggctctagtgccttgcctgacgaagcatgtgcttagagagaatcaggattacgtgccaggagaacgcacccccatgttagaggatgtggatgagggtggaattcgtccttggcatctcgtgaaaccaagtgacgaacccgagccacctagacctcgacgcggtagcctgagagggggtgaaagagagcgcgccaaggctatacctgagatttatttaactcggctgttgagcatgaagggcacgctgcaaaaatttgtcgacgatttgttccaggtaatcttgagtaccagccgccccgttccgctcgccgtgaagtactttttcgacctcctggacgagcaggctcagcaacatggaatctccgatcaggatactatccacatctggaaaaccaacagtctgccactgcggttctggattaacattattaaaaatcctcagttcgtgtttgatgtacagacgagtgacaatatggacgccgtccttctggtgatcgcccagacttttatggacgcctgcacactagccgatcacaagctgggacgcgactccccaattaataaactgctgtacgctagggatatcccaagatataaacggatggtagagcgttactacgccgacatcagacagactgtcccagctagcgaccaagaaatgaattcagtcttagcagaactgagctggaattactccggcgatctgggcgctcgtgtagcccttcatgagctgtacaaatacattaacaagtactacgaccagattatcacagctctggaagaagacggcactgcacagaaaatgcagcttggatataggttgcagcagatcgccgctgccgtggagaataaggttaccgatctgtag

SEQ ID NO: 47515 - DNA, 2241 bp, Artificial Sequence
  derived and/or modified sequence
atgccctttaggcataagcctggcagcgttttctctgtcgagggtgaaaacctcgatctggccatgtctaaggaagaagtagttgcaatgataggcgatggcccctgcgtggtcaaaacattaactcgtcatcatctgtattgtgagccgcccgtggagcagcccctgccccgacaccacgctctgagagaggcccccgacagcttaccggaattcaccgtgcagatgggtaacctcaggttttccctggggcatgtgcagtacgacggtgagtctccgggagcttttcctgttgccgcacaagtcggacttggcgtcggcacgagtctgctggctttgggcgtgataataattgtcctcatgtacagaaggaagtcgaagcaggctctgagggattataagaaggtacagatccaattggagaacttagagagttctgtgcgcgaccggtgcaagaaagagttcaccgatcttatgacagagatgactgatctcacctcagacctattaggctcaggaatcccgtttctcgattacaaagtatacgcggaaaggatcttcttccctggccaccgggagtctccattgcaccgcgatctaggcgtgccagaatctcgcagacctaccgtggaacagggactgggccagctgagcaaccttctcaactccaaacttttcttaacgaaattcatacatactctggagtcccaacgaacattctcagccagagatcgagcgtatgtggcaagcctgttgaccgtggcgctacatggaaaactggagtatttcacggatattctcagaaccctgctgtctgacctggtggcacagtacgttgcgaaaaaccccaaactaatgctccgcagaacagagaccgtggtggagaagttactgaccaactggatgagtatctgtctttatactttcgtaagagacagtgtgggggaacctttgtatatgctgtttcggggcatcaagcatcaagtggataaaggacctgtggacagcgttacggggaaagctaaatacaccctgaatgataatagacttctgcgtgaagacgtcgagtataggcctctgactttgaatgcgctgctggcagtgggaccgggcgcaggagaggcacagggcgtccccgtaaaggtcctggactgtgataccatctcccaggccaaagaaaaaatgctcgaccagctgtataagggcgtgcccttaacccagcgccctgaccctagaacactagacgtagagtggaggtctggagtggctggccatcttattctatccgatgaagatgtcacaagcgaggtccaagggctgtggcgccgcctgaatactctccagcattacaaggtccccgacggcgcaacagtagccttggttccttgcctcacaaagcatgtgctgagagagaatcaagactatgtgcctggagaacgtactccaatgctcgaggatgtcgacgaaggtggcattcggccctggcaccttgtcaagcccagcgacgaaccggagcctcctcggccccgaagaggcagcctccgtggtggcgagcgggagcgcgccaaggcaattcctgagatctacttaacccggctcctatccatgaaaggcacactgcagaagttcgtggacgacctttttcaagttatcctgtctacctcccgccccgtccctttagctgtaaagtatttcttcgatctcctcgacgaacaggcacagcagcacggcatctctgatcaggataccatacatatttggaagacaaactccttgccgctccgcttttggataaatattattaagaatccacagttcgtgtttgatgtccagacaagcgataatatggacgctgtgctgctcgttattgctcagacattcatggatgcatgcacactcgctgatcataaattggggcgggacagtcccatcaacaaactcctgtatgccagagatatcccccgctataaacgcatggtcgagagatactacgccgatattagacaaacagtaccagcctccgaccaggagatgaatagtgtgctagcggaactgtcatggaactactctggcgacctgggggcccgagtcgccctgcacgaactttacaagtatataaacaaatattacgatcagatcattactgcactggaggaggacggaaccgcccagaagatgcagcttgggtatagacttcagcagatcgctgccgcagttgagaataaggtcaccgacctctag

SEQ ID NO: 47516 - DNA, 6760 bp, Artificial Sequence
  derived and/or modified sequence
gcccggccgacgcggctttgtctcctttgttcccggcggtggcagcgccgcgcgggaggggcgggcagcgggcgcagttttccgcccctcggtctccgggtaacagctgcggctccaccagacccggggagaggccgctgcgcgcggagcccgagcccggagcggccgacgcccgcctcggcgcgcacatcccgcggggcccggccgggtggtgactcccacacgggtcatgctgttgtctcctgatccagccggccctgccaggtgaccatgcctgctctgggcccagctcttctccaggctctctgggccgggtgggtcctcaccctccagccccttccaccaactgcattcactcccaatggcacgtatctgcagcacctggcaagggaccccacctcaggcaccctctacctgggggctaccaacttcctgttccagctgagccctgggctgcagctggaggccacagtgtccaccggccctgtgctagacagcagggactgcctgccacctgtgatgcctgatgagtgcccccaggcccagcctaccaacaacccgaatcagctgctcctggtgagcccaggggccctggtggtatgcgggagcgtgcaccagggggtctgtgaacagcggcgcctggggcagctcgagcagctgctgctgcggccagagcggcctggggacacacaatatgtggctgccaatgatcctgcggtcagcacggtggggctggtagcccagggcttggcaggggagcccctcctgtttgtggggcgaggatacaccagcaggggtgtggggggtggcattccacccatcacaacccgggccctgtggccgcccgacccccaagctgccttctcctatgaggagacagccaagctggcagtgggccgcctctccgagtacagccaccacttcgtgagtgcctttgcacgtggggccagcgcctacttcctgttcctgcggcgggacctgcaggctcagtctagagcttttcgtgcctatgtatctcgagtgtgtctccgggaccagcactactactcctatgtggagttgcctctggcctgcgaaggtggccgctacgggctgatccaggctgcagctgtggccacgtccagggaggtggcgcatggggaggtgctctttgcagctttctcctcggctgcaccccccactgtgggccggcccccatcggcggctgctggggcatctggagcctctgccctctgtgccttccccctggatgaggtggaccggcttgctaatcgcacgcgagatgcctgctacacccgggagggtcgtgctgaggatgggaccgaggtggcctacatcgagtatgatgtcaattctgactgtgcacagctgccagtggacaccctggatgcttatccctgtggctcagaccacacgcccagccccatggccagccgggtcccgctggaagccacaccaattctggagtggccagggattcagctaacagctgtggcagtcaccatggaagatggacacaccatcgctttcctgggtgatagtcaagggcagctgcacagggtctacttgggcccagggagcgatggccacccatactccacacagagcatccagcaggggtctgcagtgagcagagacctcacctttgatgggacctttgagcacctgtatgtcatgacccagagcacacttctgaaggttcctgtggcttcctgtgctcagcacctggactgtgcatcttgccttgctcacagggacccatactgtgggtggtgcgtgctccttggcaggtgcagtcgccgttctgagtgctcgaggggccagggcccagagcagtggctatggagcttccagcctgagctgggctgtctgcaagtggcagccatgagtcctgccaacatcagccgagaggagacgagggaggttttcctatcagtgccagacctgccacccctgtggccaggggagtcatattcctgccactttggggaacatcagagtcctgccctgctgactggttctggtgtgatgtgcccctccccagaccctagtgaggccccagtgctgccgagaggagccgactacgtatccgtgagcgtggagctcagatttggcgctgttgtgatcgccaaaacttccctctctttctatgactgtgtggcggtcactgaactccgcccatctgcgcagtgccaggcctgtgtgagcagccgctgggggtgtaactggtgtgtctggcagcacctgtgcacccacaaggcctcgtgtgatgctgggcccatggttgcaagccatcagagcccgcttgtctccccagaccctcctgcaagaggtgatggagactcagcagagcttgagggccctcccgcccccctcatcctcccgtccagcctcgactaccagtatgacacccccgggctctgggagctggaagaggcgaccttgggggcaagctcctgcccctgtgtggagagcgttcagggctccacgttgatgccggtccatgtggagcgggaaatccggctgctaggcaggaacctgcaccttttccaggatggcccaggagacaatgagtgtgtgatggagctggagggcctcgaggtggtggttgaggcccgggtcgagtgtgagccacctccagatacccagtgccatgtcacctgccagcagcaccagctcagctatgaggctctgcagccggagctccgtgtggggctgtttctgcgtcgggccggccgtctgcgtgtggacagtgctgaggggctgcatgtggtactgtatgactgttccgtgggacatggagactgcagccgctgccaaactgccatgccccagtatggctgtgtgtggtgtgagggggagcgtccacgttgtgtgacccgggaggcctgtggtgaggctgaggctgtggccacccagtgcccagcgcccctcatccactcggtggagccactgactgggcctgtagacggaggcacccgtgtcaccatcaggggctccaacctgggccagcatgtgcaggatgtgctgggcatggtcacggtggctggagtgccctgtgctgtggatgcccaggagtacgaggtctccagcagcctcgtgtgcatcaccggggccagtggggaggaggtggccggcgccacagcggtggaggtgccgggaagaggacgtggtgtctcagaacacgactttgcctaccaggatccgaaggtccattccatcttcccggcccgcggccccagagctgggggcacccgtctcaccctgaatggctccaagctcctgactgggcggctggaggacatccgagtggtggttggagaccagccttgtcacttgctgccggagcagcagtcagaacaactgcggtgtgagaccagcccacgccccacgcctgccacgctccctgtggctgtgtggtttggggccacggagcggaggcttcaacgcggacagttcaagtataccttggaccccaacatcacctctgctggccccaccaagagcttcctcagtggaggacgtgagatatgcgtccgtggccagaatctggacgtggtacagacgccaagaatccgggtgaccgtggtctcgagaatgctgcagcccagccaggggcttggacggaggcgtcgcgtggtcccggagacggcatgttcccttggaccctcctgcagtagccagcaatttgaggagccgtgccatgtcaactcctcccagctcatcacgtgccgcacacctgccctcccaggcctgcctgaggacccctgggtccgggtggaatttatccttgacaacctggtctttgactttgcaacactgaaccccacacctttctcctatgaggccgaccccaccctgcagccactcaaccctgaggaccccaccatgccattccggcacaagcctgggagtgtgttctccgtggagggggagaacctggaccttgcaatgtccaaggaggaggtggtggctatgataggggatggcccctgtgtggtgaagacgctgacgcggcaccacctgtactgcgagccccccgtggagcagcccctgccacggcaccatgccctccgagaggcacctgactctttgcctgagttcacggtgcagatggggaacttgcgcttctccctgggtcacgtgcagtatgacggcgagagccctggggcttttcctgtggcagcccaggtgggcttgggggtgggcacctctcttctggctctgggtgtcatcatcattgtcctcatgtacaggaggaagagcaagcaggccctgagggactataagaaggttcagatccagctggagaatctggagagcagtgtgcgggaccgctgcaagaaggaattcacagacctcatgactgagatgaccgatctcaccagtgacctcctgggcagcggcatccccttcctcgactacaaggtgtatgcggagaggatcttcttccctgggcaccgcgagtcgcccttgcaccgggacctgggtgtgcctgagagcagacggcccactgtggagcaagggctggggcagctctctaacctgctcaacagcaagctcttcctcaccaagttcatccacacgctggagagccagcgcaccttttcagctcgggaccgtgcctacgtggcatctctgctcaccgtggcactgcatgggaagcttgagtatttcactgacatcctccgcactctgctcagtgacctggttgcccagtatgtggccaagaaccccaagctgatgctgcgcaggacagagactgtggtggagaagctgctcaccaactggatgtccatctgtctgtataccttcgtgagggactccgtaggggagcctctgtacatgctctttcgagggattaagcaccaagtggataaggggccagtggacagtgtgacaggcaaggccaaatacaccttgaacgacaaccgcctgctcagagaggatgtggagtaccgtcccctgaccttgaatgcactattggctgtggggcctggggcaggagaggcccagggcgtgcccgtgaaggtcctagactgtgacaccatctcccaggcaaaggagaagatgctggaccagctttataaaggagtgcctctcacccagcggccagaccctcgcacccttgatgttgagtggcggtctggggtggccgggcacctcattctttctgacgaggatgtcacttctgaggtccagggtctgtggaggcgcctgaacacactgcagcattacaaggtcccagatggagcaactgtggccctcgtcccctgcctcaccaagcatgtgctccgggaaaaccaggattatgtccctggagagcggaccccaatgctggaggatgtagatgaggggggcatccggccctggcacctggtgaagccaagtgatgagccggagccgcccaggcctcggaggggcagccttcggggcggggagcgtgagcgcgccaaggccatccctgagatctacctgacccgcctgctgtccatgaagggcaccctgcagaagttcgtggatgacctgttccaggtgattctcagcaccagccgccccgtgccgctcgctgtgaagtacttctttgacctgctggatgagcaggcccagcagcatggcatctccgaccaggacaccatccacatctggaagaccaacagcttgcctctgaggttctggatcaatataataaaaaacccgcagtttgtgttcgacgtgcaaacatctgataacatggatgcggtgctccttgtcattgcacagaccttcatggacgcctgcaccctggccgaccacaagctgggccgggactccccgatcaacaaacttctgtatgcacgggacattccccggtacaagcggatggtggaaaggtactatgcagacatcagacagactgtcccagccagcgaccaagagatgaactctgtcctggctgaactgtcctggaactactccggagacctcggggcgcgagtggccctgcatgaactctacaagtacatcaacaagtactatgaccagatcatcactgccctggaggaggatggcacggcccagaagatgcagctgggctatcggctccagcagattgcagctgctgtggaaaacaaggtcacagatctataggaacccaggagccacggcctgctgttgcttcagcctggcctgggcagccctggaagctcggaggagaggccaccttcttaggtgcctgtagtgactgacaagcagagttagtggaaggtgactcccagtctcctggtggctctggcctcggccctgctggatccacctcctagacccggggcctcaaggctcatggggtagtacccagcctgctccccgagtccagcgaccctgtgacaccggtctgcagggagttggggactaagggcttccagagagtggctggaagagactccaggcccctggggagactgtactgttcctgaacactggccttggccacactgggattcggagaggaaggaggagagccccatgcttcctgtctgcctcctccaccatccctgacctcagttgagctgcctctggccttgttgctgctgccacatcctaggtctaagagttgaacgcctctcctaggccactacaaactgacccctcagcagggctggctgccacagggctgccctgcctcataggtagccatggtgagggctatctgctgcaggggggtcttggggagagtggtgactccattgacccagcttttcattaaaggataacacactgc

SEQ ID NO: 47517 - DNA, 7308 bp, Artificial Sequence
  derived and/or modified sequence
gcccggccgacgcggctttgtctcctttgttcccggcggtggcagcgccgcgcgggaggggcgggcagcgggcgcagttttccgcccctcggtctccgggtaacagctgcggctccaccagacccggggagaggccgctgcgcgcggagcccgagcccggagcggccgacgcccgcctcggcgcgcacatcccgcggggcccggccgggtggtgactcccacacgggtcatgctgttgtctcctgatccagccggccctgccaggtgaccatgcctgctctgggcccagctcttctccaggctctctgggccgggtgggtcctcaccctccagccccttccaccaactgcattcactcccaatggcacgtatctgcagcacctggcaagggaccccacctcaggcaccctctacctgggggctaccaacttcctgttccagctgagccctgggctgcagctggaggccacagtgtccaccggccctgtgctagacagcagggactgcctgccacctgtgatgcctgatgagtgcccccaggcccagcctaccaacaacccgaatcagctgctcctggtgagcccaggggccctggtggtatgcgggagcgtgcaccagggggtctgtgaacagcggcgcctggggcagctcgagcagctgctgctgcggccagagcggcctggggacacacaatatgtggctgccaatgatcctgcggtcagcacggtggggctggtagcccagggcttggcaggggagcccctcctgtttgtggggcgaggatacaccagcaggggtgtggggggtggcattccacccatcacaacccgggccctgtggccgcccgacccccaagctgccttctcctatgaggagacagccaagctggcagtgggccgcctctccgagtacagccaccacttcgtgagtgcctttgcacgtggggccagcgcctacttcctgttcctgcggcgggacctgcaggctcagtctagagcttttcgtgcctatgtatctcgagtgtgtctccgggaccagcactactactcctatgtggagttgcctctggcctgcgaaggtggccgctacgggctgatccaggctgcagctgtggccacgtccagggaggtggcgcatggggaggtgctctttgcagctttctcctcggctgcaccccccactgtgggccggcccccatcggcggctgctggggcatctggagcctctgccctctgtgccttccccctggatgaggtggaccggcttgctaatcgcacgcgagatgcctgctacacccgggagggtcgtgctgaggatgggaccgaggtggcctacatcgagtatgatgtcaattctgactgtgcacagctgccagtggacaccctggatgcttatccctgtggctcagaccacacgcccagccccatggccagccgggtcccgctggaagccacaccaattctggagtggccagggattcagctaacagctgtggcagtcaccatggaagatggacacaccatcgctttcctgggtgatagtcaagggcagctgcacagggtctacttgggcccagggagcgatggccacccatactccacacagagcatccagcaggggtctgcagtgagcagagacctcacctttgatgggacctttgagcacctgtatgtcatgacccagagcacacttctgaaggttcctgtggcttcctgtgctcagcacctggactgtgcatcttgccttgctcacagggacccatactgtgggtggtgcgtgctccttggcaggtgcagtcgccgttctgagtgctcgaggggccagggcccagagcagtggctatggagcttccagcctgagctgggctgtctgcaagtggcagccatgagtcctgccaacatcagccgagaggagacgagggaggttttcctatcagtgccagacctgccacccctgtggccaggggagtcatattcctgccactttggggaacatcagagtcctgccctgctgactggttctggtgtgatgtgcccctccccagaccctagtgaggccccagtgctgccgagaggagccgactacgtatccgtgagcgtggagctcagatttggcgctgttgtgatcgccaaaacttccctctctttctatgactgtgtggcggtcactgaactccgcccatctgcgcagtgccaggcctgtgtgagcagccgctgggggtgtaactggtgtgtctggcagcacctgtgcacccacaaggcctcgtgtgatgctgggcccatggttgcaagccatcagagcccgcttgtctccccagaccctcctgcaagaggtggacccagcccctccccacccacagcccccaaagccctggccacccctgctcctgacacccttcccgtggagcctggggctccctccacagccacagcttcggacatctcacctggggctagtccttccctgctcagcccctgggggccatgggcaggttctggctccatatcttcccctggctccacagggtcgcctctccatgaggagccctcccctcccagcccccaaaatggacctggaaccgctgtccctgcccccactgacttcagaccctcagccacacctgaggacctcttggcctccccgctgtcaccgtcagaggtagcagcagtgccccctgcagaccctggccccgaggctcttcatcccacagtgcccctggacctgccccctgccactgttcctgccaccactttcccaggggccatgggctccgtgaagcccgccctggactggctcacgagagaaggcggcgagctgcccgaggcggacgagtggacggggggtgacgcacccgccttctccacttccaccctcctctcaggtgatggagactcagcagagcttgagggccctcccgcccccctcatcctcccgtccagcctcgactaccagtatgacacccccgggctctgggagctggaagaggcgaccttgggggcaagctcctgcccctgtgtggagagcgttcagggctccacgttgatgccggtccatgtggagcgggaaatccggctgctaggcaggaacctgcaccttttccaggatggcccaggagacaatgagtgtgtgatggagctggagggcctcgaggtggtggttgaggcccgggtcgagtgtgagccacctccagatacccagtgccatgtcacctgccagcagcaccagctcagctatgaggctctgcagccggagctccgtgtggggctgtttctgcgtcgggccggccgtctgcgtgtggacagtgctgaggggctgcatgtggtactgtatgactgttccgtgggacatggagactgcagccgctgccaaactgccatgccccagtatggctgtgtgtggtgtgagggggagcgtccacgttgtgtgacccgggaggcctgtggtgaggctgaggctgtggccacccagtgcccagcgcccctcatccactcggtggagccactgactgggcctgtagacggaggcacccgtgtcaccatcaggggctccaacctgggccagcatgtgcaggatgtgctgggcatggtcacggtggctggagtgccctgtgctgtggatgcccaggagtacgaggtctccagcagcctcgtgtgcatcaccggggccagtggggaggaggtggccggcgccacagcggtggaggtgccgggaagaggacgtggtgtctcagaacacgactttgcctaccaggatccgaaggtccattccatcttcccggcccgcggccccagagctgggggcacccgtctcaccctgaatggctccaagctcctgactgggcggctggaggacatccgagtggtggttggagaccagccttgtcacttgctgccggagcagcagtcagaacaactgcggtgtgagaccagcccacgccccacgcctgccacgctccctgtggctgtgtggtttggggccacggagcggaggcttcaacgcggacagttcaagtataccttggaccccaacatcacctctgctggccccaccaagagcttcctcagtggaggacgtgagatatgcgtccgtggccagaatctggacgtggtacagacgccaagaatccgggtgaccgtggtctcgagaatgctgcagcccagccaggggcttggacggaggcgtcgcgtggtcccggagacggcatgttcccttggaccctcctgcagtagccagcaatttgaggagccgtgccatgtcaactcctcccagctcatcacgtgccgcacacctgccctcccaggcctgcctgaggacccctgggtccgggtggaatttatccttgacaacctggtctttgactttgcaacactgaaccccacacctttctcctatgaggccgaccccaccctgcagccactcaaccctgaggaccccaccatgccattccggcacaagcctgggagtgtgttctccgtggagggggagaacctggaccttgcaatgtccaaggaggaggtggtggctatgataggggatggcccctgtgtggtgaagacgctgacgcggcaccacctgtactgcgagccccccgtggagcagcccctgccacggcaccatgccctccgagaggcacctgactctttgcctgagttcacggtgcagatggggaacttgcgcttctccctgggtcacgtgcagtatgacggcgagagccctggggcttttcctgtggcagcccaggtgggcttgggggtgggcacctctcttctggctctgggtgtcatcatcattgtcctcatgtacaggaggaagagcaagcaggccctgagggactataagaaggttcagatccagctggagaatctggagagcagtgtgcgggaccgctgcaagaaggaattcacagacctcatgactgagatgaccgatctcaccagtgacctcctgggcagcggcatccccttcctcgactacaaggtgtatgcggagaggatcttcttccctgggcaccgcgagtcgcccttgcaccgggacctgggtgtgcctgagagcagacggcccactgtggagcaagggctggggcagctctctaacctgctcaacagcaagctcttcctcaccaagttcatccacacgctggagagccagcgcaccttttcagctcgggaccgtgcctacgtggcatctctgctcaccgtggcactgcatgggaagcttgagtatttcactgacatcctccgcactctgctcagtgacctggttgcccagtatgtggccaagaaccccaagctgatgctgcgcaggacagagactgtggtggagaagctgctcaccaactggatgtccatctgtctgtataccttcgtgagggactccgtaggggagcctctgtacatgctctttcgagggattaagcaccaagtggataaggggccagtggacagtgtgacaggcaaggccaaatacaccttgaacgacaaccgcctgctcagagaggatgtggagtaccgtcccctgaccttgaatgcactattggctgtggggcctggggcaggagaggcccagggcgtgcccgtgaaggtcctagactgtgacaccatctcccaggcaaaggagaagatgctggaccagctttataaaggagtgcctctcacccagcggccagaccctcgcacccttgatgttgagtggcggtctggggtggccgggcacctcattctttctgacgaggatgtcacttctgaggtccagggtctgtggaggcgcctgaacacactgcagcattacaaggtcccagatggagcaactgtggccctcgtcccctgcctcaccaagcatgtgctccgggaaaaccaggattatgtccctggagagcggaccccaatgctggaggatgtagatgaggggggcatccggccctggcacctggtgaagccaagtgatgagccggagccgcccaggcctcggaggggcagccttcggggcggggagcgtgagcgcgccaaggccatccctgagatctacctgacccgcctgctgtccatgaagggcaccctgcagaagttcgtggatgacctgttccaggtgattctcagcaccagccgccccgtgccgctcgctgtgaagtacttctttgacctgctggatgagcaggcccagcagcatggcatctccgaccaggacaccatccacatctggaagaccaacagcttgcctctgaggttctggatcaatataataaaaaacccgcagtttgtgttcgacgtgcaaacatctgataacatggatgcggtgctccttgtcattgcacagaccttcatggacgcctgcaccctggccgaccacaagctgggccgggactccccgatcaacaaacttctgtatgcacgggacattccccggtacaagcggatggtggaaaggtactatgcagacatcagacagactgtcccagccagcgaccaagagatgaactctgtcctggctgaactgtcctggaactactccggagacctcggggcgcgagtggccctgcatgaactctacaagtacatcaacaagtactatgaccagatcatcactgccctggaggaggatggcacggcccagaagatgcagctgggctatcggctccagcagattgcagctgctgtggaaaacaaggtcacagatctataggaacccaggagccacggcctgctgttgcttcagcctggcctgggcagccctggaagctcggaggagaggccaccttcttaggtgcctgtagtgactgacaagcagagttagtggaaggtgactcccagtctcctggtggctctggcctcggccctgctggatccacctcctagacccggggcctcaaggctcatggggtagtacccagcctgctccccgagtccagcgaccctgtgacaccggtctgcagggagttggggactaagggcttccagagagtggctggaagagactccaggcccctggggagactgtactgttcctgaacactggccttggccacactgggattcggagaggaaggaggagagccccatgcttcctgtctgcctcctccaccatccctgacctcagttgagctgcctctggccttgttgctgctgccacatcctaggtctaagagttgaacgcctctcctaggccactacaaactgacccctcagcagggctggctgccacagggctgccctgcctcataggtagccatggtgagggctatctgctgcaggggggtcttggggagagtggtgactccattgacccagcttttcattaaaggataacacactg
